(19) United States
(12) Patent Application Publication
(10) Pub. No.: US 2006/0107345 A1
(43) Pub. Date: May 18, 2006

(54) Sequence-determined DNA fragments and corresponding polypeptides encoded thereby

(76) Inventors: Nickolai Alexandrov, Thousands Oaks, CA (US); Vyacheslav Brover, Simi Valley, CA (US)

Correspondence Address: BIRCH STEWART KOLASCH & BIRCH, PO BOX 747, FALLS CHURCH, VA, 22040-0747, US

(21) Appl. No.: 10/953,349

(22) Filed: Sep. 30, 2004

Related U.S. Application Data
(60) Provisional application No. 60/507,912, filed on Sep. 30, 2003.

(51) Int. Cl. A01H 5/00; C07K 14/415; C07K 16/40; C12Q 1/68; C07H 21/04; C12N 15/82; C12N 5/04

(52) U.S. Cl. 800/278; 435/6; 435/419; 435/468; 530/370; 536/23.6; 530/388.1

(57) ABSTRACT

The present invention provides DNA molecules that constitute fragments of the genome of a plant, and polypeptides encoded thereby. The DNA molecules are useful for specifying a gene product in cells, either as a promoter or as a protein coding sequence or as an UTR or as a 3′ termination sequence, and are also useful in controlling the behavior of a gene in the chromosome, in controlling the expression of a gene or as tools for genetic mapping, recognizing or isolating identical or related DNA fragments, or identification of a particular individual organism, or for clustering of a group of organisms with a common trait.

### CROSS REFERENCES TO RELATED APPLICATIONS

[0001] This nonprovisional application claims priority under 35 U.S.C. § 119(e) to U.S. Provisional Application No. 60/507,912 filed on Sep. 30, 2003 the contents of which are hereby incorporated by reference.

[0002] This application contains a CDR, the entire contents of which are hereby incorporated by reference. The CDR contains the following files:

| File Name | Create Date | File Size (bytes) |
|---|---|---|
| reference.311987.710-0004-55300-US-U-36573.01_1 | Sep. 30, 2004 | 6,331,901 |
| reference.311987.710-0004-55300-US-U-36573.01_2 | Sep. 30, 2004 | 6,294,280 |
| reference.311987.710-0004-55300-US-U-36573.01_3 | Sep. 30, 2004 | 94,609 |
| reference.3708.710-0004-55300-US-U-36573.01_1 | Sep. 30, 2004 | 293,688 |
| reference.3769.710-0004-55300-US-U-36573.01_1 | Sep. 30, 2004 | 7,169,793 |
| reference.3769.710-0004-55300-US-U-36573.01_2 | Sep. 30, 2004 | 7,231,976 |
| reference.3769.710-0004-55300-US-U-36573.01_3 | Sep. 30, 2004 | 7,306,067 |
| reference.3769.710-0004-55300-US-U-36573.01_4 | Sep. 30, 2004 | 1,237,235 |
| reference.3847.710-0004-55300-US-U-36573.01_1 | Sep. 30, 2004 | 6,241,107 |
| reference.3847.710-0004-55300-US-U-36573.01_2 | Sep. 30, 2004 | 6,577,300 |
| reference.3847.710-0004-55300-US-U-36573.01_3 | Sep. 30, 2004 | 7,065,308 |
| reference.3847.710-0004-55300-US-U-36573.01_4 | Sep. 30, 2004 | 4,397,846 |
| reference.4565.710-0004-55300-US-U-36573.01_5 | Sep. 30, 2004 | 6,149,678 |
| reference.4565.710-0004-55300-US-U-36573.01_7 | Sep. 30, 2004 | 6,731,479 |
| reference.4565.710-0004-55300-US-U-36573.01_8 | Sep. 30, 2004 | 55,540 |
| sequences.311987.710-0004-55300-US-U-36573.01_1 | Sep. 30, 2004 | 8,377,930 |
| sequences.311987.710-0004-55300-US-U-36573.01_2 | Sep. 30, 2004 | 7,016,312 |
| sequences.311987.710-0004-55300-US-U-36573.01_3 | Sep. 30, 2004 | 155,530 |
| sequences.3708.710-0004-55300-US-U-36573.01_1 | Sep. 30, 2004 | 242,818 |
| sequences.3769.710-0004-55300-US-U-36573.01_1 | Sep. 30, 2004 | 9,440,562 |
| sequences.3769.710-0004-55300-US-U-36573.01_2 | Sep. 30, 2004 | 9,975,620 |
| sequences.3769.710-0004-55300-US-U-36573.01_3 | Sep. 30, 2004 | 9,895,080 |
| sequences.3769.710-0004-55300-US-U-36573.01_4 | Sep. 30, 2004 | 1,999,218 |
| sequences.3847.710-0004-55300-US-U-36573.01_1 | Sep. 30, 2004 | 6,959,939 |
| sequences.3847.710-0004-55300-US-U-36573.01_2 | Sep. 30, 2004 | 7,920,003 |
| sequences.3847.710-0004-55300-US-U-36573.01_3 | Sep. 30, 2004 | 9,433,164 |
| sequences.3847.710-0004-55300-US-U-36573.01_4 | Sep. 30, 2004 | 5,735,823 |
| sequences.4565.710-0004-55300-US-U-36573.01_5 | Sep. 30, 2004 | 7,296,942 |
| sequences.4565.710-0004-55300-US-U-36573.01_7 | Sep. 30, 2004 | 8,264,386 |
| sequences.4565.710-0004-55300-US-U-36573.01_8 | Sep. 30, 2004 | 92,716 |

### FIELD OF THE INVENTION

[0003] The present invention relates to isolated polynucleotides that represent a complete gene, or a fragment thereof, that is expressed. In addition, the present invention relates to the polypeptide or protein corresponding to the coding sequence of these polynucleotides. The present invention also relates to isolated polynucleotides that represent regulatory regions of genes. The present invention also relates to isolated polynucleotides that represent untranslated regions of genes. The present invention further relates to the use of these isolated polynucleotides and polypeptides and proteins.

### DESCRIPTION OF THE RELATED ART

[0004] Efforts to map and sequence the genome of a number of organisms are in progress; a few complete genome sequences, for example those of E. coli and Saccharomyces cerevisiae are known (Blattner et al., Science 277:1453 (1997); Goffeau et al., Science 274:546 (1996)). The complete genome of a multicellular organism, C. elegans, has also been sequenced (See, the C. elegans Sequencing Consortium, Science 282:2012 (1998)).

### SUMMARY OF THE INVENTION

[0005] The present invention comprises polynucleotides, such as complete cDNA sequences and/or sequences of genomic DNA encompassing complete genes, fragments of genes, and/or regulatory elements of genes and/or regions with other functions and/or intergenic regions, hereinafter collectively referred to as Sequence-Determined DNA Fragments (SDFs), from different plant species, particularly corn, wheat, soybean, rice and Arabidopsis thaliana, and other plants and or mutants, variants, fragments or fusions of said SDFs and polypeptides or proteins derived therefrom. In some instances, the SDFs span the entirety of a protein-coding segment. In some instances, the entirety of an mRNA is represented. Other objects of the invention that are also represented by SDFs of the invention are control sequences, such as, but not limited to, promoters. Complements of any sequence of the invention are also considered part of the invention.

[0006] Other objects of the invention are polynucleotides comprising exon sequences, polynucleotides comprising intron sequences, polynucleotides comprising introns together with exons, intron/exon junction sequences, 5′ untranslated sequences, and 3′ untranslated sequences of the SDFs of the present invention. Polynucleotides representing the joinder of any exons described herein, in any arrangement, for example, to produce a sequence encoding any desirable amino acid sequence are within the scope of the invention.

[0007] The present invention also resides in probes useful for isolating and identifying nucleic acids that hybridize to an SDF of the invention. The probes can be of any length, but more typically are 12-2000 nucleotides in length; more typically, 15 to 200 nucleotides long; even more typically, 18 to 100 nucleotides long.

[0008] Yet another object of the invention is a method of isolating and/or identifying nucleic acids using the following steps:

[0009] (a) contacting a probe of the instant invention with a polynucleotide sample under conditions that permit hybridization and formation of a polynucleotide duplex; and

[0010] (b) detecting and/or isolating the duplex of step (a).

[0011] The conditions for hybridization can be from low to moderate to high stringency conditions. The sample can include a polynucleotide having a sequence unique in a plant genome. Probes and methods of the invention are useful, for example, without limitation, for mapping of genetic traits and/or for positional cloning of a desired fragment of genomic DNA.

[0012] Probes and methods of the invention can also be used for detecting alternatively spliced messages within a species. Probes and methods of the invention can further be used to detect or isolate related genes in other plant species using genomic DNA (gDNA) and/or cDNA libraries. In some instances, especially when longer probes and low to moderate stringency hybridization conditions are used; the probe will hybridize to a plurality of cDNA and/or gDNA sequences of a plant. This approach is useful for isolating representatives of gene families which are identifiable by possession of a common functional domain in the gene product or which have common cis-acting regulatory sequences. This approach is also useful for identifying orthologous genes from other organisms.

[0013] The present invention also resides in constructs for modulating the expression of the genes comprised of all or a fragment of an SDF. The constructs comprise all or a fragment of the expressed SDF, or of a complementary sequence. Examples of constructs include ribozymes comprising RNA encoded by an SDF or by a sequence complementary thereto, antisense constructs, constructs comprising coding regions or parts thereof, constructs comprising promoters, introns, untranslated regions, scaffold attachment regions, methylating regions, enhancing or reducing regions, DNA and chromatin conformation modifying sequences, etc. Such constructs can be constructed using viral, plasmid, bacterial artificial chromosomes (BACs), plasmid artificial chromosomes (PACs), autonomous plant plasmids, plant artificial chromosomes or other types of vectors and exist in the plant as autonomous replicating sequences or as DNA integrated into the genome. When inserted into a host cell the construct is, preferably, functionally integrated with, or operatively linked to, a heterologous polynucleotide. For instance, a coding region from an SDF might be operably linked to a promoter that is functional in a plant.

[0014] The present invention also resides in host cells, including bacterial or yeast cells or plant cells, and plants that harbor constructs such as described above. Another aspect of the invention relates to methods for modulating expression of specific genes in plants by expression of the coding sequence of the constructs, by regulation of expression of one or more endogenous genes in a plant or by suppression of expression of the polynucleotides of the invention in a plant. Methods of modulation of gene expression include without limitation (1) inserting into a host cell additional copies of a polynucleotide comprising a coding sequence; (2) modulating an endogenous promoter in a host cell; (3) inserting antisense or ribozyme constructs into a host cell and (4) inserting into a host cell a polynucleotide comprising a sequence encoding a variant, fragment, or fusion of the native polypeptides of the instant invention.

### BRIEF DESCRIPTION OF THE TABLES

[0015] The sequences of exemplary SDFs and polypeptides corresponding to the coding sequences of the instant invention are described in any of the Reference Tables 1-1, 1-2, etc. (hereinafter referred to as “the REF Tables”); and in any of the Sequence Tables 2-1, 2-2, etc. (hereinafter referred to as “the SEQ Tables”). The REF Tables refer to a number of “Maximum Length Sequences” or “MLS.” Each MLS corresponds to the longest cDNA obtained, either by cloning or by the prediction from genomic sequence. The sequence of the MLS is the cDNA sequence as described in the Av subsection of the REF Tables.

[0016] The REF Tables include the following information relating to each MLS:

[0017] I. cDNA Sequence
[0018] A. 5′ UTR
[0019] B. Coding Sequence
[0020] C. 3′ UTR

[0021] II. Genomic Sequence
[0022] A. Exons
[0023] B. Introns
[0024] C. Promoters

[0025] III. Link of cDNA Sequences to Clone IDs

[0026] IV. Multiple Transcription Start Sites

[0027] V. Polypeptide Sequences
[0028] A. Signal Peptide
[0029] B. Domains
[0030] C. Related Polypeptides

[0031] VI. Related Polynucleotide Sequences

I. cDNA Sequence

[0032] The REF Tables indicate which sequence in The SEQ Tables represent the sequence of each MLS. The MLS sequence can comprise 5′ and 3′ UTR as well as coding sequences. In addition, specific cDNA clone numbers also are included in The REF Tables when the MLS sequence relates to a specific cDNA clone.
[0033] A. 5′ UTR

[0034] The location of the 5′ UTR can be determined by comparing the most 5′ MLS sequence with the corresponding genomic sequence as indicated in The REF Tables. The sequence that matches, beginning at any of the transcriptional start sites and ending at the last nucleotide before any of the translational start sites corresponds to the 5′ UTR.
[0035] B. Coding Region

[0036] The coding region is the sequence in any open reading frame found in the MLS. Coding regions of interest are indicated in the PolyP SEQ subsection of The REF Tables.
[0037] C. 3′ UTR

[0038] The location of the 3′ UTR can be determined by comparing the most 3′ MLS sequence with the corresponding genomic sequence as indicated in The REF Tables. The sequence that matches, beginning at the translational stop site and ending at the last nucleotide of the MLS corresponds to the 3′ UTR.

II. Genomic Sequence

[0039] Further, the REF Tables indicate the specific “gi” number of the genomic sequence if the sequence resides in a public databank. For each genomic sequence, the REF Tables indicate which regions are included in the MLS. These regions can include the 5′ and 3′ UTRs as well as the coding sequence of the MLS. See, for example, the scheme below:

[chemical structure]

[0040] The REF Tables report the first and last base of each region that are included in an MLS sequence. An example is shown below:

[0041] gi No. 47000:

[0042] 37102 . . . 37497

[0043] 37593 . . . 37925

The numbers indicate that the MLS contains the following sequences from two regions of gi No. 47000; a first region including bases 37102-37497, and a second region including bases 37593-37925.

[0044] A. Exon Sequences

[0045] The location of the exons can be determined by comparing the sequence of the regions from the genomic sequences with the corresponding MLS sequence as indicated by the REF Tables.

[0046] i. Initial Exon

[0047] To determine the location of the initial exon, information from the
[0048] (1) polypeptide sequence section;
[0049] (2) cDNA polynucleotide section; and
[0050] (3) the genomic sequence section
   of the REF Tables are used. First, the polypeptide section will indicate where the translational start site is located in the MLS sequence. The MLS sequence can be matched to the genomic sequence that corresponds to the MLS. Based on the match between the MLS and corresponding genomic sequences, the location of the translational start site can be determined in one of the regions of the genomic sequence. The location of this translational start site is the start of the first exon.

[0051] Generally, the last base of the exon of the corresponding genomic region, in which the translational start site was located, will represent the end of the initial exon. In some cases, the initial exon will end with a stop codon, when the initial exon is the only exon.

[0052] In the case when sequences representing the MLS are in the positive strand of the corresponding genomic sequence, the last base will be a larger number than the first base. When the sequences representing the MLS are in the negative strand of the corresponding genomic sequence, then the last base will be a smaller number than the first base.

[0053] ii. Internal Exons

[0054] Except for the regions that comprise the 5′ and 3′ UTRs, initial exon, and terminal exon, the remaining genomic regions that match the MLS sequence are the internal exons. Specifically, the bases defining the boundaries of the remaining regions also define the intron/exon junctions of the internal exons.

[0055] iii. Terminal Exon

[0056] As with the initial exon, the location of the terminal exon is determined with information from the

[0057] (1) polypeptide sequence section;

[0058] (2) cDNA polynucleotide section; and

[0059] (3) the genomic sequence section

[0060] of the REF Tables. The polypeptide section will indicate where the stop codon is located in the MLS sequence. The MLS sequence can be matched to the corresponding genomic sequence. Based on the match between MLS and corresponding genomic sequences, the location of the stop codon can be determined in one of the regions of the genomic sequence. The location of this stop codon is the end of the terminal exon. Generally, the first base of the exon of the corresponding genomic region that matches the cDNA sequence, in which the stop codon was located, will represent the beginning of the terminal exon. In some cases, the translational start site will represent the start of the terminal exon, which will be the only exon.

[0061] In the case when the MLS sequences are in the positive strand of the corresponding genomic sequence, the last base will be a larger number than the first base. When the MLS sequences are in the negative strand of the corresponding genomic sequence, then the last base will be a smaller number than the first base.

[0062] B. Intron Sequences

[0063] In addition, the introns corresponding to the MLS are defined by identifying the genomic sequence located between the regions where the genomic sequence comprises exons. Thus, introns are defined as starting one base downstream of a genomic region comprising an exon, and end one base upstream from a genomic region comprising an exon.

[0064] C. Promoter Sequences

[0065] As indicated below, promoter sequences corresponding to the MLS are defined as sequences upstream of the first exon; more usually, as sequences upstream of the first of multiple transcription start sites; even more usually as sequences about 2,000 nucleotides upstream of the first of multiple transcription start sites.

III. Link of cDNA Sequences to Clone IDs

[0066] As noted above, the REF Tables identify the cDNA clone(s) that relate to each MLS. The MLS sequence can be longer than the sequences included in the cDNA clones. In such a case, the REF Tables indicate the region of the MLS that is included in the clone. If either the 5′ or 3′ termini of the cDNA clone sequence is the same as the MLS sequence, no mention will be made.

IV. Multiple Transcription Start Sites

[0067] Initiation of transcription can occur at a number of sites of the gene. The REF Tables indicate the possible multiple transcription sites for each gene. In the REF Tables, the location of the transcription start sites can be either a positive or negative number. The positions indicated by positive numbers refer to the transcription start sites as located in the MLS sequence. The negative numbers indicate the transcription start site within the genomic sequence that corresponds to the MLS.

[0068] To determine the location of the transcription start sites with the negative numbers, the MLS sequence is aligned with the corresponding genomic sequence. In the instances when a public genomic sequence is referenced, the relevant corresponding genomic sequence can be found by direct reference to the nucleotide sequence indicated by the “gi” number shown in the public genomic DNA section of the REF Tables. When the position is a negative number, the transcription start site is located in the corresponding genomic sequence upstream of the base that matches the beginning of the MLS sequence in the alignment. The negative number is relative to the first base of the MLS sequence which matches the genomic sequence corresponding to the relevant “gi” number.

[0069] In the instances when no public genomic DNA is referenced, the relevant nucleotide sequence for alignment is the nucleotide sequence associated with the amino acid sequence designated by “gi” number of the later PolyP SEQ subsection.

V. Polypeptide Sequences

[0070] The PolyP SEQ subsection lists SEQ ID NOs and Ceres SEQ ID NO for polypeptide sequences corresponding to the coding sequence of the MLS sequence and the location of the translational start site with the coding sequence of the MLS sequence.

[0071] The MLS sequence can have multiple translational start sites and can be capable of producing more than one polypeptide sequence.

[0072] A. Signal Peptide

[0073] The REF Tables also indicate in subsection (B) the cleavage site of the putative signal peptide of the polypeptide corresponding to the coding sequence of the MLS sequence. Typically, signal peptide coding sequences comprise a sequence encoding the first residue of the polypeptide to the cleavage site residue.

[0074] B. Domains

[0075] Subsection (C) provides information regarding identified domains (where present) within the polypeptide and (where present) a name for the polypeptide domain.

[0076] C. Related Polypeptides

[0077] Subsection (Dp) provides (where present) information concerning amino acid sequences that are found to be related and have some percentage of sequence identity to the polypeptide sequences of the REF Tables and the SEQ Tables. These related sequences are identified by a “gi” number.

VI. Related Polynucleotide Sequences

[0078] Subsection (Dn) provides polynucleotide sequences (where present) that are related to and have some percentage of sequence identity to the MLS or corresponding genomic sequence.

| Abbreviation | Description |
|---|---|
| Max Len. Seq. | Maximum Length Sequence |
| rel to | Related to |
| Clone Ids | Clone ID numbers |
| Pub gDNA | Public Genomic DNA |
| gi No. | gi number |
| Gen. seq. in cDNA | Genomic Sequence in cDNA |
| | (Each region for a single gene prediction is |
| | listed on a separate line. |
| | In the case of multiple gene predictions, the |
| | group of regions relating to a single prediction |
| | are separated by a blank line) |
| (Ac) cDNA SEQ | cDNA sequence |
| Pat. Appln. SEQ ID NO | Patent Application SEQ ID NO: |
| Ceres SEQ ID NO: 1673877 | Ceres SEQ ID NO: |
| SEQ # w. TSS | Location within the cDNA sequence, SEQ ID |
| | NO:, of Transcription Start Sites which are |
| | listed below |
| Clone ID #: # -> # | Clone ID comprises bases # to # of the cDNA Sequence |
| PolyP SEQ | Polypeptide Sequence |
| Pat. Appln. SEQ ID NO: | Patent Application SEQ ID NO: |
| Ceres SEQ ID NO | Ceres SEQ ID NO: |
| Loc. SEQ ID NO: @ nt. | Location of translational start site in cDNA of |
| | SEQ ID NO: at nucleotide number |
| (C) Pred. PP Nom. & Annot. | Nomination and Annotation of Domains within |
| | Predicted Polypeptide(s) |
| (Title) | Name of Domain |
| Loc. SEQ ID NO #: # -> # aa. | Location of the domain within the polypeptide |
| | of SEQ ID NO: from # to # amino acid |
| | residues. |
| (Dp) Rel. AA SEQ | Related Amino Acid Sequences |
| Align. NO | Alignment number |
| gi No | Gi number |
| Desp. | Description |
| % Idnt. | Percent identity |
| Align. Len. | Alignment Length |
| Loc. SEQ ID NO: # -> # aa | Location within SEQ ID NO: from # to # |
| | amino acid residue. |

### DETAILED DESCRIPTION OF THE INVENTION

[0079] The invention relates to (I) polynucleotides and methods of use thereof, such as

[0080] IA. Probes, Primers and Substrates;

[0081] IB. Methods of Detection and Isolation;
[0082] B.1. Hybridization;
[0083] B.2. Methods of Mapping;
[0084] B.3. Southern Blotting;
[0085] B.4. Isolating cDNA from Related Organisms;
[0086] B.5. Isolating and/or Identifying Orthologous Genes

[0087] IC. Methods of Inhibiting Gene Expression
[0088] C.1. Antisense
[0089] C.2. Ribozyme Constructs;
[0090] C.3. Chimeraplasts;
[0091] C.4. Co-Suppression;
[0092] C.5. Transcriptional Silencing
[0093] C.6. Other Methods to Inhibit Gene Expression

[0094] ID. Methods of Functional Analysis;

[0095] IE. Promoter Sequences and Their Use;

[0096] IF. UTRs and/or Intron Sequences and Their Use; and

[0097] IG. Coding Sequences and Their Use.

[0098] The invention also relates to (II) polypeptides and proteins and methods of use thereof, such as

[0099] IIA. Native Polypeptides and Proteins
[0100] A.1 Antibodies
[0101] A.2 In Vitro Applications

[0102] IIB. Polypeptide Variants, Fragments and Fusions
[0103] B.1 Variants
[0104] B.2 Fragments
[0105] B.3 Fusions

[0106] The invention also includes (III) methods of modulating polypeptide production, such as

[0107] IIIA. Suppression
[0108] A.1 Antisense
[0109] A.2 Ribozymes
[0110] A.3 Co-suppression
[0111] A.4 Insertion of Sequences into the Gene to be Modulated
[0112] A.5 Promoter Modulation
[0113] A.6 Expression of Genes containing Dominant-Negative Mutations

[0114] IIIB. Enhanced Expression
[0115] B.1 Insertion of an Exogenous Gene
[0116] B.2 Promoter Modulation

[0117] The invention further concerns (IV) gene constructs and vector construction, such as

[0118] IVA. Coding Sequences

[0119] IVB. Promoters

[0120] IVC. Signal Peptides

[0121] The invention still further relates to

[0122] V Transformation Techniques

### DEFINITIONS

[0123] Allelic variant An “allelic variant” is an alternative form of the same SDF, which resides at the same chromosomal locus in the organism. Allelic variations can occur in any portion of the gene sequence, including regulatory regions. Allelic variants can arise by normal genetic variation in a population. Allelic variants can also be produced by genetic engineering methods. An allelic variant can be one that is found in a naturally occurring plant, including a cultivar or ecotype. An allelic variant may or may not give rise to a phenotypic change, and may or may not be expressed. An allele can result in a detectable change in the phenotype of the trait represented by the locus. A phenotypically silent allele can give rise to a product.

[0124] Alternatively spliced messages Within the context of the current invention, “alternatively spliced messages” refers to mature mRNAs originating from a single gene with variations in the number and/or identity of exons, introns and/or intron-exon junctions.

[0125] Chimeric The term “chimeric” is used to describe genes, as defined supra, or contructs wherein at least two of the elements of the gene or construct, such as the promoter and the coding sequence and/or other regulatory sequences and/or filler sequences and/or complements thereof, are heterologous to each other.

[0126] Constitutive Promoter: Promoters referred to herein as “constitutive promoters” actively promote transcription under most, but not necessarily all, environmental conditions and states of development or cell differentiation. Examples of constitutive promoters include the cauliflower mosaic virus (CaMV) 35S transcript initiation region and the 1′ or 2′ promoter derived from T-DNA of Agrobacterium tumefaciens, and other transcription initiation regions from various plant genes, such as the maize ubiquitin-1 promoter, known to those of skill.

[0127] Coordinately Expressed: The term “coordinately expressed,” as used in the current invention, refers to genes that are expressed at the same or a similar time and/or stage and/or under the same or similar environmental conditions.

[0128] Domain: Domains are fingerprints or signatures that can be used to characterize protein families and/or parts of proteins. Such fingerprints or signatures can comprise conserved (1) primary sequence, (2) secondary structure, and/or (3) three-dimensional conformation. Generally, each domain has been associated with either a family of proteins or motifs. Typically, these families and/or motifs have been correlated with specific in-vitro and/or in-vivo activities. A domain can be any length, including the entirety of the sequence of a protein. Detailed descriptions of the domains, associated families and motifs, and correlated activities of the polypeptides of the instant invention are described below. Usually, the polypeptides with designated domain(s) can exhibit at least one activity that is exhibited by any polypeptide that comprises the same domain(s).

[0129] Endogenous The term “endogenous,” within the context of the current invention refers to any polynucleotide, polypeptide or protein sequence which is a natural part of a cell or organisms regenerated from said cell.

[0130] Exogenous “Exogenous,” as referred to within, is any polynucleotide, polypeptide or protein sequence, whether chimeric or not, that is initially or subsequently introduced into the genome of an individual host cell or the organism regenerated from said host cell by any means other than by a sexual cross. Examples of means by which this can be accomplished are described below, and include Agrobacterium-mediated transformation (of dicots—e.g. Salomon et al. EMBO J. 3:141 (1984); Herrera-Estrella et al. EMBO J. 2:987 (1983); of monocots, representative papers are those by Escudero et al., Plant J. 10:355 (1996), Ishida et al., Nature Biotechnology 14:745 (1996), May et al., Bio/Technology 13:486 (1995)), biolistic methods (Armaleo et al., Current Genetics 17:97 1990)), electroporation, in planta techniques, and the like. Such a plant containing the exogenous nucleic acid is referred to here as a T₀ for the primary transgenic plant and T₁ for the first generation. The term “exogenous” as used herein is also intended to encompass inserting a naturally found element into a non-naturally found location.

[0131] Filler sequence: As used herein, “filler sequence” refers to any nucleotide sequence that is inserted into DNA construct to evoke a particular spacing between particular components such as a promoter and a coding region and may provide an additional attribute such as a restriction enzyme site.

[0132] Gene: The term “gene,” as used in the context of the current invention, encompasses all regulatory and coding sequence contiguously associated with a single hereditary unit with a genetic function (see SCHEMATIC 1). Genes can include non-coding sequences that modulate the genetic function that include, but are not limited to, those that specify polyadenylation, transcriptional regulation, DNA conformation, chromatin conformation, extent and position of base methylation and binding sites of proteins that control all of these. Genes comprised of “exons” (coding sequences), which may be interrupted by “introns” (non-coding sequences), encode proteins. A gene's genetic function may require only RNA expression or protein production, or may only require binding of proteins and/or nucleic acids without associated expression. In certain cases, genes adjacent to one another may share sequence in such a way that one gene will overlap the other. A gene can be found within the genome of an organism, artificial chromosome, plasmid, vector, etc., or as a separate isolated entity.

[0133] Gene Family: “Gene family” is used in the current invention to describe a group of functionally related genes, each of which encodes a separate protein.

[0134] Heterologous sequences: “Heterologous sequences” are those that are not operatively linked or are not contiguous to each other in nature. For example, a promoter from corn is considered heterologous to an Arabidopsis coding region sequence. Also, a promoter from a gene encoding a growth factor from corn is considered heterologous to a sequence encoding the corn receptor for the growth factor. Regulatory element sequences, such as UTRs or 3′ end termination sequences that do not originate in nature from the same gene as the coding sequence originates from, are considered heterologous to said coding sequence. Elements operatively linked in nature and contiguous to each other are not heterologous to each other. On the other hand, these same elements remain operatively linked but become heterologous if other filler sequence is placed between them. Thus, the promoter and coding sequences of a corn gene expressing an amino acid transporter are not heterologous to each other, but the promoter and coding sequence of a corn gene operatively linked in a novel manner are heterologous.

[0135] Homologous gene In the current invention, “homologous gene” refers to a gene that shares sequence similarity with the gene of interest. This similarity may be in only a fragment of the sequence and often represents a functional domain such as, examples including without limitation a DNA binding domain, a domain with tyrosine kinase activity, or the like. The functional activities of homologous genes are not necessarily the same.

[0136] Inducible Promoter An “inducible promoter” in the context of the current invention refers to a promoter which is regulated under certain conditions, such as light, chemical concentration, protein concentration, conditions in an organism, cell, or organelle, etc. A typical example of an inducible promoter, which can be utilized with the polynucleotides of the present invention, is PARSK1, the promoter from the Arabidopsis gene encoding a serine-threonine kinase enzyme, and which promoter is induced by dehydration, abscissic acid and sodium chloride (Wang and Goodman, Plant J. 8:37 (1995)) Examples of environmental conditions that may affect transcription by inducible promoters include anaerobic conditions, elevated temperature, or the presence of light.

[0137] Intergenic region “Intergenic region,” as used in the current invention, refers to nucleotide sequence occurring in the genome that separates adjacent genes.

[0138] Mutant gene In the current invention, “mutant” refers to a heritable change in DNA sequence at a specific location. Mutants of the current invention may or may not have an associated identifiable function when the mutant gene is transcribed.

[0139] Orthologous Gene In the current invention “orthologous gene” refers to a second gene that encodes a gene product that performs a similar function as the product of a first gene. The orthologous gene may also have a degree of sequence similarity to the first gene. The orthologous gene may encode a polypeptide that exhibits a degree of sequence similarity to a polypeptide corresponding to a first gene. The sequence similarity can be found within a functional domain or along the entire length of the coding sequence of the genes and/or their corresponding polypeptides.

[0140] Percentage of sequence identity “Percentage of sequence identity,” as used herein, is determined by comparing two optimally aligned sequences over a comparison window, where the fragment of the polynucleotide or amino acid sequence in the comparison window may comprise additions or deletions (e.g., gaps or overhangs) as compared to the reference sequence (which does not comprise additions or deletions) for optimal alignment of the two sequences. The percentage is calculated by determining the number of positions at which the identical nucleic acid base or amino acid residue occurs in both sequences to yield the number of matched positions, dividing the number of matched positions by the total number of positions in the window of comparison and multiplying the result by 100 to yield the percentage of sequence identity. Optimal alignment of sequences for comparison may be conducted by the local homology algorithm of Smith and Waterman Add. APL. Math. 2:482 (1981), by the homology alignment algorithm of Needleman and Wunsch J. Mol. Biol. 48:443 (1970), by the search for similarity method of Pearson and Lipman Proc. Natl. Acad. Sci. (USA) 85: 2444 (1988), by computerized implementations of these algorithms (GAP, BESTFIT, BLAST, PASTA, and TFASTA in the Wisconsin Genetics Software Package, Genetics Computer Group (GCG), 575 Science Dr., Madison, Wis.), or by inspection. Given that two sequences have been identified for comparison, GAP and BESTFIT are preferably employed to determine their optimal alignment. Typically, the default values of 5.00 for gap weight and 0.30 for gap weight length are used. The term “substantial sequence identity” between polynucleotide or polypeptide sequences refers to polynucleotide or polypeptide comprising a sequence that has at least 80% sequence identity, preferably at least 85%, more preferably at least 90% and most preferably at least 95%, even more preferably, at least 96%, 97%, 98% or 99% sequence identity compared to a reference sequence using the programs.

[0141] Plant Promoter A “plant promoter” is a promoter capable of initiating transcription in plant cells and can drive or facilitate transcription of a fragment of the SDF of the instant invention or a coding sequence of the SDF of the instant invention. Such promoters need not be of plant origin. For example, promoters derived from plant viruses, such as the CaMV35S promoter or from Agrobacterium tumefaciens such as the T-DNA promoters, can be plant promoters. A typical example of a plant promoter of plant origin is the maize ubiquitin-1 (ubi-1) promoter known to those of skill.

[0142] Promoter: The term “promoter,” as used herein, refers to a region of sequence determinants located upstream from the start of transcription of a gene and which are involved in recognition and binding of RNA polymerase and other proteins to initiate and modulate transcription. A basal promoter is the minimal sequence necessary for assembly of a transcription complex required for transcription initiation. Basal promoters frequently include a “TATA box” element usually located between 15 and 35 nucleotides upstream from the site of initiation of transcription. Basal promoters also sometimes include a “CCAAT box” element (typically a sequence CCAAT) and/or a GGGCG sequence, usually located between 40 and 200 nucleotides, preferably 60 to 120 nucleotides, upstream from the start site of transcription.

[0143] Public sequence: The term “public sequence,” as used in the context of the instant application, refers to any sequence that has been deposited in a publicly accessible database. This term encompasses both amino acid and nucleotide sequences. Such sequences are publicly accessible, for example, on the BLAST databases on the NCBI FTP web site (accessible at ncbi.nlm.gov/blast). The database at the NCBI GTP site utilizes “gi” numbers assigned by NCBI as a unique identifier for each sequence in the databases, thereby providing a non-redundant database for sequence from various databases, including GenBank, EMBL, DBBJ, (DNA Database of Japan) and PDB (Brookhaven Protein Data Bank).

[0144] Regulatory Sequence The term “regulatory sequence,” as used in the current invention, refers to any nucleotide sequence that influences transcription or translation initiation and rate, and stability and/or mobility of the transcript or polypeptide product. Regulatory sequences include, but are not limited to, promoters, promoter control elements, protein binding sequences, 5′ and 3′ UTRs, transcriptional start site, termination sequence, polyadenylation sequence, introns, certain sequences within a coding sequence, etc.

[0145] Related Sequences: “Related sequences” refer to either a polypeptide or a nucleotide sequence that exhibits some degree of sequence similarity with a sequence described by the REF Tables and the SEQ Tables.

[0146] Scaffold Attachment Region (SAR) As used herein, “scaffold attachment region” is a DNA sequence that anchors chromatin to the nuclear matrix or scaffold to generate loop domains that can have either a transcriptionally active or inactive structure (Spiker and Thompson (1996) Plant Physiol. 110: 15-21).

[0147] Sequence-determined DNA fragments (SDFs) “Sequence-determined DNA fragments” as used in the current invention are isolated sequences of genes, fragments of genes, intergenic regions or contiguous DNA from plant genomic DNA or cDNA or RNA the sequence of which has been determined.

[0148] Signal Peptide A “signal peptide” as used in the current invention is an amino acid sequence that targets the protein for secretion, for transport to an intracellular compartment or organelle or for incorporation into a membrane. Signal peptides are indicated in the tables and a more detailed description located below.

[0149] Specific Promoter In the context of the current invention, “specific promoters” refers to a subset of inducible promoters that have a high preference for being induced in a specific tissue or cell and/or at a specific time during development of an organism. By “high preference” is meant at least 3-fold, preferably 5-fold, more preferably at least 10-fold still more preferably at least 20-fold, 50-fold or 100-fold increase in transcription in the desired tissue over the transcription in any other tissue. Typical examples of temporal and/or tissue specific promoters of plant origin that can be used with the polynucleotides of the present invention, are: PTA29, a promoter which is capable of driving gene transcription specifically in tapetum and only during anther development (Koltonow et al., Plant Cell 2:1201 (1990); RCc2 and RCc3, promoters that direct root-specific gene transcription in rice (Xu et al., Plant Mol. Biol. 27:237 (1995); TobRB27, a root-specific promoter from tobacco (Yamamoto et al., Plant Cell 3:371 (1991)). Examples of tissue-specific promoters under developmental control include promoters that initiate transcription only in certain tissues or organs, such as root, ovule, fruit, seeds, or flowers. Other suitable promoters include those from genes encoding storage proteins or the lipid body membrane protein, oleosin. A few root-specific promoters are noted above.

[0150] Stringency “Stringency” as used herein is a function of probe length, probe composition (G+C content), and salt concentration, organic solvent concentration, and temperature of hybridization or wash conditions. Stringency is typically compared by the parameter Tₘ, which is the temperature at which 50% of the complementary molecules in the hybridization are hybridized, in terms of a temperature differential from Tₘ. High stringency conditions are those providing a condition of Tₘ−5° C. to Tₘ−10° C. Medium or moderate stringency conditions are those providing Tₘ−20° C. to Tₘ−29° C. Low stringency conditions are those providing a condition of Tₘ−40° C. to Tₘ−48° C. The relationship of hybridization conditions to Tₘ (in ° C.) is expressed in the mathematical equation
Tₘ=81.5−16.6 (log₁₀ [Na⁺])+0.41(% G+C)−(600/N) (1)
where N is the length of the probe. This equation works well for probes 14 to 70 nucleotides in length that are identical to the target sequence. The equation below for Tₘ of DNA-DNA hybrids is useful for probes in the range of 50 to greater than 500 nucleotides, and for conditions that include an organic solvent (formamide).
Tₘ=81.5+16.6 log {[Na⁺]/(1+0.7[Na⁺])}+0.41(% G+C)−500/L0.63(% formamide) (2)
where L is the length of the probe in the hybrid. (P. Tijessen, “Hybridization with Nucleic Acid Probes” in Laboratory Techniques in Biochemistry and Molecular Biology, P. C. vand der Vliet, ed., c. 1993 by Elsevier, Amsterdam.) The Tₘ of equation (2) is affected by the nature of the hybrid; for DNA-RNA hybrids Tₘ is 10-15° C. higher than calculated, for RNA-RNA hybrids Tₘ is 20-25° C. higher. Because the Tₘ decreases about 1° C. for each 1% decrease in homology when a long probe is used (Bonner et al., J. Mol. Biol. 81:123 (1973)), stringency conditions can be adjusted to favor detection of identical genes or related family members.

[0151] Equation (2) is derived assuming equilibrium and therefore, hybridizations according to the present invention are most preferably performed under conditions of probe excess and for sufficient time to achieve equilibrium. The time required to reach equilibrium can be shortened by inclusion of a hybridization accelerator such as dextran sulfate or another high volume polymer in the hybridization buffer.

[0152] Stringency can be controlled during the hybridization reaction or after hybridization has occurred by altering the salt and temperature conditions of the wash solutions used. The formulas shown above are equally valid when used to compute the stringency of a wash solution. Preferred wash solution stringencies lie within the ranges stated above; high stringency is 5-8° C. below Tₘ, medium or moderate stringency is 26-29° C. below Tₘ and low stringency is 45-48° C. below Tₘ.

[0153] Substantially free of A composition containing A is “substantially free of” B when at least 85% by weight of the total A+B in the composition is A. Preferably, A comprises at least about 90% by weight of the total of A+B in the composition, more preferably at least about 95% or even 99% by weight. For example, a plant gene or DNA sequence can be considered substantially free of other plant genes or DNA sequences.

[0154] Translational start site In the context of the current invention, a “translational start site” is usually an ATG in the cDNA transcript, more usually the first ATG. A single cDNA, however, may have multiple translational start sites.

[0155] Transcription start site “Transcription start site” is used in the current invention to describe the point at which transcription is initiated. This point is typically located about 25 nucleotides downstream from a TFIID binding site, such as a TATA box. Transcription can initiate at one or more sites within the gene, and a single gene may have multiple transcriptional start sites, some of which may be specific for transcription in a particular cell-type or tissue.

[0156] Untranslated region (UTR) A “UTR” is any contiguous series of nucleotide bases that is transcribed, but is not translated. These untranslated regions may be associated with particular functions such as increasing mRNA message stability. Examples of UTRs include, but are not limited to polyadenylation signals, terminations sequences, sequences located between the transcriptional start site and the first exon (5′ UTR) and sequences located between the last exon and the end of the mRNA (3′ UTR).

[0157] Variant: The term “variant” is used herein to denote a polypeptide or protein or polynucleotide molecule that differs from others of its kind in some way. For example, polypeptide and protein variants can consist of changes in amino acid sequence and/or charge and/or post-translational modifications (such as glycosylation, etc).

### DETAILED DESCRIPTION OF THE INVENTION

I. Polynucleotides

[0158] Exemplified SDFs of the invention represent fragments of the genome of corn, wheat, rice, soybean or Arabidopsis and/or represent mRNA expressed from that genome. The isolated nucleic acid of the invention also encompasses corresponding fragments of the genome and/or cDNA complement of other organisms as described in detail below.

[0159] Polynucleotides of the invention can be isolated from polynucleotide libraries using primers comprising sequence similar to those described by the REF Tables and the SEQ Tables. See, for example, the methods described in Sambrook et al., supra.

[0160] Alternatively, the polynucleotides of the invention can be produced by chemical synthesis. Such synthesis methods are described below.

[0161] It is contemplated that the nucleotide sequences presented herein may contain some small percentage of errors. These errors may arise in the normal course of determination of nucleotide sequences. Sequence errors can be corrected by obtaining seeds deposited under the accession numbers cited above, propagating them, isolating genomic DNA or appropriate mRNA from the resulting plants or seeds thereof, amplifying the relevant fragment of the genomic DNA or mRNA using primers having a sequence that flanks the erroneous sequence, and sequencing the amplification product.

[0162] I.A. Probes, Primers and Substrates

[0163] SDFs of the invention can be applied to substrates for use in array applications such as, but not limited to, assays of global gene expression, for example under varying conditions of development, growth conditions. The arrays can also be used in diagnostic or forensic methods (WO95/35505, U.S. Pat. No. 5,445,943 and U.S. Pat. No. 5,410,270).

[0164] Probes and primers of the instant invention will hybridize to a polynucleotide comprising a sequence in the REF Tables and the SEQ Tables. Though many different nucleotide sequences can encode an amino acid sequence, the sequences of the REF Tables and the SEQ Tables are generally preferred for encoding polypeptides of the invention. However, the sequence of the probes and/or primers of the instant invention need not be identical to those in the REF Tables and the SEQ Tables or the complements thereof. For example, some variation in probe or primer sequence and/or length can allow additional family members to be detected, as well as orthologous genes and more taxonomically distant related sequences. Similarly, probes and/or primers of the invention can include additional nucleotides that serve as a label for detecting the formed duplex or for subsequent cloning purposes.

[0165] Probe length will vary depending on the application. For use as primers, probes are 12-40 nucleotides, preferably 18-30 nucleotides long. For use in mapping, probes are preferably 50 to 500 nucleotides, preferably 100-250 nucleotides long. For Southern hybridizations, probes as long as several kilobases can be used as explained below.

[0166] The probes and/or primers can be produced by synthetic procedures such as the triester method of Matteucci et al. J. Am. Chem. Soc. 103:3185 (1981); or according to Urdea et al. Proc. Natl. Acad. 80:7461 (1981) or using commercially available automated oligonucleotide synthesizers.

[0167] I.B. Methods of Detection and Isolation

[0168] The polynucleotides of the invention can be utilized in a number of methods known to those skilled in the art as probes and/or primers to isolate and detect polynucleotides, including, without limitation: Southerns, Northerns, Branched DNA hybridization assays, polymerase chain reaction, and microarray assays, and variations thereof. Specific methods given by way of examples, and discussed below include:

[0169] Hybridization

[0170] Methods of Mapping

[0171] Southern Blotting

[0172] Isolating cDNA from Related Organisms

[0173] Isolating and/or Identifying Orthologous Genes.

[0174] Also, the nucleic acid molecules of the invention can used in other methods, such as high density oligonucleotide hybridizing assays, described, for example, in U.S. Pat. Nos. 6,004,753; 5,945,306; 5,945,287; 5,945,308; 5,919,686; 5,919,661; 5,919,627; 5,874,248; 5,871,973; 5,871,971; and 5,871,930; and PCT Pub. Nos. WO 9946380; WO 9933981; WO 9933870; WO 9931252; WO 9915658; WO 9906572; WO 9858052; WO 9958672; and WO 9810858.

[0175] B.1. Hybridization

[0176] The isolated SDFs of the REF Tables and the SEQ Tables of the present invention can be used as probes and/or primers for detection and/or isolation of related polynucleotide sequences through hybridization. Hybridization of one nucleic acid to another constitutes a physical property that defines the subject SDF of the invention and the identified related sequences. Also, such hybridization imposes structural limitations on the pair. A good general discussion of the factors for determining hybridization conditions is provided by Sambrook et al. (“Molecular Cloning, a Laboratory Manual, 2nd ed., c. 1989 by Cold Spring Harbor Laboratory Press, Cold Spring Harbor, N.Y.; see esp., chapters 11 and 12). Additional considerations and details of the physical chemistry of hybridization are provided by G. H. Keller and M. M. Manak “DNA Probes”, 2^{nd} Ed. pp. 1-25, c. 1993 by Stockton Press, New York, N.Y.

[0177] Depending on the stringency of the conditions under which these probes and/or primers are used, polynucleotides exhibiting a wide range of similarity to those in the REF and SEQ Tables can be detected or isolated. When the practitioner wishes to examine the result of membrane hybridizations under a variety of stringencies, an efficient way to do so is to perform the hybridization under a low stringency condition, then to wash the hybridization membrane under increasingly stringent conditions.

[0178] When using SDFs to identify orthologous genes in other species, the practitioner will preferably adjust the amount of target DNA of each species so that, as nearly as is practical, the same number of genome equivalents are present for each species examined. This prevents faint signals from species having large genomes, and thus small numbers of genome equivalents per mass of DNA, from erroneously being interpreted as absence of the corresponding gene in the genome.

[0179] The probes and/or primers of the instant invention can also be used to detect or isolate nucleotides that are “identical” to the probes or primers. Two nucleic acid sequences or polypeptides are said to be “identical” if the sequence of nucleotides or amino acid residues, respectively, in the two sequences is the same when aligned for maximum correspondence as described below.

[0180] Isolated polynucleotides within the scope of the invention also include allelic variants of the specific sequences presented in the REF and SEQ Tables. The probes and/or primers of the invention can also be used to detect and/or isolate polynucleotides exhibiting at least 80% sequence identity with the sequences of the REF and SEQ Tables or fragments thereof.

[0181] With respect to nucleotide sequences, degeneracy of the genetic code provides the possibility to substitute at least one base of the base sequence of a gene with a different base without causing the amino acid sequence of the polypeptide produced from the gene to be changed. Hence, the DNA of the present invention may also have any base sequence that has been changed from a sequence in the REF and SEQ Tables by substitution in accordance with degeneracy of genetic code. References describing codon usage include: Carels et al., J. Mol. Evol. 46: 45 (1998) and Fennoy et al., Nucl. Acids Res. 21(23): 5294 (1993).

[0182] B.2. Mapping

[0183] The isolated SDF DNA of the invention can be used to create various types of genetic and physical maps of the genome of corn, Arabidopsis, soybean, rice, wheat, or other plants. Some SDFs may be absolutely associated with particular phenotypic traits, allowing construction of gross genetic maps. While not all SDFs will immediately be associated with a phenotype, all SDFs can be used as probes for identifying polymorphisms associated with phenotypes of interest. Briefly, one method of mapping involves total DNA isolation from individuals. It is subsequently cleaved with one or more restriction enzymes, separated according to mass, transferred to a solid support, hybridized with SDF DNA and the pattern of fragments compared. Polymorphisms associated with a particular SDF are visualized as differences in the size of fragments produced between individual DNA samples after digestion with a particular restriction enzyme and hybridization with the SDF. After identification of polymorphic SDF sequences, linkage studies can be conducted. By using the individuals showing polymorphisms as parents in crossing programs, F2 progeny recombinants or recombinant inbreds, for example, are then analyzed. The order of DNA polymorphisms along the chromosomes can be determined based on the frequency with which they are inherited together versus independently. The closer two polymorphisms are together in a chromosome the higher the probability that they are inherited together. Integration of the relative positions of all the polymorphisms and associated marker SDFs can produce a genetic map of the species, where the distances between markers reflect the recombination frequencies in that chromosome segment.

[0184] The use of recombinant inbred lines for such genetic mapping is described for Arabidopsis by Alonso-Blanco et al. (Methods in Molecular Biology, vol. 82, “Arabidopsis Protocols”, pp. 137-146, J. M. Martinez-Zapater and J. Salinas, eds., c. 1998 by Humana Press, Totowa, N.J.) and for corn by Burr (“Mapping Genes with Recombinant Inbreds”, pp. 249-254. In Freeling, M. and V. Walbot (Ed.), The Maize Handbook, c. 1994 by Springer-Verlag New York, Inc.: New York, N.Y., USA; Berlin Germany; Burr et al. Genetics (1998) 118: 519; Gardiner, J. et al., (1993) Genetics 134: 917). This procedure, however, is not limited to plants and can be used for other organisms (such as yeast) or for individual cells.

[0185] The SDFs of the present invention can also be used for simple sequence repeat (SSR) mapping. Rice SSR mapping is described by Morgante et al. (The Plant Journal (1993) 3: 165), Panaud et al. (Genome (1995) 38: 1170); Senior et al. (Crop Science (1996) 36: 1676), Taramino et al. (Genome (1996) 39: 277) and Ahn et al. (Molecular and General Genetics (1993) 241: 483-90). SSR mapping can be achieved using various methods. In one instance, polymorphisms are identified when sequence specific probes contained within an SDF flanking an SSR are made and used in polymerase chain reaction (PCR) assays with template DNA from two or more individuals of interest. Here, a change in the number of tandem repeats between the SSR-flanking sequences produces differently sized fragments (U.S. Pat. No. 5,766,847). Alternatively, polymorphisms can be identified by using the PCR fragment produced from the SSR-flanking sequence specific primer reaction as a probe against Southern blots representing different individuals (U. H. Refseth et al., (1997) Electrophoresis 18: 1519).

[0186] Genetic and physical maps of crop species have many uses. For example, these maps can be used to devise positional cloning strategies for isolating novel genes from the mapped crop species. In addition, because the genomes of closely related species are largely syntenic (that is, they display the same ordering of genes within the genome), these maps can be used to isolate novel alleles from relatives of crop species by positional cloning strategies.

[0187] The various types of maps discussed above can be used with the SDFs of the invention to identify Quantitative Trait Loci (QTLs). Many important crop traits, such as the solids content of tomatoes, are quantitative traits and result from the combined interactions of several genes. These genes reside at different loci in the genome, oftentimes on different chromosomes, and generally exhibit multiple alleles at each locus. The SDFs of the invention can be used to identify QTLs and isolate specific alleles as described by de Vicente and Tanksley (Genetics 134:585 (1993)). In addition to isolating QTL alleles in present crop species, the SDFs of the invention can also be used to isolate alleles from the corresponding QTL of wild relatives. Transgenic plants having various combinations of QTL alleles can then be created and the effects of the combinations measured. Once a desired allele combination has been identified, crop improvement can be accomplished either through biotechnological means or by directed conventional breeding programs (for review see Tanksley and McCouch, Science 277:1063 (1997)).

[0188] In another embodiment, the SDFs can be used to help create physical maps of the genome of corn, Arabidopsis and related species. Where SDFs have been ordered on a genetic map, as described above, they can be used as probes to discover which clones in large libraries of plant DNA fragments in YACs, BACs, etc. contain the same SDF or similar sequences, thereby facilitating the assignment of the large DNA fragments to chromosomal positions. Subsequently, the large BACs, YACs, etc. can be ordered unambiguously by more detailed studies of their sequence composition (e.g. Marra et al. (1997) Genomic Research 7:1072-1084) and by using their end or other sequences to find the identical sequences in other cloned DNA fragments. The overlapping of DNA sequences in this way allows large contigs of plant sequences to be built that, when sufficiently extended, provide a complete physical map of a chromosome. Sometimes the SDFs themselves will provide the means of joining cloned sequences into a contig.

[0189] The patent publication WO95/35505 and U.S. Pat. Nos. 5,445,943 and 5,410,270 describe scanning multiple alleles of a plurality of loci using hybridization to arrays of oligonucleotides. These techniques are useful for each of the types of mapping discussed above.

[0190] Following the procedures described above and using a plurality of the SDFs of the present invention, any individual can be genotyped. These individual genotypes can be used for the identification of particular cultivars, varieties, lines, ecotypes and genetically modified plants or can serve as tools for subsequent genetic studies involving multiple phenotypic traits.

[0191] B.3 Southern Blot Hybridization

[0192] The sequences from the REF and SEQ Tables can be used as probes for various hybridization techniques. These techniques are useful for detecting target polynucleotides in a sample or for determining whether transgenic plants, seeds or host cells harbor a gene or sequence of interest and thus might be expected to exhibit a particular trait or phenotype.

[0193] In addition, the SDFs from the invention can be used to isolate additional members of gene families from the same or different species and/or orthologous genes from the same or different species. This is accomplished by hybridizing an SDF to, for example, a Southern blot containing the appropriate genomic DNA or cDNA. Given the resulting hybridization data, one of ordinary skill in the art could distinguish and isolate the correct DNA fragments by size, restriction sites, sequence and stated hybridization conditions from a gel or from a library.

[0194] Identification and isolation of orthologous genes from closely related species and alleles within a species is particularly desirable because of their potential for crop improvement. Many important crop traits, such as the solid content of tomatoes, result from the combined interactions of the products of several genes residing at different loci in the genome. Generally, alleles at each of these loci can make quantitative differences to the trait. By identifying and isolating numerous alleles for each locus from within or different species, transgenic plants with various combinations of alleles can be created and the effects of the combinations measured. Once a more favorable allele combination has been identified, crop improvement can be accomplished either through biotechnological means or by directed conventional breeding programs (Tanksley et al. Science 277:1063 (1997)).

[0195] The results from hybridizations of the SDFs of the invention to, for example, Southern blots containing DNA from another species can also be used to generate restriction fragment maps for the corresponding genomic regions. These maps provide additional information about the relative positions of restriction sites within fragments, further distinguishing mapped DNA from the remainder of the genome.

[0196] Physical maps can be made by digesting genomic DNA with different combinations of restriction enzymes.

[0197] Probes for Southern blotting to distinguish individual restriction fragments can range in size from 15 to 20 nucleotides to several thousand nucleotides. More preferably, the probe is 100 to 1,000 nucleotides long for identifying members of a gene family when it is found that repetitive sequences would complicate the hybridization. For identifying an entire corresponding gene in another species, the probe is more preferably the length of the gene, typically 2,000 to 10,000 nucleotides, but probes 50-1,000 nucleotides long might be used. Some genes, however, might require probes up to 1,500 nucleotides long or overlapping probes constituting the full-length sequence to span their lengths.

[0198] Also, while it is preferred that the probe be homogeneous with respect to its sequence, it is not necessary. For example, as described below, a probe representing members of a gene family having diverse sequences can be generated using PCR to amplify genomic DNA or RNA templates using primers derived from SDFs that include sequences that define the gene family.

[0199] For identifying corresponding genes in another species, the next most preferable probe is a cDNA spanning the entire coding sequence, which allows all of the mRNA-coding fragment of the gene to be identified. Probes for Southern blotting can easily be generated from SDFs by making primers having the sequence at the ends of the SDF and using corn or Arabidopsis genomic DNA as a template. In instances where the SDF includes sequence conserved among species, primers including the conserved sequence can be used for PCR with genomic DNA from a species of interest to obtain a probe. Similarly, if the SDF includes a domain of interest, that fragment of the SDF can be used to make primers and, with appropriate template DNA, used to make a probe to identify genes containing the domain. Alternatively, the PCR products can be resolved, for example by gel electrophoresis, and cloned and/or sequenced. Using Southern hybridization, the variants of the domain among members of a gene family, both within and across species, can be examined.

[0200] B.4.1 Isolating DNA from Related Organisms

[0201] The SDFs of the invention can be used to isolate the corresponding DNA from other organisms. Either cDNA or genomic DNA can be isolated. For isolating genomic DNA, a lambda, cosmid, BAC or YAC, or other large insert genomic library from the plant of interest can be constructed using standard molecular biology techniques as described in detail by Sambrook et al. 1989 (Molecular Cloning: A Laboratory Manual, 2^{nd} ed. Cold Spring Harbor Laboratory Press, New York) and by Ausubel et al. 1992 (Current Protocols in Molecular Biology, Greene Publishing, New York).

[0202] To screen a phage library, for example, recombinant lambda clones are plated out on appropriate bacterial medium using an appropriate E. coli host strain. The resulting plaques are lifted from the plates using nylon or nitrocellulose filters. The plaque lifts are processed through denaturation, neutralization, and washing treatments following the standard protocols outlined by Ausubel et al. (1992). The plaque lifts are hybridized to either radioactively labeled or non-radioactively labeled SDF DNA at room temperature for about 16 hours, usually in the presence of 50% formamide and 5×SSC (sodium chloride and sodium citrate) buffer and blocking reagents. The plaque lifts are then washed at 42° C. with 1% Sodium Dodecyl Sulfate (SDS) and at a particular concentration of SSC. The SSC concentration used is dependent upon the stringency at which hybridization occurred in the initial Southern blot analysis performed. For example, if a fragment hybridized under medium stringency (e.g., Tm−20° C.), then this condition is maintained or preferably adjusted to a less stringent condition (e.g., Tm−30° C.) to wash the plaque lifts. Positive clones show detectable hybridization e.g., by exposure to X-ray films or chromogen formation. The positive clones are then subsequently isolated for purification using the same general protocol outlined above. Once the clone is purified, restriction analysis can be conducted to narrow the region corresponding to the gene of interest. The restriction analysis and succeeding subcloning steps can be done using procedures described by, for example Sambrook et al. (1989) cited above.

[0203] The procedures outlined for the lambda library are essentially similar to those used for YAC library screening, except that the YAC clones are harbored in bacterial colonies. The YAC clones are plated out at reasonable density on nitrocellulose or nylon filters supported by appropriate bacterial medium in petri plates. Following the growth of the bacterial clones, the filters are processed through the denaturation, neutralization, and washing steps following the procedures of Ausubel et al. 1992. The same hybridization procedures for lambda library screening are followed.

[0204] To isolate cDNA, similar procedures using appropriately modified vectors are employed. For instance, the library can be constructed in a lambda vector appropriate for cloning cDNA such as λgt11. Alternatively, the cDNA library can be made in a plasmid vector. cDNA for cloning can be prepared by any of the methods known in the art, but is preferably prepared as described above. Preferably, a cDNA library will include a high proportion of full-length clones.

[0205] B. 5. Isolating and/or Identifying Orthologous Genes

[0206] Probes and primers of the invention can be used to identify and/or isolate polynucleotides related to those in the REF and SEQ Tables. Related polynucleotides are those that are native to other plant organisms and exhibit either similar sequence or encode polypeptides with similar biological activity. One specific example is an orthologous gene. Orthologous genes have the same functional activity. As such, orthologous genes may be distinguished from homologous genes. The percentage of identity is a function of evolutionary separation and, in closely related species, the percentage of identity can be 98 to 100%. The amino acid sequence of a protein encoded by an orthologous gene can be less than 75% identical, but tends to be at least75% or at least 80% identical, more preferably at least 90%, most preferably at least 95% identical to the amino acid sequence of the reference protein.

[0207] To find orthologous genes, the probes are hybridized to nucleic acids from a species of interest under low stringency conditions, preferably one where sequences containing as much as 40-45% mismatches will be able to hybridize. This condition is established by Tₘ−40° C. to Tm−48° C. (see below). Blots are then washed under conditions of increasing stringency. It is preferable that the wash stringency be such that sequences that are 85 to 100% identical will hybridize. More preferably, sequences 90 to 100% identical will hybridize and most preferably only sequences greater than 95% identical will hybridize. One of ordinary skill in the art will recognize that, due to degeneracy in the genetic code, amino acid sequences that are identical can be encoded by DNA sequences as little as 67% identical or less. Thus, it is preferable, for example, to make an overlapping series of shorter probes, on the order of 24 to 45 nucleotides, and individually hybridize them to the same arrayed library to avoid the problem of degeneracy introducing large numbers of mismatches.

[0208] As evolutionary divergence increases, genome sequences also tend to diverge. Thus, one of skill will recognize that searches for orthologous genes between more divergent species will require the use of lower stringency conditions compared to searches between closely related species. Also, degeneracy of the genetic code is more of a problem for searches in the genome of a species more distant evolutionarily from the species that is the source of the SDF probe sequences.

[0209] Therefore the method described in Bouckaert et al., U.S. Ser. No. 60/121,700 Atty. Dkt. No. 2750-117P, Client Dkt. No. 00010.001, filed Feb. 25, 1999, hereby incorporated in its entirety by reference, can be applied to the SDFs of the present invention to isolate related genes from plant species which do not hybridize to the corn Arabidopsis, soybean, rice, wheat, and other plant sequences of the REF and SEQ Tables.

[0210] Identification of the relationship of nucleotide or amino acid sequences among plant species can be done by comparing the nucleotide or amino acid sequences of SDFs of the present application with nucleotide or amino acid sequences of other SDFs.

[0211] The SDFs of the invention can also be used as probes to search for genes that are related to the SDF within a species. Such related genes are typically considered to be members of a gene family. In such a case, the sequence similarity will often be concentrated into one or a few fragments of the sequence. The fragments of similar sequence that define the gene family typically encode a fragment of a protein or RNA that has an enzymatic or structural function. The percentage of identity in the amino acid sequence of the domain that defines the gene family is preferably at least 70%, more preferably 80 to 95%, most preferably 85 to 99%. To search for members of a gene family within a species, a low stringency hybridization is usually performed, but this will depend upon the size, distribution and degree of sequence divergence of domains that define the gene family. SDFs encompassing regulatory regions can be used to identify coordinately expressed genes by using the regulatory region sequence of the SDF as a probe.

[0212] In the instances where the SDFs are identified as being expressed from genes that confer a particular phenotype, then the SDFs can also be used as probes to assay plants of different species for those phenotypes.

[0213] I.C. Methods to Inhibit Gene Expression

[0214] The nucleic acid molecules of the present invention can be used to inhibit gene transcription and/or translation. Example of such methods include, without limitation:

[0215] Antisense Constructs;

[0216] Ribozyme Constructs;

[0217] Chimeraplast Constructs;

[0218] Co-Suppression;

[0219] Transcriptional Silencing; and

[0220] Other Methods of Gene Expression.

[0221] C.1 Antisense

[0222] In some instances it is desirable to suppress expression of an endogenous or exogenous gene. A well-known instance is the FLAVOR-SAVOR™ tomato, in which the gene encoding ACC synthase is inactivated by an antisense approach, thus delaying softening of the fruit after ripening. See for example, U.S. Pat. No. 5,859,330; U.S. Pat. No. 5,723,766; Oeller, et al, Science, 254:437-439 (1991); and Hamilton et al, Nature, 346:284-287 (1990). Also, timing of flowering can be controlled by suppression of the FLOWERING LOCUS C (FLC); high levels of this transcript are associated with late flowering, while absence of FLC is associated with early flowering (S. D. Michaels et al., Plant Cell 11:949 (1999). Also, the transition of apical meristem from production of leaves with associated shoots to flowering is regulated by TERMINAL FLOWER1, APETALA1 and LEAFY. Thus, when it is desired to induce a transition from shoot production to flowering, it is desirable to suppress TFL1 expression (S. J. Liljegren, Plant Cell 11:1007 (1999)). As another instance, arrested ovule development and female sterility result from suppression of the ethylene forming enzyme but can be reversed by application of ethylene (D. De Martinis et al., Plant Cell 11:1061 (1999)). The ability to manipulate female fertility of plants is useful in increasing fruit production and creating hybrids.

[0223] In the case of polynucleotides used to inhibit expression of an endogenous gene, the introduced sequence need not be perfectly identical to a sequence of the target endogenous gene. The introduced polynucleotide sequence will typically be at least substantially identical to the target endogenous sequence.

[0224] Some polynucleotide SDFs in the REF and SEQ Tables represent sequences that are expressed in corn, wheat, rice, soybean Arabidopsis and/or other plants. Thus the invention includes using these sequences to generate antisense constructs to inhibit translation and/or degradation of transcripts of said SDFs, typically in a plant cell.

[0225] To accomplish this, a polynucleotide segment from the desired gene that can hybridize to the mRNA expressed from the desired gene (the “antisense segment”) is operably linked to a promoter such that the antisense strand of RNA will be transcribed when the construct is present in a host cell. A regulated promoter can be used in the construct to control transcription of the antisense segment so that transcription occurs only under desired circumstances.

[0226] The antisense segment to be introduced generally will be substantially identical to at least a fragment of the endogenous gene or genes to be repressed. The sequence, however, need not be perfectly identical to inhibit expression. Further, the antisense product may hybridize to the untranslated region instead of or in addition to the coding sequence of the gene. The vectors of the present invention can be designed such that the inhibitory effect applies to other proteins within a family of genes exhibiting homology or substantial homology to the target gene.

[0227] For antisense suppression, the introduced antisense segment sequence also need not be full length relative to either the primary transcription product or the fully processed mRNA. Generally, a higher percentage of sequence identity can be used to compensate for the use of a shorter sequence. Furthermore, the introduced sequence need not have the same intron or exon pattern, and homology of non-coding segments may be equally effective. Normally, a sequence of between about 30 or 40 nucleotides and the full length of the transcript can be used, though a sequence of at least about 100 nucleotides is preferred, a sequence of at least about 200 nucleotides is more preferred, and a sequence of at least about 500 nucleotides is especially preferred.

[0228] C.2. Ribozymes

[0229] It is also contemplated that gene constructs representing ribozymes and based on the SDFs in the REF and SEQ Tables are an object of the invention. Ribozymes can also be used to inhibit expression of genes by suppressing the translation of the mRNA into a polypeptide. It is possible to design ribozymes that specifically pair with virtually any target RNA and cleave the phosphodiester backbone at a specific location, thereby functionally inactivating the target RNA. In carrying out this cleavage, the ribozyme is not itself altered, and is thus capable of recycling and cleaving other molecules, making it a true enzyme. The inclusion of ribozyme sequences within antisense RNAs confers RNA-cleaving activity upon them, thereby increasing the activity of the constructs.

[0230] A number of classes of ribozymes have been identified. One class of ribozymes is derived from a number of small circular RNAs, which are capable of self-cleavage and replication in plants. The RNAs replicate either alone (viroid RNAs) or with a helper virus (satellite RNAs). Examples include RNAs from avocado sunblotch viroid and the satellite RNAs from tobacco ringspot virus, lucerne transient streak virus, velvet tobacco mottle virus, solanum nodiflorum mottle virus and subterranean clover mottle virus. The design and use of target RNA-specific ribozymes is described in Haseloff et al. Nature, 334:585 (1988).

[0231] Like the antisense constructs above, the ribozyme sequence fragment necessary for pairing need not be identical to the target nucleotides to be cleaved, nor identical to the sequences in the REF and SEQ Tables. Ribozymes may be constructed by combining the ribozyme sequence and some fragment of the target gene which would allow recognition of the target gene mRNA by the resulting ribozyme molecule. Generally, the sequence in the ribozyme capable of binding to the target sequence exhibits a percentage of sequence identity with at least 80%, preferably with at least 85%, more preferably with at least 90% and most preferably with at least 95%, even more preferably, with at least 96%, 97%, 98% or 99% sequence identity to some fragment of a sequence in the REF and SEQ Tables or the complement thereof. The ribozyme can be equally effective in inhibiting mRNA translation by cleaving either in the untranslated or coding regions. Generally, a higher percentage of sequence identity can be used to compensate for the use of a shorter sequence. Furthermore, the introduced sequence need not have the same intron or exon pattern, and homology of non-coding segments may be equally effective.

[0232] C.3. Chimeraplasts

[0233] The SDFs of the invention, such as those described by the REF and SEQ Tables, can also be used to construct chimeraplasts that can be introduced into a cell to produce at least one specific nucleotide change in a sequence corresponding to the SDF of the invention. A chimeraplast is an oligonucleotide comprising DNA and/or RNA that specifically hybridizes to a target region in a manner which creates a mismatched base-pair. This mismatched base-pair signals the cell's repair enzyme machinery which acts on the mismatched region resulting in the replacement, insertion or deletion of designated nucleotide(s). The altered sequence is then expressed by the cell's normal cellular mechanisms. Chimeraplasts can be designed to repair mutant genes, modify genes, introduce site-specific mutations, and/or act to interrupt or alter normal gene function (U.S. Pat. Nos. 6,010,907 and 6,004,804; and PCT Pub. No. WO99/58723 and WO99/07865).

[0234] C.4. Sense Suppression

[0235] The SDFs of the REF and SEQ Tables of the present invention are also useful to modulate gene expression by sense suppression. Sense suppression represents another method of gene suppression by introducing at least one exogenous copy or fragment of the endogenous sequence to be suppressed.

[0236] Introduction of expression cassettes in which a nucleic acid is configured in the sense orientation with respect to the promoter into the chromosome of a plant or by a self-replicating virus has been shown to be an effective means by which to induce degradation of mRNAs of target genes. For an example of the use of this method to modulate expression of endogenous genes see, Napoli et al., The Plant Cell 2:279 (1990), and U.S. Pat. Nos. 5,034,323, 5,231,020, and 5,283,184. Inhibition of expression may require some transcription of the introduced sequence.

[0237] For sense suppression, the introduced sequence generally will be substantially identical to the endogenous sequence intended to be inactivated. The minimal percentage of sequence identity will typically be greater than about 65%, but a higher percentage of sequence identity might exert a more effective reduction in the level of normal gene products. Sequence identity of more than about 80% is preferred, though about 95% to absolute identity would be most preferred. As with antisense regulation, the effect would likely apply to any other proteins within a similar family of genes exhibiting homology or substantial homology to the suppressing sequence.

[0238] C.5. Transcriptional Silencing

[0239] The nucleic acid sequences of the invention, including the SDFs of the REF and SEQ Tables, and fragments thereof, contain sequences that can be inserted into the genome of an organism resulting in transcriptional silencing. Such regulatory sequences need not be operatively linked to coding sequences to modulate transcription of a gene. Specifically, a promoter sequence without any other element of a gene can be introduced into a genome to transcriptionally silence an endogenous gene (see, for example, Vaucheret, H et al. (1998) The Plant Journal 16: 651-659). As another example, triple helices can be formed using oligonucleotides based on sequences from the REF and SEQ Tables, fragments thereof, and substantially similar sequence thereto. The oligonucleotide can be delivered to the host cell and can bind to the promoter in the genome to form a triple helix and prevent transcription. An oligonucleotide of interest is one that can bind to the promoter and block binding of a transcription factor to the promoter. In such a case, the oligonucleotide can be complementary to the sequences of the promoter that interact with transcription binding factors.

[0240] C.6. Other Methods to Inhibit Gene Expression

[0241] Yet another means of suppressing gene expression is to insert a polynucleotide into the gene of interest to disrupt transcription or translation of the gene.

[0242] Low frequency homologous recombination can be used to target a polynucleotide insert to a gene by flanking the polynucleotide insert with sequences that are substantially similar to the gene to be disrupted. Sequences from the REF and SEQ Tables, fragments thereof, and substantially similar sequence thereto can be used for homologous recombination.

[0243] In addition, random insertion of polynucleotides into a host cell genome can also be used to disrupt the gene of interest. Azpiroz-Leehan et al., Trends in Genetics 13:152 (1997). In this method, screening for clones from a library containing random insertions is preferred to identifying those that have polynucleotides inserted into the gene of interest. Such screening can be performed using probes and/or primers described above based on sequences from the REF and SEQ Tables, fragments thereof, and substantially similar sequence thereto. The screening can also be performed by selecting clones or R₁ plants having a desired phenotype.

[0244] I.D. Methods of Functional Analysis

[0245] The constructs described in the methods under I.C. above can be used to determine the function of the polypeptide encoded by the gene that is targeted by the constructs.

[0246] Down-regulating the transcription and translation of the targeted gene in the host cell or organisms, such as a plant, may produce phenotypic changes as compared to a wild-type cell or organism. In addition, in vitro assays can be used to determine if any biological activity, such as calcium flux, DNA transcription, nucleotide incorporation, etc., are being modulated by the down-regulation of the targeted gene.

[0247] Coordinated regulation of sets of genes, e.g., those contributing to a desired polygenic trait, is sometimes necessary to obtain a desired phenotype. SDFs of the invention representing transcription activation and DNA binding domains can be assembled into hybrid transcriptional activators. These hybrid transcriptional activators can be used with their corresponding DNA elements (i.e., those bound by the DNA-binding SDFs) to effect coordinated expression of desired genes (J. J. Schwarz et al., Mol. Cell. Biol. 12:266 (1992), A. Martinez et al., Mol. Gen. Genet. 261:546 (1999)).

[0248] The SDFs of the invention can also be used in the two-hybrid genetic systems to identify networks of protein-protein interactions (L. McAlister-Henn et al., Methods 19:330 (1999), J. C. Hu et al., Methods 20:80 (2000), M. Golovkin et al., J. Biol. Chem. 274:36428 (1999), K. Ichimura et al., Biochem. Biophys. Res. Comm. 253:532 (1998)). The SDFs of the invention can also be used in various expression display methods to identify important protein-DNA interactions (e.g. B. Luo et al., J. Mol. Biol. 266:479 (1997)).

[0249] I.E. Promoters

[0250] The SDFs of the invention are also useful as structural or regulatory sequences in a construct for modulating the expression of the corresponding gene in a plant or other organism, e.g. a symbiotic bacterium. For example, promoter sequences associated to SDFs of the REF and SEQ Tables of the present invention can be useful in directing expression of coding sequences either as constitutive promoters or to direct expression in particular cell types, tissues, or organs or in response to environmental stimuli.

[0251] With respect to the SDFs of the present invention a promoter is likely to be a relatively small portion of a genomic DNA (gDNA) sequence located in the first 2000 nucleotides upstream from an initial exon identified in a gDNA sequence or initial “ATG” or methionine codon or translational start site in a corresponding cDNA sequence. Such promoters are more likely to be found in the first 1000 nucleotides upstream of an initial ATG or methionine codon or translational start site of a cDNA sequence corresponding to a gDNA sequence. In particular, the promoter is usually located upstream of the transcription start site. The fragments of a particular gDNA sequence that function as elements of a promoter in a plant cell will preferably be found to hybridize to gDNA sequences presented and described in the REF and SEQ Tables at medium or high stringency, relevant to the length of the probe and its base composition.

[0252] Promoters are generally modular in nature. Promoters can consist of a basal promoter that functions as a site for assembly of a transcription complex comprising an RNA polymerase, for example RNA polymerase II. A typical transcription complex will include additional factors such as TF_{II}B, TF_{II}D, and TF_{II}E. Of these, TF_{II}D appears to be the only one to bind DNA directly. The promoter might also contain one or more enhancers and/or suppressors that function as binding sites for additional transcription factors that have the function of modulating the level of transcription with respect to tissue specificity and of transcriptional responses to particular environmental or nutritional factors, and the like.

[0253] Short DNA sequences representing binding sites for proteins can be separated from each other by intervening sequences of varying length. For example, within a particular functional module, protein binding sites may be constituted by regions of 5 to 60, preferably 10 to 30, more preferably 10 to 20 nucleotides. Within such binding sites, there are typically 2 to 6 nucleotides that specifically contact amino acids of the nucleic acid binding protein. The protein binding sites are usually separated from each other by 10 to several hundred nucleotides, typically by 15 to 150 nucleotides, often by 20 to 50 nucleotides. DNA binding sites in promoter elements often display dyad symmetry in their sequence. Often elements binding several different proteins, and/or a plurality of sites that bind the same protein, will be combined in a region of 50 to 1,000 basepairs.

[0254] Elements that have transcription regulatory function can be isolated from their corresponding endogenous gene, or the desired sequence can be synthesized, and recombined in constructs to direct expression of a coding region of a gene in a desired tissue-specific, temporal-specific or other desired manner of inducibility or suppression. When hybridizations are performed to identify or isolate elements of a promoter by hybridization to the long sequences presented in the REF and SEQ Tables, conditions are adjusted to account for the above-described nature of promoters. For example short probes, constituting the element sought, are preferably used under low temperature and/or high salt conditions. When long probes, which might include several promoter elements are used, low to medium stringency conditions are preferred when hybridizing to promoters across species.

[0255] If a nucleotide sequence of an SDF, or part of the SDF, functions as a promoter or fragment of a promoter, then nucleotide substitutions, insertions or deletions that do not substantially affect the binding of relevant DNA binding proteins would be considered equivalent to the exemplified nucleotide sequence. It is envisioned that there are instances where it is desirable to decrease the binding of relevant DNA binding proteins to silence or down-regulate a promoter, or conversely to increase the binding of relevant DNA binding proteins to enhance or up-regulate a promoter and vice versa. In such instances, polynucleotides representing changes to the nucleotide sequence of the DNA-protein contact region by insertion of additional nucleotides, changes to identity of relevant nucleotides, including use of chemically-modified bases, or deletion of one or more nucleotides are considered encompassed by the present invention. In addition, fragments of the promoter sequences described by the REF and SEQ Tables and variants thereof can be fused with other promoters or fragments to facilitate transcription and/or transcription in specific type of cells or under specific conditions.

[0256] Promoter function can be assayed by methods known in the art, preferably by measuring activity of a reporter gene operatively linked to the sequence being tested for promoter function. Examples of reporter genes include those encoding luciferase, green fluorescent protein, GUS, neo, cat and bar.

[0257] I.F. UTRs and Junctions

[0258] Polynucleotides comprising untranslated (UTR) sequences and intron/exon junctions are also within the scope of the invention. UTR sequences include introns and 5′ or 3′ untranslated regions (5′ UTRs or 3′ UTRs). Fragments of the sequences shown in the REF and SEQ Tables can comprise UTRs and intron/exon junctions.

[0259] These fragments of SDFs, especially UTRs, can have regulatory functions related to, for example, translation rate and mRNA stability. Thus, these fragments of SDFs can be isolated for use as elements of gene constructs for regulated production of polynucleotides encoding desired polypeptides.

[0260] Introns of genomic DNA segments might also have regulatory functions. Sometimes regulatory elements, especially transcription enhancer or suppressor elements, are found within introns. Also, elements related to stability of heteronuclear RNA and efficiency of splicing and of transport to the cytoplasm for translation can be found in intron elements. Thus, these segments can also find use as elements of expression vectors intended for use to transform plants.

[0261] Just as with promoters UTR sequences and intron/exon junctions can vary from those shown in the REF and SEQ Tables. Such changes from those sequences preferably will not affect the regulatory activity of the UTRs or intron/exon junction sequences on expression, transcription, or translation unless selected to do so. However, in some instances, down- or up-regulation of such activity may be desired to modulate traits or phenotypic or in vitro activity.

[0262] I.G. Coding Sequences

[0263] Isolated polynucleotides of the invention can include coding sequences that encode polypeptides comprising an amino acid sequence encoded by sequences in the REF and SEQ Tables or an amino acid sequence presented in the REF and SEQ Tables.

[0264] A nucleotide sequence encodes a polypeptide if a cell (or a cell free in vitro system) expressing that nucleotide sequence produces a polypeptide having the recited amino acid sequence when the nucleotide sequence is transcribed and the primary transcript is subsequently processed and translated by a host cell (or a cell free in vitro system) harboring the nucleic acid. Thus, an isolated nucleic acid that encodes a particular amino acid sequence can be a genomic sequence comprising exons and introns or a cDNA sequence that represents the product of splicing thereof. An isolated nucleic acid encoding an amino acid sequence also encompasses heteronuclear RNA, which contains sequences that are spliced out during expression, and mRNA, which lacks those sequences.

[0265] Coding sequences can be constructed using chemical synthesis techniques or by isolating coding sequences or by modifying such synthesized or isolated coding sequences as described above.

[0266] In addition to coding sequences encoding the polypeptide sequences of the REF and SEQ Tables, which are native to corn, Arabidopsis, soybean, rice, wheat, and other plants the isolated polynucleotides can be polynucleotides that encode variants, fragments, and fusions of those native proteins. Such polypeptides are described below in part II.

[0267] In variant polynucleotides generally, the number of substitutions, deletions or insertions is preferably less than 20%, more preferably less than 15%; even more preferably less than 10%, 5%, 3% or 1% of the number of nucleotides comprising a particularly exemplified sequence. It is generally expected that non-degenerate nucleotide sequence changes that result in 1 to 10, more preferably 1 to 5 and most preferably 1 to 3 amino acid insertions, deletions or substitutions will not greatly affect the function of an encoded polypeptide. The most preferred embodiments are those wherein 1 to 20, preferably 1 to 10, most preferably 1 to 5 nucleotides are added to, deleted from and/or substituted in the sequences specifically disclosed in the REF and SEQ Tables.

[0268] Insertions or deletions in polynucleotides intended to be used for encoding a polypeptide preferably preserve the reading frame. This consideration is not so important in instances when the polynucleotide is intended to be used as a hybridization probe.

II. Polypeptides and Proteins

[0269] IIA. Native Polypeptides and Proteins

[0270] Polypeptides within the scope of the invention include both native proteins as well as variants, fragments, and fusions thereof. Polypeptides of the invention are those encoded by any of the six reading frames of sequences shown in the REF and SEQ Tables, preferably encoded by the three frames reading in the 5′ to 3′ direction of the sequences as shown.

[0271] Native polypeptides include the proteins encoded by the sequences shown in the REF and SEQ Tables. Such native polypeptides include those encoded by allelic variants.

[0272] Polypeptide and protein variants will exhibit at least 75% sequence identity to those native polypeptides of the REF and SEQ Tables. More preferably, the polypeptide variants will exhibit at least 85% sequence identity; even more preferably, at least 90% sequence identity; more preferably at least 95%, 96%, 97%, 98%, or 99% sequence identity. Fragments of polypeptide or fragments of polypeptides will exhibit similar percentages of sequence identity to the relevant fragments of the native polypeptide. Fusions will exhibit a similar percentage of sequence identity in that fragment of the fusion represented by the variant of the native peptide.

[0273] Furthermore, polypeptide variants will exhibit at least one of the functional properties of the native protein. Such properties include, without limitation, protein interaction, DNA interaction, biological activity, immunological activity, receptor binding, signal transduction, transcription activity, growth factor activity, secondary structure, three-dimensional structure, etc. As to properties related to in vitro or in vivo activities, the variants preferably exhibit at least 60% of the activity of the native protein; more preferably at least 70%, even more preferably at least 80%, 85%, 90% or 95% of at least one activity of the native protein.

[0274] One type of variant of native polypeptides comprises amino acid substitutions, deletions and/or insertions. Conservative substitutions are preferred to maintain the function or activity of the polypeptide.

[0275] Within the scope of percentage of sequence identity described above, a polypeptide of the invention may have additional individual amino acids or amino acid sequences inserted into the polypeptide in the middle thereof and/or at the N-terminal and/or C-terminal ends thereof. Likewise, some of the amino acids or amino acid sequences may be deleted from the polypeptide.

[0276] A.1 Antibodies

[0277] Isolated polypeptides can be utilized to produce antibodies. Polypeptides of the invention can generally be used, for example, as antigens for raising antibodies by known techniques. The resulting antibodies are useful as reagents for determining the distribution of the antigen protein within the tissues of a plant or within a cell of a plant. The antibodies are also useful for examining the production level of proteins in various tissues, for example in a wild-type plant or following genetic manipulation of a plant, by methods such as Western blotting.

[0278] Antibodies of the present invention, both polyclonal and monoclonal, may be prepared by conventional methods. In general, the polypeptides of the invention are first used to immunize a suitable animal, such as a mouse, rat, rabbit, or goat. Rabbits and goats are preferred for the preparation of polyclonal sera due to the volume of serum obtainable, and the availability of labeled anti-rabbit and anti-goat antibodies as detection reagents. Immunization is generally performed by mixing or emulsifying the protein in saline, preferably in an adjuvant such as Freund's complete adjuvant, and injecting the mixture or emulsion parenterally (generally subcutaneously or intramuscularly). A dose of 50-200 μg/injection is typically sufficient. Immunization is generally boosted 2-6 weeks later with one or more injections of the protein in saline, preferably using Freund's incomplete adjuvant. One may alternatively generate antibodies by in vitro immunization using methods known in the art, which for the purposes of this invention is considered equivalent to in vivo immunization.

[0279] Polyclonal antisera is obtained by bleeding the immunized animal into a glass or plastic container, incubating the blood at 25° C. for one hour, followed by incubating the blood at 4° C. for 2-18 hours. The serum is recovered by centrifugation (e.g., 1,000×g for 10 minutes). About 20-50 ml per bleed may be obtained from rabbits.

[0280] Monoclonal antibodies are prepared using the method of Kohler and Milstein, Nature 256: 495 (1975), or modification thereof. Typically, a mouse or rat is immunized as described above. However, rather than bleeding the animal to extract serum, the spleen (and optionally several large lymph nodes) is removed and dissociated into single cells. If desired, the spleen cells can be screened (after removal of nonspecifically adherent cells) by applying a cell suspension to a plate, or well, coated with the protein antigen. B-cells producing membrane-bound immunoglobulin specific for the antigen bind to the plate, and are not rinsed away with the rest of the suspension. Resulting B-cells, or all dissociated spleen cells, are then induced to fuse with myeloma cells to form hybridomas, and are cultured in a selective medium (e.g., hypoxanthine, aminopterin, thymidine medium, “HAT”). The resulting hybridomas are plated by limiting dilution, and are assayed for the production of antibodies which bind specifically to the immunizing antigen (and which do not bind to unrelated antigens). The selected Mab-secreting hybridomas are then cultured either in vitro (e.g., in tissue culture bottles or hollow fiber reactors), or in vivo (as ascites in mice).

[0281] Other methods for sustaining antibody-producing B-cell clones, such as by EBV transformation, are known.

[0282] If desired, the antibodies (whether polyclonal or monoclonal) may be labeled using conventional techniques. Suitable labels include fluorophores, chromophores, radioactive atoms (particularly ³²P and ¹²⁵I), electron-dense reagents, enzymes, and ligands having specific binding partners. Enzymes are typically detected by their activity. For example, horseradish peroxidase is usually detected by its ability to convert 3,3′,5,5′-tetramethylbenzidine (TNB) to a blue pigment, quantifiable with a spectrophotometer.

[0283] A.2 In Vitro Applications of Polypeptides

[0284] Some polypeptides of the invention will have enzymatic activities that are useful in vitro. For example, the soybean trypsin inhibitor (Kunitz) family is one of the numerous families of proteinase inhibitors. It comprises plant proteins which have inhibitory activity against serine proteinases from the trypsin and subtilisin families, thiol proteinases and aspartic proteinases. Thus, these peptides find in vitro use in protein purification protocols and perhaps in therapeutic settings requiring topical application of protease inhibitors.

[0285] Delta-aminolevulinic acid dehydratase (EC 4.2.1.24) (ALAD) catalyzes the second step in the biosynthesis of heme, the condensation of two molecules of 5-aminolevulinate to form porphobilinogen and is also involved in chlorophyll biosynthesis (Kaczor et al. (1994) Plant Physiol. 1-4: 1411-7; Smith (1988) Biochem. J. 249: 423-8; Schneider (1976) Z. naturforsch. [C] 31: 55-63). Thus, ALAD proteins can be used as catalysts in synthesis of heme derivatives. Enzymes of biosynthetic pathways generally can be used as catalysts for in vitro synthesis of the compounds representing products of the pathway.

[0286] Polypeptides encoded by SDFs of the invention can be engineered to provide purification reagents to identify and purify additional polypeptides that bind to them. This allows one to identify proteins that function as multimers or elucidate signal transduction or metabolic pathways. In the case of DNA binding proteins, the polypeptide can be used in a similar manner to identify the DNA determinants of specific binding (S. Pierrou et al., Anal. Biochem. 229:99 (1995), S. Chusacultanachai et al., J. Biol. Chem. 274:23591 (1999), Q. Lin et al., J. Biol. Chem. 272:27274 (1997)).

[0287] II.B. Polypeptide Variants, Fragments, and Fusions

[0288] Generally, variants, fragments, or fusions of the polypeptides encoded by the maximum length sequence (MLS) can exhibit at least one of the activities of the identified domains and/or related polypeptides described in Sections (C) and (D) of the REF Tables corresponding to the MLS of interest.

[0289] II.B.(1) Variants

[0290] A type of variant of the native polypeptides comprises amino acid substitutions. Conservative substitutions, described above (see II.), are preferred to maintain the function or activity of the polypeptide. Such substitutions include conservation of charge, polarity, hydrophobicity, size, etc. For example, one or more amino acid residues within the sequence can be substituted with another amino acid of similar polarity that acts as a functional equivalent, for example providing a hydrogen bond in an enzymatic catalysis. Substitutes for an amino acid within an exemplified sequence are preferably made among the members of the class to which the amino acid belongs. For example, the nonpolar (hydrophobic) amino acids include alanine, leucine, isoleucine, valine, proline, phenylalanine, tryptophan and methionine. The polar neutral amino acids include glycine, serine, threonine, cysteine, tyrosine, asparagine, and glutamine. The positively charged (basic) amino acids include arginine, lysine and histidine. The negatively charged (acidic) amino acids include aspartic acid and glutamic acid.

[0291] Within the scope of percentage of sequence identity described above, a polypeptide of the invention may have additional individual amino acids or amino acid sequences inserted into the polypeptide in the middle thereof and/or at the N-terminal and/or C-terminal ends thereof. Likewise, some of the amino acids or amino acid sequences may be deleted from the polypeptide. Amino acid substitutions may also be made in the sequences; conservative substitutions being preferred.

[0292] One preferred class of variants are those that comprise (1) the domain of an encoded polypeptide and/or (2) residues conserved between the encoded polypeptide and related polypeptides. For this class of variants, the encoded polypeptide sequence is changed by insertion, deletion, or substitution at positions flanking the domain and/or conserved residues.

[0293] Another class of variants includes those that comprise an encoded polypeptide sequence that is changed in the domain or conserved residues by a conservative substitution.

[0294] Yet another class of variants includes those that lack one of the in vitro activities, or structural features of the encoded polypeptides. One example is polypeptides or proteins produced from genes comprising dominant negative mutations. Such a variant may comprise an encoded polypeptide sequence with non-conservative changes in a particular domain or group of conserved residues.

[0295] II.A.(2) Fragments

[0296] Fragments of particular interest are those that comprise a domain identified for a polypeptide encoded by an MLS of the instant invention and variants thereof. Also, fragments that comprise at least one region of residues conserved between an MLS encoded polypeptide and its related polypeptides are of great interest. Fragments are sometimes useful as polypeptides corresponding to genes comprising dominant negative mutations are.

[0297] II.A.(3) Fusions

[0298] Of interest are chimeras comprising (1) a fragment of the MLS encoded polypeptide or variants thereof of interest and (2) a fragment of a polypeptide comprising the same domain. For example, an AP2 helix encoded by a MLS of the invention fused to second AP2 helix from ANT protein, which comprises two AP2 helices. The present invention also encompasses fusions of MLS encoded polypeptides, variants, or fragments thereof fused with related proteins or fragments thereof.

Definition of Domains

[0299] The polypeptides of the invention may possess identifying domains as shown in the REF Tables. Specific domains within the MLS encoded polypeptides are indicated in the REF Tables. In addition, the domains within the MLS encoded polypeptide can be defined by the region that exhibits at least 70% sequence identity with the consensus sequences listed in the protein domain table of each of the domains.

[0300] The majority of the protein domain descriptions given in the protein domain table are obtained from Prosite, (http//www.expasy.ch/prosite/), and Pfam, (http//pfam.wustl.edu/browse.shtml).

[0301] A. Activities of Polypeptides Comprising Signal Peptides

[0302] Polypeptides comprising signal peptides are a family of proteins that are typically targeted to (1) a particular organelle or intracellular compartment, (2) interact with a particular molecule or (3) for secretion outside of a host cell. Example of polypeptides comprising signal peptides include, without limitation, secreted proteins, soluble proteins, receptors, proteins retained in the ER, etc.

[0303] These proteins comprising signal peptides are useful to modulate ligand-receptor interactions, cell-to-cell communication, signal transduction, intracellular communication, and activities and/or chemical cascades that take part in an organism outside or within of any particular cell.

[0304] One class of such proteins are soluble proteins which are transported out of the cell. These proteins can act as ligands that bind to receptor to trigger signal transduction or to permit communication between cells.

[0305] Another class is receptor proteins which also comprise a retention domain that lodges the receptor protein in the membrane when the cell transports the receptor to the surface of the cell. Like the soluble ligands, receptors can also modulate signal transduction and communication between cells.

[0306] In addition the signal peptide itself can serve as a ligand for some receptors. An example is the interaction of the ER targeting signal peptide with the signal recognition particle (SRP). Here, the SRP binds to the signal peptide, halting translation, and the resulting SRP complex then binds to docking proteins located on the surface of the ER, prompting transfer of the protein into the ER.

[0307] A description of signal peptide residue composition is described below in Subsection IV.C.1.

III. Methods of Modulating Polypeptide Production

[0308] It is contemplated that polynucleotides of the invention can be incorporated into a host cell or in-vitro system to modulate polypeptide production. For instance, the SDFs prepared as described herein can be used to prepare expression cassettes useful in a number of techniques for suppressing or enhancing expression.

[0309] An example are polynucleotides comprising sequences to be transcribed, such as coding sequences, of the present invention can be inserted into nucleic acid constructs to modulate polypeptide production. Typically, such sequences to be transcribed are heterologous to at least one element of the nucleic acid construct to generate a chimeric gene or construct.

[0310] Another example of useful polynucleotides are nucleic acid molecules comprising regulatory sequences of the present invention. Chimeric genes or constructs can be generated when the regulatory sequences of the invention linked to heterologous sequences in a vector construct. Within the scope of invention are such chimeric gene and/or constructs.

[0311] Also within the scope of the invention are nucleic acid molecules, whereof at least a part or fragment of these DNA molecules are presented in the REF and SEQ Tables of the present application, and wherein the coding sequence is under the control of its own promoter and/or its own regulatory elements. Such molecules are useful for transforming the genome of a host cell or an organism regenerated from said host cell for modulating polypeptide production.

[0312] Additionally, a vector capable of producing the oligonucleotide can be inserted into the host cell to deliver the oligonucleotide.

[0313] More detailed description of components to be included in vector constructs are described both above and below.

[0314] Whether the chimeric vectors or native nucleic acids are utilized, such polynucleotides can be incorporated into a host cell to modulate polypeptide production. Native genes and/or nucleic acid molecules can be effective when exogenous to the host cell.

[0315] Methods of modulating polypeptide expression includes, without limitation:

[0316] Suppression methods, such as
[0317] Antisense
[0318] Ribozymes
[0319] Co-suppression
[0320] Insertion of Sequences into the Gene to be Modulated
[0321] Regulatory Sequence Modulation.

[0322] as well as Methods for Enhancing Production, such as
[0323] Insertion of Exogenous Sequences; and
[0324] Regulatory Sequence Modulation.

[0325] III.A. Suppression

[0326] Expression cassettes of the invention can be used to suppress expression of endogenous genes which comprise the SDF sequence. Inhibiting expression can be useful, for instance, to tailor the ripening characteristics of a fruit (Oeller et al., Science 254:437 (1991)) or to influence seed size (WO98/07842) or to provoke cell ablation (Mariani et al., Nature 357: 384-387 (1992).

[0327] As described above, a number of methods can be used to inhibit gene expression in plants, such as antisense, ribozyme, introduction of exogenous genes into a host cell, insertion of a polynucleotide sequence into the coding sequence and/or the promoter of the endogenous gene of interest, and the like.

[0328] III.A.1. Antisense

[0329] An expression cassette as described above can be transformed into host cell or plant to produce an antisense strand of RNA. For plant cells, antisense RNA inhibits gene expression by preventing the accumulation of mRNA which encodes the enzyme of interest, see, e.g., Sheehy et al., Proc. Nat. Acad. Sci. USA, 85:8805 (1988), and Hiatt et al., U.S. Pat. No. 4,801,340.

[0330] III.A.2. Ribozymes

[0331] Similarly, ribozyme constructs can be transformed into a plant to cleave mRNA and down-regulate translation.

[0332] III.A.3. Co-Suppression

[0333] Another method of suppression is by introducing an exogenous copy of the gene to be suppressed. Introduction of expression cassettes in which a nucleic acid is configured in the sense orientation with respect to the promoter has been shown to prevent the accumulation of mRNA. A detailed description of this method is described above.

[0334] III.A.4. Insertion of Sequences into the Gene to Be Modulated

[0335] Yet another means of suppressing gene expression is to insert a polynucleotide into the gene of interest to disrupt transcription or translation of the gene.

[0336] Homologous recombination could be used to target a polynucleotide insert to a gene using the Cre-Lox system (A. C. Vergunst et al., Nucleic Acids Res. 26:2729 (1998), A. C. Vergunst et al., Plant Mol. Biol. 38:393 (1998), H. Albert et al., Plant J. 7:649 (1995)).

[0337] In addition, random insertion of polynucleotides into a host cell genome can also be used to disrupt the gene of interest. Azpiroz-Leehan et al., Trends in Genetics 13:152 (1997). In this method, screening for clones from a library containing random insertions is preferred for identifying those that have polynucleotides inserted into the gene of interest. Such screening can be performed using probes and/or primers described above based on sequences from the REF and SEQ Tables, fragments thereof, and substantially similar sequence thereto. The screening can also be performed by selecting clones or any transgenic plants having a desired phenotype.

[0338] III.A.5. Regulatory Sequence Modulation

[0339] The SDFs described in the REF and SEQ Tables, and fragments thereof are examples of nucleotides of the invention that contain regulatory sequences that can be used to suppress or inactivate transcription and/or translation from a gene of interest as discussed in I.C.5.

[0340] III.A.6. Genes Comprising Dominant-Negative Mutations

[0341] When suppression of production of the endogenous, native protein is desired it is often helpful to express a gene comprising a dominant negative mutation. Production of protein variants produced from genes comprising dominant negative mutations is a useful tool for research Genes comprising dominant negative mutations can produce a variant polypeptide which is capable of competing with the native polypeptide, but which does not produce the native result. Consequently, over expression of genes comprising these mutations can titrate out an undesired activity of the native protein. For example, The product from a gene comprising a dominant negative mutation of a receptor can be used to constitutively activate or suppress a signal transduction cascade, allowing examination of the phenotype and thus the trait(s) controlled by that receptor and pathway. Alternatively, the protein arising from the gene comprising a dominant-negative mutation can be an inactive enzyme still capable of binding to the same substrate as the native protein and therefore competes with such native protein.

[0342] Products from genes comprising dominant-negative mutations can also act upon the native protein itself to prevent activity. For example, the native protein may be active only as a homo-multimer or as one subunit of a hetero-multimer. Incorporation of an inactive subunit into the multimer with native subunit(s) can inhibit activity.

[0343] Thus, gene function can be modulated in host cells of interest by insertion into these cells vector constructs comprising a gene comprising a dominant-negative mutation.

[0344] III.B. Enhanced Expression

[0345] Enhanced expression of a gene of interest in a host cell can be accomplished by either (1) insertion of an exogenous gene; or (2) promoter modulation.

[0346] III.B.1. Insertion of an Exogenous Gene

[0347] Insertion of an expression construct encoding an exogenous gene can boost the number of gene copies expressed in a host cell.

[0348] Such expression constructs can comprise genes that either encode the native protein that is of interest or that encode a variant that exhibits enhanced activity as compared to the native protein. Such genes encoding proteins of interest can be constructed from the sequences from the REF and SEQ Tables, fragments thereof, and substantially similar sequence thereto.

[0349] Such an exogenous gene can include either a constitutive promoter permitting expression in any cell in a host organism or a promoter that directs transcription only in particular cells or times during a host cell life cycle or in response to environmental stimuli.

[0350] III.B.2. Regulatory Sequence Modulation

[0351] The SDFs of the REF and SEQ Tables, and fragments thereof, contain regulatory sequences that can be used to enhance expression of a gene of interest. For example, some of these sequences contain useful enhancer elements. In some cases, duplication of enhancer elements or insertion of exogenous enhancer elements will increase expression of a desired gene from a particular promoter. As other examples, all 11 promoters require binding of a regulatory protein to be activated, while some promoters may need a protein that signals a promoter binding protein to expose a polymerase binding site. In either case, over-production of such proteins can be used to enhance expression of a gene of interest by increasing the activation time of the promoter.

[0352] Such regulatory proteins are encoded by some of the sequences in the REF and SEQ Tables, fragments thereof, and substantially similar sequences thereto.

[0353] Coding sequences for these proteins can be constructed as described above.

IV. Gene Constructs and Vector Construction

[0354] To use isolated SDFs of the present invention or a combination of them or parts and/or mutants and/or fusions of said SDFs in the above techniques, recombinant DNA vectors which comprise said SDFs and are suitable for transformation of cells, such as plant cells, are usually prepared. The SDF construct can be made using standard recombinant DNA techniques (Sambrook et al. 1989) and can be introduced to the species of interest by Agrobacterium-mediated transformation or by other means of transformation (e.g., particle gun bombardment) as referenced below.

[0355] The vector backbone can be any of those typical in the art such as plasmids, viruses, artificial chromosomes, BACs, YACs and PACs and vectors of the sort described by

[0356] (a) BAC: Shizuya et al., Proc. Natl. Acad. Sci. USA 89: 8794-8797 (1992); Hamilton et al., Proc. Natl. Acad. Sci. USA 93: 9975-9979 (1996);

[0357] (b) YAC: Burke et al., Science 236:806-812 (1987);.

[0358] (c) PAC: Sternberg N. et al., Proc Natl Acad Sci USA. January; 87(1):103-7 (1990);

[0359] (d) Bacteria-Yeast Shuttle Vectors: Bradshaw et al., Nucl Acids Res 23: 4850-4856 (1995);

[0360] (e) Lambda Phage Vectors: Replacement Vector, e.g., Frischauf et al., J. Mol Biol 170: 827-842 (1983); or Insertion vector, e.g., Huynh et al., In: Glover N M (ed) DNA Cloning: A practical Approach, Vol. 1 Oxford: IRL Press (1985);

[0361] (f) T-DNA gene fusion vectors: Walden et al., Mol Cell Biol 1: 175-194 (1990); and

[0362] (g) Plasmid vectors: Sambrook et al., infra.

[0363] Typically, a vector will comprise the exogenous gene, which in its turn comprises an SDF of the present invention to be introduced into the genome of a host cell, and which gene may be an antisense construct, a ribozyme construct chimeraplast, or a coding sequence with any desired transcriptional and/or translational regulatory sequences, such as promoters, UTRs, and 3′ end termination sequences. Vectors of the invention can also include origins of replication, scaffold attachment regions (SARs), markers, homologous sequences, introns, etc.

[0364] A DNA sequence coding for the desired polypeptide, for example a cDNA sequence encoding a full length protein, will preferably be combined with transcriptional and translational initiation regulatory sequences which will direct the transcription of the sequence from the gene in the intended tissues of the transformed plant.

[0365] For example, for over-expression, a plant promoter fragment may be employed that will direct transcription of the gene in all tissues of a regenerated plant. Alternatively, the plant promoter may direct transcription of an SDF of the invention in a specific tissue (tissue-specific promoters) or may be otherwise under more precise environmental control (inducible promoters).

[0366] If proper polypeptide productionis desired, a polyadenylation region at the 3′-end of the coding region is typically included. The polyadenylation region can be derived from the natural gene, from a variety of other plant genes, or from T-DNA.

[0367] The vector comprising the sequences from genes or SDF or the invention may comprise a marker gene that confers a selectable phenotype on plant cells. The vector can include promoter and coding sequence, for instance. For example, the marker may encode biocide resistance, particularly antibiotic resistance, such as resistance to kanamycin, G418, bleomycin, hygromycin, or herbicide resistance, such as resistance to chlorosulfuron or phosphinotricin.

[0368] IV.A. Coding Sequences

[0369] Generally, the sequence in the transformation vector and to be introduced into the genome of the host cell does not need to be absolutely identical to an SDF of the present invention. Also, it is not necessary for it to be full length, relative to either the primary transcription product or fully processed mRNA. Furthermore, the introduced sequence need not have the same intron or exon pattern as a native gene. Also, heterologous non-coding segments can be incorporated into the coding sequence without changing the desired amino acid sequence of the polypeptide to be produced.

[0370] IV.B. Promoters

[0371] As explained above, introducing an exogenous SDF from the same species or an orthologous SDF from another species can modulate the expression of a native gene corresponding to that SDF of interest. Such an SDF construct can be under the control of either a constitutive promoter or a highly regulated inducible promoter (e.g., a copper inducible promoter). The promoter of interest can initially be either endogenous or heterologous to the species in question. When re-introduced into the genome of said species, such promoter becomes exogenous to said species. Over-expression of an SDF transgene can lead to co-suppression of the homologous endogeneous sequence thereby creating some alterations in the phenotypes of the transformed species as demonstrated by similar analysis of the chalcone synthase gene (Napoli et al., Plant Cell 2:279 (1990) and van der Krol et al., Plant Cell 2:291 (1990)). If an SDF is found to encode a protein with desirable characteristics, its over-production can be controlled so that its accumulation can be manipulated in an organ- or tissue-specific manner utilizing a promoter having such specificity.

[0372] Likewise, if the promoter of an SDF (or an SDF that includes a promoter) is found to be tissue-specific or developmentally regulated, such a promoter can be utilized to drive or facilitate the transcription of a specific gene of interest (e.g., seed storage protein or root-specific protein). Thus, the level of accumulation of a particular protein can be manipulated or its spatial localization in an organ- or tissue-specific manner can be altered.

[0373] IV. C Signal Peptides

[0374] SDFs of the present invention containing signal peptides are indicated in the REF and SEQ Tables. In some cases it may be desirable for the protein encoded by an introduced exogenous or orthologous SDF to be targeted (1) to a particular organelle intracellular compartment, (2) to interact with a particular molecule such as a membrane molecule or (3) for secretion outside of the cell harboring the introduced SDF. This will be accomplished using a signal peptide.

[0375] Signal peptides direct protein targeting, are involved in ligand-receptor interactions and act in cell to cell communication. Many proteins, especially soluble proteins, contain a signal peptide that targets the protein to one of several different intracellular compartments. In plants, these compartments include, but are not limited to, the endoplasmic reticulum (ER), mitochondria, plastids (such as chloroplasts), the vacuole, the Golgi apparatus, protein storage vessicles (PSV) and, in general, membranes. Some signal peptide sequences are conserved, such as the Asn-Pro-Ile-Arg amino acid motif found in the N-terminal propeptide signal that targets proteins to the vacuole (Marty (1999) The Plant Cell 11: 587-599). Other signal peptides do not have a consensus sequence per se, but are largely composed of hydrophobic amino acids, such as those signal peptides targeting proteins to the ER (Vitale and Denecke (1999) The Plant Cell 11: 615-628). Still others do not appear to contain either a consensus sequence or an identified common secondary sequence, for instance the chloroplast stromal targeting signal peptides (Keegstra and Cline (1999) The Plant Cell 11: 557-570). Furthermore, some targeting peptides are bipartite, directing proteins first to an organelle and then to a membrane within the organelle (e.g. within the thylakoid lumen of the chloroplast; see Keegstra and Cline (1999) The Plant Cell 11: 557-570). In addition to the diversity in sequence and secondary structure, placement of the signal peptide is also varied. Proteins destined for the vacuole, for example, have targeting signal peptides found at the N-terminus, at the C-terminus and at a surface location in mature, folded proteins. Signal peptides also serve as ligands for some receptors.

[0376] These characteristics of signal proteins can be used to more tightly control the phenotypic expression of introduced SDFs. In particular, associating the appropriate signal sequence with a specific SDF can allow sequestering of the protein in specific organelles (plastids, as an example), secretion outside of the cell, targeting interaction with particular receptors, etc. Hence, the inclusion of signal proteins in constructs involving the SDFs of the invention increases the range of manipulation of SDF phenotypic expression. The nucleotide sequence of the signal peptide can be isolated from characterized genes using common molecular biological techniques or can be synthesized in vitro.

[0377] In addition, the native signal peptide sequences, both amino acid and nucleotide, described in the REF and SEQ Tables can be used to modulate polypeptide transport. Further variants of the native signal peptides described in the REF and SEQ Tables are contemplated. Insertions, deletions, or substitutions can be made. Such variants will retain at least one of the functions of the native signal peptide as well as exhibiting some degree of sequence identity to the native sequence.

[0378] Also, fragments of the signal peptides of the invention are useful and can be fused with other signal peptides of interest to modulate transport of a polypeptide.

V. Transformation Techniques

[0379] A wide range of techniques for inserting exogenous polynucleotides are known for a number of host cells, including, without limitation, bacterial, yeast, mammalian, insect and plant cells.

[0380] Techniques for transforming a wide variety of higher plant species are well known and described in the technical and scientific literature. See, e.g. Weising et al., Ann. Rev. Genet. 22:421 (1988); and Christou, Euphytica, v. 85, n. 1-3:13-27, (1995).

[0381] DNA constructs of the invention may be introduced into the genome of the desired plant host by a variety of conventional techniques. For example, the DNA construct may be introduced directly into the genomic DNA of the plant cell using techniques such as electroporation and microinjection of plant cell protoplasts, or the DNA constructs can be introduced directly to plant tissue using ballistic methods, such as DNA particle bombardment. Alternatively, the DNA constructs may be combined with suitable T-DNA flanking regions and introduced into a conventional Agrobacterium tumefaciens host vector. The virulence functions of the Agrobacterium tumefaciens host will direct the insertion of the construct and adjacent marker into the plant cell DNA when the cell is infected by the bacteria (McCormac et al., Mol. Biotechnol. 8:199 (1997); Hamilton, Gene 200:107 (1997)); Salomon et al. EMBO J. 3:141 (1984); Herrera-Estrella et al. EMBO J. 2:987 (1983).

[0382] Microinjection techniques are known in the art and well described in the scientific and patent literature. The introduction of DNA constructs using polyethylene glycol precipitation is described in Paszkowski et al. EMBO J. 3:2717 (1984). Electroporation techniques are described in Fromm et al. Proc. Natl Acad. Sci. USA 82:5824 (1985). Ballistic transformation techniques are described in Klein et al. Nature 327:773 (1987). Agrobacterium tumefaciens-mediated transformation techniques, including disarming and use of binary or co-integrate vectors, are well described in the scientific literature. See, for example Hamilton, C M., Gene 200:107 (1997); Müller et al. Mol. Gen. Genet. 207:171 (1987); Komari et al. Plant J. 10:165 (1996); Venkateswarlu et al. Biotechnology 9:1103 (1991) and Gleave, A P., Plant Mol. Biol. 20:1203 (1992); Graves and Goldman, Plant Mol. Biol. 7:34 (1986) and Gould et al., Plant Physiology 95:426 (1991).

[0383] Transformed plant cells which are derived by any of the above transformation techniques can be cultured to regenerate a whole plant that possesses the transformed genotype and thus the desired phenotype such as seedlessness. Such regeneration techniques rely on manipulation of certain phytohormones in a tissue culture growth medium, typically relying on a biocide and/or herbicide marker which has been introduced together with the desired nucleotide sequences. Plant regeneration from cultured protoplasts is described in Evans et al., Protoplasts Isolation and Culture in “Handbook of Plant Cell Culture,” pp. 124-176, MacMillan Publishing Company, New York, 1983; and Binding, Regeneration of Plants, Plant Protoplasts, pp. 21-73, CRC Press, Boca Raton, 1988. Regeneration can also be obtained from plant callus, explants, organs, or parts thereof. Such regeneration techniques are described generally in Klee et al. Ann. Rev. of Plant Phys. 38:467 (1987). Regeneration of monocots (rice) is described by Hosoyama et al. (Biosci. Biotechnol. Biochem. 58:1500 (1994)) and by Ghosh et al. (J. Biotechnol. 32:1 (1994)). The nucleic acids of the invention can be used to confer desired traits on essentially any plant.

[0384] Thus, the invention has use over a broad range of plants, including species from the genera Anacardium, Arachis, Asparagus, Atropa, Avena, Brassica, Citrus, Citrullus, Capsicum, Carthamus, Cocos, Coffea, Cucumis, Cucurbita, Daucus, Elaeis, Fragaria, Glycine, Gossypium, Helianthus, Heterocallis, Hordeum, Hyoscyamus, Lactuca, Linum, Lolium, Lupinus, Lycopersicon, Malus, Manihot, Majorana, Medicago, Nicotiana, Olea, Oryza, Panieum, Pannesetum, Persea, Phaseolus, Pistachia, Pisum, Pyrus, Prunus, Raphanus, Ricinus, Secale, Senecio, Sinapis, Solanum, Sorghum, Theobromus, Trigonella, Triticum, Vicia, Vitis, Vigna, and, Zea.

[0385] One of skill will recognize that after the expression cassette is stably incorporated in transgenic plants and confirmed to be operable, it can be introduced into other plants by sexual crossing. Any of a number of standard breeding techniques can be used, depending upon the species to be crossed.

[0386] The particular sequences of SDFs identified are provided in the attached the REF and SEQ Tables. One of ordinary skill in the art, having this data, can obtain cloned DNA fragments, synthetic DNA fragments or polypeptides constituting desired sequences by recombinant methodology known in the art or described herein.

### EXAMPLES

[0387] The invention is illustrated by way of the following examples. The invention is not limited by these examples as the scope of the invention is defined solely by the claims following.

### Example 1

### cDNA Preparation

[0388] A number of the nucleotide sequences disclosed in the REF and SEQ Tables herein as representative of the SDFs of the invention can be obtained by sequencing genomic DNA (gDNA) and/or cDNA from corn plants grown from HYBRID SEED # 35A19, purchased from Pioneer Hi-Bred International, Inc., Supply Management, P.O. Box 256, Johnston, Iowa 50131-0256.

[0389] A number of the nucleotide sequences disclosed in the REF and SEQ Tables herein as representative of the SDFs of the invention can also be obtained by sequencing genomic DNA from Arabidopsis thaliana, Wassilewskija ecotype or by sequencing cDNA obtained from mRNA from such plants as described below. This is a true breeding strain. Seeds of the plant are available from the Arabidopsis Biological Resource Center at the Ohio State University, under the accession number CS2360. Seeds of this plant were deposited under the terms and conditions of the Budapest Treaty at the American Type Culture Collection, Manassas, Va. on Aug. 31, 1999, and were assigned ATCC No. PTA-595.

[0390] Other methods for cloning full-length cDNA are described, for example, by Seki et al., Plant Journal 15:707-720 (1998) “High-efficiency cloning of Arabidopsis full-length cDNA by biotinylated Cap trapper”; Maruyama et al., Gene 138:171 (1994) “Oligo-capping a simple method to replace the cap structure of eukaryotic mRNAs with oligoribonucleotides”; and WO 96/34981.

[0391] Tissues are, or each organ is, individually pulverized and frozen in liquid nitrogen. Next, the samples are homogenized in the presence of detergents and then centrifuged. The debris and nuclei are removed from the sample and more detergents are added to the sample. The sample is centrifuged and the debris is removed. Then the sample is applied to a 2M sucrose cushion to isolate polysomes. The RNA is isolated by treatment with detergents and proteinase K followed by ethanol precipitation and centrifugation. The polysomal RNA from the different tissues is pooled according to the following mass ratios: 15/15/1 for male inflorescences, female inflorescences and root, respectively. The pooled material is then used for cDNA synthesis by the methods described below.

[0392] Starting material for cDNA synthesis for the exemplary corn cDNA clones with sequences presented in the REF and SEQ Tables is poly(A)-containing polysomal mRNAs from inflorescences and root tissues of corn plants grown from HYBRID SEED # 35A19. Male inflorescences and female (pre-and post-fertilization) inflorescences are isolated at various stages of development. Selection for poly(A) containing polysomal RNA is done using oligo d(T) cellulose columns, as described by Cox and Goldberg, “Plant Molecular Biology: A Practical Approach”, pp. 1-35, Shaw ed., c. 1988 by IRL, Oxford. The quality and the integrity of the polyA+ RNAs are evaluated.

[0393] Starting material for cDNA synthesis for the exemplary Arabidopsis cDNA clones with sequences presented in the REF and SEQ Tables is polysomal RNA isolated from the top-most inflorescence tissues of Arabidopsis thaliana Wassilewskija (Ws.) and from roots of Arabidopsis thaliana Landsberg erecta (L. er.), also obtained from the Arabidopsis Biological Resource Center. Nine parts inflorescence to every part root is used, as measured by wet mass. Tissue is pulverized and exposed to liquid nitrogen. Next, the sample is homogenized in the presence of detergents and then centrifuged. The debris and nuclei are removed from the sample and more detergents are added to the sample. The sample is centrifuged and the debris is removed and the sample is applied to a 2M sucrose cushion to isolate polysomal RNA. Cox et al., “Plant Molecular Biology: A Practical Approach”, pp. 1-35, Shaw ed., c. 1988 by IRL, Oxford.

[0394] The polysomal RNA is used for cDNA synthesis by the methods described below. Polysomal mRNA is then isolated as described above for corn cDNA. The quality of the RNA is assessed electrophoretically.

[0395] Following preparation of the mRNAs from various tissues as described above, selection of mRNA with intact 5′ ends and specific attachment of an oligonucleotide tag to the 5′ end of such mRNA is performed using either a chemical or enzymatic approach. Both techniques take advantage of the presence of the “cap” structure, which characterizes the 5′ end of most intact mRNAs and which comprises a guanosine generally methylated once, at the 7 position.

[0396] The chemical modification approach involves the optional elimination of the 2′, 3′-cis diol of the 3′ terminal ribose, the oxidation of the 2′, 3′-cis diol of the ribose linked to the cap of the 5′ ends of the mRNAs into a dialdehyde, and the coupling of the such obtained dialdehyde to a derivatized oligonucleotide tag. Further detail regarding the chemical approaches for obtaining mRNAs having intact 5′ ends are disclosed in International Application No. WO96/34981 published Nov. 7, 1996.

[0397] The enzymatic approach for ligating the oligonucleotide tag to the intact 5′ ends of mRNAs involves the removal of the phosphate groups present on the 5′ ends of uncapped incomplete mRNAs, the subsequent decapping of mRNAs having intact 5′ ends and the ligation of the phosphate present at the 5′ end of the decapped mRNA to an oligonucleotide tag. Further detail regarding the enzymatic approaches for obtaining mRNAs having intact 5′ ends are disclosed in Dumas Milne Edwards J. B. (Doctoral Thesis of Paris VI University, Le clonage des ADNc complets: difficultés et perspectives nouvelles. Apports pour l'étude de la régulation de l'expression de la tryptophane hydroxylase de rat, 20 Dec. 1993), EP0 625572 and Kato et al., Gene 150:243-250 (1994).

[0398] In both the chemical and the enzymatic approach, the oligonucleotide tag has a restriction enzyme site (e.g. an EcoRI site) therein to facilitate later cloning procedures. Following attachment of the oligonucleotide tag to the mRNA, the integrity of the mRNA is examined by performing a Northern blot using a probe complementary to the oligonucleotide tag.

[0399] For the mRNAs joined to oligonucleotide tags using either the chemical or the enzymatic method, first strand cDNA synthesis is performed using an oligo-dT primer with reverse transcriptase. This oligo-dT primer can contain an internal tag of at least 4 nucleotides, which can be different from one mRNA preparation to another. Methylated dCTP is used for cDNA first strand synthesis to protect the internal EcoRI sites from digestion during subsequent steps. The first strand cDNA is precipitated using isopropanol after removal of RNA by alkaline hydrolysis to eliminate residual primers.

[0400] Second strand cDNA synthesis is conducted using a DNA polymerase, such as Klenow fragment and a primer corresponding to the 5′ end of the ligated oligonucleotide. The primer is typically 20-25 bases in length. Methylated dCTP is used for second strand synthesis in order to protect internal EcoRI sites in the cDNA from digestion during the cloning process.

[0401] Following second strand synthesis, the full-length cDNAs are cloned into a phagemid vector, such as pBlueScrip™ (Stratagene). The ends of the full-length cDNAs are blunted with T4 DNA polymerase (Biolabs) and the cDNA is digested with EcoRI. Since methylated dCTP is used during cDNA synthesis, the EcoRI site present in the tag is the only hemi-methylated site; hence the only site susceptible to EcoRI digestion. In some instances, to facilitate subcloning, an Hind III adapter is added to the 3′ end of full-length cDNAs.

[0402] The full-length cDNAs are then size fractionated using either exclusion chromatography (AcA, Biosepra) or electrophoretic separation which yields 3 to 6 different fractions. The full-length cDNAs are then directionally cloned either into pBlueScript™ using either the EcoRI and SmaI restriction sites or, when the Hind III adapter is present in the full-length cDNAs, the EcoRI and Hind III restriction sites. The ligation mixture is transformed, preferably by electroporation, into bacteria, which are then propagated under appropriate antibiotic selection.

[0403] Clones containing the oligonucleotide tag attached to full-length cDNAs are selected as follows.

[0404] The plasmid cDNA libraries made as described above are purified (e.g. by a column available from Qiagen). A positive selection of the tagged clones is performed as follows. Briefly, in this selection procedure, the plasmid DNA is converted to single stranded DNA using phage F1 gene II endonuclease in combination with an exonuclease (Chang et al., Gene 127:95 (1993)) such as exonuclease III or T7 gene 6 exonuclease. The resulting single stranded DNA is then purified using paramagnetic beads as described by Fry et al., Biotechniques 13: 124 (1992). Here the single stranded DNA is hybridized with a biotinylated oligonucleotide having a sequence corresponding to the 3′ end of the oligonucleotide tag. Preferably, the primer has a length of 20-25 bases. Clones including a sequence complementary to the biotinylated oligonucleotide are selected by incubation with streptavidin coated magnetic beads followed by magnetic capture. After capture of the positive clones, the plasmid DNA is released from the magnetic beads and converted into double stranded DNA using a DNA polymerase such as ThermoSequenase™ (obtained from Amersham Pharmacia Biotech). Alternatively, protocols such as the Gene Trapper™ kit (Gibco BRL) can be used. The double stranded DNA is then transformed, preferably by electroporation, into bacteria. The percentage of positive clones having the 5′ tag oligonucleotide is typically estimated to be between 90 and 98% from dot blot analysis.

[0405] Following transformation, the libraries are ordered in microtiter plates and sequenced. The Arabidopsis library was deposited at the American Type Culture Collection on Jan. 7, 2000 as “E-coli liba 010600” under the accession number PTA-1161.

### Example 2

### Southern Hybridizations

[0406] The SDFs of the invention can be used in Southern hybridizations as described above. The following describes extraction of DNA from nuclei of plant cells, digestion of the nuclear DNA and separation by length, transfer of the separated fragments to membranes, preparation of probes for hybridization, hybridization and detection of the hybridized probe.

[0407] The procedures described herein can be used to isolate related polynucleotides or for diagnostic purposes. Moderate stringency hybridization conditions, as defined above, are described in the present example. These conditions result in detection of hybridization between sequences having at least 70% sequence identity. As described above, the hybridization and wash conditions can be changed to reflect the desired percenatge of sequence identity between probe and target sequences that can be detected.

[0408] In the following procedure, a probe for hybridization is produced from two PCR reactions using two primers from genomic sequence of Arabidopsis thaliana. As described above, the particular template for generating the probe can be any desired template.

[0409] The first PCR product is assessed to validate the size of the primer to assure it is of the expected size. Then the product of the first PCR is used as a template, with the same pair of primers used in the first PCR, in a second PCR that produces a labeled product used as the probe.

[0410] Fragments detected by hybridization, or other bands of interest, can be isolated from gels used to separate genomic DNA fragments by known methods for further purification and/or characterization.

Buffers for Nuclear DNA Extraction

[0411] 1. 10×HB

| | 1000 ml | |
|---|---|---|
| 40 mM spermidine | 10.2 g | Spermine (Sigma S-2876) and spermidine |
| | | (Sigma S-2501) |
| 10 mM spermine | 3.5 g | Stabilize chromatin and the nuclear |
| | | membrane |
| 0.1 M EDTA | 37.2 g | EDTA inhibits nuclease |
| (disodium) | | |
| 0.1 M Tris | 12.1 g | Buffer |
| 0.8 M KCl | 59.6 g | Adjusts ionic strength for stability |
| | | of nuclei |

[0412] Adjust pH to 9.5 with 10 N NaOH. It appears that there is a nuclease present in leaves. Use of pH 9.5 appears to inactivate this nuclease.
[0413] 2. 2 M sucrose (684 g per 1000 ml)
[0414] Heat about half the final volume of water to about 50° C. Add the sucrose slowly then bring the mixture to close to final volume; stir constantly until it has dissolved. Bring the solution to volume.

[0415] 3. Sarkosyl solution (lyses nuclear membranes)

| | 1000 ml |
|---|---|
| N-lauroyl sarcosine (Sarkosyl) | 20.0 g |
| 0.1 M Tris | 12.1 g |
| 0.04 M EDTA (Disodium) | 14.9 g |

[0416] Adjust the pH to 9.5 after all the components are dissolved and bring up to the proper volume.
[0417] 4. 20% Triton X-100
[0418] 80 ml Triton X-100
[0419] 320 ml 1×HB (w/o β-ME and PMSF)
[0420] Prepare in advance; Triton takes some time to dissolve
   A. Procedure

[0421] 1. Prepare 1×“H” buffer (keep ice-cold during use)

| | 1000 ml |
|---|---|
| 10 × HB | 100 ml |
| 2 M sucrose | 250 ml a non-ionic osmoticum |
| Water | 634 ml |

[0422] Added just before use:

| | |
|---|---|
| 100 mM PMSF* | 10 ml a protease inhibitor; protects |
| | nuclear membrane proteins |
| β-mercaptoethanol | 1 ml inactivates nuclease by |
| | reducing disulfide bonds |

*100 mM PMSF (phenyl methyl sulfonyl fluoride, Sigma P-7626)
(add 0.0875 g to 5 ml 100% ethanol)

[0423] 2. Homogenize the tissue in a blender (use 300-400 ml of 1×HB per blender). Be sure that you use 5-10 ml of HB buffer per gram of tissue. Blenders generate heat so be sure to keep the homogenate cold. It is necessary to put the blenders in ice periodically.
[0424] 3. Add the 20% Triton X-100 (25 ml per liter of homogenate) and gently stir on ice for 20 min. This lyses plastid, but not nuclear, membranes.
[0425] 4. Filter the tissue suspension through several nylon filters into an ice-cold beaker. The first filtration is through a 250-micron membrane; the second is through an 85-micron membrane; the third is through a 50-micron membrane; and the fourth is through a 20-micron membrane. Use a large funnel to hold the filters. Filtration can be sped up by gently squeezing the liquid through the filters.
[0426] 5. Centrifuge the filtrate at 1200×g for 20 min. at 4° C. to pellet the nuclei.
[0427] 6. Discard the dark green supernatant. The pellet will have several layers to it. One is starch; it is white and gritty. The nuclei are gray and soft. In the early steps, there may be a dark green and somewhat viscous layer of chloroplasts.
[0428] Wash the pellets in about 25 ml cold H buffer (with Triton X-100) and resuspend by swirling gently and pipetting. After the pellets are resuspended.
[0429] Pellet the nuclei again at 1200-1300×g. Discard the supernatant.
[0430] Repeat the wash 3-4 times until the supernatant has changed from a dark green to a pale green. This usually happens after 3 or 4 resuspensions. At this point, the pellet is typically grayish white and very slippery. The Triton X-100 in these repeated steps helps to destroy the chloroplasts and mitochondria that contaminate the prep.
[0431] Resuspend the nuclei for a final time in a total of 15 ml of H buffer and transfer the suspension to a sterile 125 ml Erlenmeyer flask.
[0432] 7. Add 15 ml, dropwise, cold 2% Sarkosyl, 0.1 M Tris, 0.04 M EDTA solution (pH 9.5) while swirling gently. This lyses the nuclei. The solution will become very viscous.
[0433] 8. Add 30 grams of CsCl and gently swirl at room temperature until the CsCl is in solution. The mixture will be gray, white and viscous.
[0434] 9. Centrifuge the solution at 11,400×g at 4° C. for at least 30 min. The longer this spin is, the firmer the protein pellicle.
[0435] 10. The result is typically a clear green supernatant over a white pellet, and (perhaps) under a protein pellicle. Carefully remove the solution under the protein pellicle and above the pellet. Determine the density of the solution by weighing 1 ml of solution and add CsCl if necessary to bring to 1.57 g/ml. The solution contains dissolved solids (sucrose etc) and the refractive index alone will not be an accurate guide to CsCl concentration.
[0436] 11. Add 20 μl of 10 mg/ml EtBr per ml of solution.
[0437] 12. Centrifuge at 184,000×g for 16 to 20 hours in a fixed-angle rotor.
[0438] 13. Remove the dark red supernatant that is at the top of the tube with a plastic transfer pipette and discard. Carefully remove the DNA band with another transfer pipette. The DNA band is usually visible in room light; otherwise, use a long wave UV light to locate the band.
[0439] 14. Extract the ethidium bromide with isopropanol saturated with water and salt. Once the solution is clear, extract at least two more times to ensure that all of the EtBr is gone. Be very gentle, as it is very easy to shear the DNA at this step. This extraction may take a while because the DNA solution tends to be very viscous. If the solution is too viscous, dilute it with TE.
[0440] 15. Dialyze the DNA for at least two days against several changes (at least three times) of TE (10 mM Tris, 1 mM EDTA, pH 8) to remove the cesium chloride.
[0441] 16. Remove the dialyzed DNA from the tubing. If the dialyzed DNA solution contains a lot of debris, centrifuge the DNA solution at least at 2500×g for 10 min. and carefully transfer the clear supernatant to a new tube. Read the A260 concentration of the DNA.
[0442] 17. Assess the quality of the DNA by agarose gel electrophoresis (1% agarose gel) of the DNA. Load 50 ng and 100 ng (based on the OD reading) and compare it with known and good quality DNA. Undigested lambda DNA and a lambda-HindIII-digested DNA are good molecular weight makers.
   Protocol for Digestion of Genomic DNA
   Protocol:
[0443] 1. The relative amounts of DNA for different crop plants that provide approximately a balanced number of genome equivalent is given in Table 3. Note that due to the size of the wheat genome, wheat DNA will be underrepresented. Lambda DNA provides a useful control for complete digestion.
[0444] 2. Precipitate the DNA by adding 3 volumes of 100% ethanol. Incubate at −20° C. for at least two hours. Yeast DNA can be purchased and made up at the necessary concentration, therefore no precipitation is necessary for yeast DNA.
[0445] 3. Centrifuge the solution at 11,400×g for 20 min. Decant the ethanol carefully (be careful not to disturb the pellet). Be sure that the residual ethanol is completely removed either by vacuum desiccation or by carefully wiping the sides of the tubes with a clean tissue.
[0446] 4. Resuspend the pellet in an appropriate volume of water. Be sure the pellet is fully resuspended before proceeding to the next step. This may take about 30 min.
[0447] 5. Add the appropriate volume of 10× reaction buffer provided by the manufacturer of the restriction enzyme to the resuspended DNA followed by the appropriate volume of enzymes. Be sure to mix it properly by slowly swirling the tubes.
[0448] 6. Set-up the lambda digestion-control for each DNA that you are digesting.
[0449] 7. Incubate both the experimental and lambda digests overnight at 37° C. Spin down condensation in a microfuge before proceeding.
[0450] 8. After digestion, add 2 μl of loading dye (typically 0.25% bromophenol blue, 0.25% xylene cyanol in 15% Ficoll or 30% glycerol) to the lambda-control digests and load in 1% TPE-agarose gel (TPE is 90 mM Tris-phosphate, 2 mM EDTA, pH 8). If the lambda DNA in the lambda control digests are completely digested, proceed with the precipitation of the genomic DNA in the digests.
[0451] 9. Precipitate the digested DNA by adding 3 volumes of 100% ethanol and incubating in −20° C. for at least 2 hours (preferably overnight).
   [0452] EXCEPTION: Arabidopsis and yeast DNA are digested in an appropriate volume; they don't have to be precipitated.

[0453] 10. Resuspend the DNA in an appropriate volume of TE (e.g., 22 μl×50 blots=1100 μl) and an appropriate volume of 10× loading dye (e.g., 2.4 μl×50 blots=120 μl). Be careful in pipetting the loading dye—it is viscous. Be sure you are pipetting the correct volume.

TABLE 3
Some guide points in digesting genomic DNA.

| | | | Genome | |
|---|---|---|---|---|
| | | | Equivalent | |
| | | Size | to 2 μg | Amount |
| | Genome | Relative to | Arabidopsis | of DNA |
| Species | Size | Arabidopsis | DNA | per blot |
| Arabidopsis | 120 Mb | 1X | 1X | 2 μg |
| Brassica | 1,100 Mb | 9.2X | 0.54X | 10 μg |
| Corn | 2,800 Mb | 23.3X | 0.43X | 20 μg |
| Cotton | 2,300 Mb | 19.2X | 0.52X | 20 μg |
| Oat | 11,300 Mb | 94X | 0.11X | 20 μg |
| Rice | 400 Mb | 3.3X | 0.75X | 5 μg |
| Soybean | 1,100 Mb | 9.2X | 0.54X | 10 μg |
| Sugarbeet | 758 Mb | 6.3X | 0.8X | 10 μg |
| Sweetclover | 1,100 Mb | 9.2X | 0.54X | 10 μg |
| Wheat | 16,000 Mb | 133X | 0.08X | 20 μg |
| Yeast | 15 Mb | 0.12X | 1X | 0.25 μg |

Protocol for Southern Blot Analysis

[0454] The digested DNA samples are electrophoresed in 1% agarose gels in 1× TPE buffer. Low voltage; overnight separations are preferred. The gels are stained with EtBr and photographed.
[0455] 1. For blotting the gels, first incubate the gel in 0.25 N HCl (with gentle shaking) for about 15 min.
[0456] 2. Then briefly rinse with water. The DNA is denatured by 2 incubations. Incubate (with shaking) in 0.5 M NaOH in 1.5 M NaCl for 15 min.
[0457] 3. The gel is then briefly rinsed in water and neutralized by incubating twice (with shaking) in 1.5 M Tris pH 7.5 in 1.5 M NaCl for 15 min.
[0458] 4. A nylon membrane is prepared by soaking it in water for at least 5 min, then in 6×SSC for at least 15 min. before use. (20×SSC is 175.3 g NaCl, 88.2 g sodium citrate per liter, adjusted to pH 7.0.)
[0459] 5. The nylon membrane is placed on top of the gel and all bubbles in between are removed. The DNA is blotted from the gel to the membrane using an absorbent medium, such as paper toweling and 6×SCC buffer. After the transfer, the membrane may be lightly brushed with a gloved hand to remove any agarose sticking to the surface.
[0460] 6. The DNA is then fixed to the membrane by UV crosslinking and baking at 80° C.

[0461] The membrane is stored at 4° C. until use.

B. Protocol for PCR Amplification of Genomic Fragments in Arabidopsis

[0462] Amplification Procedures:

[0463] 1. Mix the following in a 0.20 ml PCR tube or 96-well PCR plate:

| Volume | | Stock | Final Amount or Conc. | |
|---|---|---|---|---|
| 0.5 | μl | ˜10 ng/μl genomic DNA¹ | 5 | ng |
| 2.5 | μl | 10 × PCR buffer | 20 | mM Tris, 50 mM |
| | | | | KCl |
| 0.75 | μl | 50 mM MgCl₂ | 1.5 | mM |
| 1 | μl | 10 pmol/μl Primer 1 (Forward) | 10 | pmol |
| 1 | μl | 10 pmol/μl Primer 2 (Reverse) | 10 | pmol |
| 0.5 | μl | 5 mM dNTPs | 0.1 | mM |
| 0.1 | μl | 5 units/μl Platinum Taq ™ (Life | 1 | units |
| | | Technologies, Gaithersburg, MD) | | |
| | | DNA Polymerase | | |
| (to 25 | μl) | Water | | |

¹Arabidopsis DNA is used in the present experiment, but the procedure is a general one.

[0464] 2. The template DNA is amplified using a Perkin Elmer 9700 PCR machine:

[0465] 1) 94° C. for 10 min. followed by

| 2) | 3) | 4) |
|---|---|---|
| 5 cycles: | 5 cycles: | 25 cycles: |
| 94° C. - 30 sec | 94° C. - 30 sec | 94° C. - 30 sec |
| 62° C. - 30 sec | 58° C. - 30 sec | 53° C. - 30 sec |
| 72° C. - 3 min | 72° C. - 3 min | 72° C. - 3 min |

[0466] 5) 72° C. for 7 min. Then the reactions are stopped by chilling to 4° C.

[0467] The procedure can be adapted to a multi-well format if necessary.

Quantification and Dilution of PCR Products:

[0468] 1. The product of the PCR is analyzed by electrophoresis in a 1% agarose gel. A linearized plasmid DNA can be used as a quantification standard (usually at 50, 100, 200, and 400 ng). These will be used as references to approximate the amount of PCR products. HindIII-digested Lambda DNA is useful as a molecular weight marker. The gel can be run fairly quickly; e.g., at 100 volts. The standard gel is examined to determine that the size of the PCR products is consistent with the expected size and if there are significant extra bands or smeary products in the PCR reactions.
[0469] 2. The amounts of PCR products can be estimated on the basis of the plasmid standard.
[0470] 3. For the small number of reactions that produce extraneous bands, a small amount of DNA from bands with the correct size can be isolated by dipping a sterile 10-μl tip into the band while viewing though a UV Transilluminator. The small amount of agarose gel (with the DNA fragment) is used in the labeling reaction.
   C. Protocol for PCR-DIG-Labeling of DNA
   Solutions:
   [0471] Reagents in PCR reactions (diluted PCR products, 10×PCR Buffer, 50 mM MgCl₂, 5 U/μl Platinum Taq Polymerase, and the primers)
   [0472] 10×dNTP+DIG-11-dUTP [1:5]: (2 mM dATP, 2 mM dCTP, 2 mM dGTP, 1.65 mM dTTP, 0.35 mM DIG-11-dUTP)
   [0473] 10×dNTP +DIG-11-dUTP [1:10]: (2 mM dATP, 2 mM dCTP, 2 mM dGTP, 1.81 mM dTTP, 0.19 mM DIG-11-dUTP)
   [0474] 10×dNTP +DIG-11-dUTP [1:15]: (2 mM dATP, 2 mM dCTP, 2 mM dGTP, 1.875 mM dTTP, 0.125 mM DIG-11-dUTP)
   [0475] TE buffer (10 mM Tris, 1 mM EDTA, pH 8)
   [0476] Maleate buffer: In 700 ml of deionized distilled water, dissolve 11.61 g maleic acid and 8.77 g NaCl. Add NaOH to adjust the pH to 7.5. Bring the volume to 1 L. Stir for 15 min. and sterilize.
   [0477] 10% blocking solution: In 80 ml deionized distilled water, dissolve 1.16 g maleic acid. Next, add NaOH to adjust the pH to 7.5. Add 10 g of the blocking reagent powder (Boehringer Mannheim, Indianapolis, Ind., Cat. no. 1096176). Heat to 60° C. while stirring to dissolve the powder. Adjust the volume to 100 ml with water. Stir and sterilize.
   [0478] 1% blocking solution: Dilute the 10% stock to 1% using the maleate buffer.
   [0479] Buffer 3 (100 mM Tris, 100 mM NaCl, 50 mM MgCl₂, pH9.5). Prepared from autoclaved solutions of 1M Tris pH 9.5, 5 M NaCl, and 1 M MgCl₂ in autoclaved distilled water.
      Procedure:

[0480] 1. PCR reactions are performed in 25 μl volumes containing:

| | |
|---|---|
| PCR buffer | 1X |
| MgCl₂ | 1.5 mM |
| 10X dNTP + DIG-11-dUTP | 1X (please see the note |
| | below) |
| Platinum Taq ™ Polymerase | 1 unit |
| 10 pg probe DNA | |
| 10 pmol primer 1 | |

Note:

| | |
|---|---|
| | Use for: |
| 10X dNTP + DIG-11-dUTP (1:5) | <1 kb |
| 10X dNTP + DIG-11-dUTP (1:10) | 1 kb to 1.8 kb |
| 10X dNTP + DIG-11-dUTP (1:15) | >1.8 kb |

[0481] 2. The PCR reaction uses the following amplification cycles:

[0482] 1) 94° C. for 10 min.

| 2) | 3) | 4) |
|---|---|---|
| 5 cycles: | 5 cycles: | 25 cycles: |
| 95° C. - 30 sec | 95° C. - 30 sec | 95° C. - 30 sec |
| 61° C. - 1 min | 59° C. - 1 min | 51° C. - 1 min |
| 73° C. - 5 min | 75° C. - 5 min | 73° C. - 5 min |

[0483] 5) 72° C. for 8 min. The reactions are terminated by chilling to 4° C. (hold).
[0484] 3. The products are analyzed by electrophoresis- in a 1% agarose gel, comparing to an aliquot of the unlabelled probe starting material.
[0485] 4. The amount of DIG-labeled probe is determined as follows:

[0486] Make serial dilutions of the diluted control DNA in dilution buffer (TE: 10 mM Tris and 1 mM EDTA, pH 8) as shown in the following table:

| DIG-labeled control | | Final Conc. |
|---|---|---|
| DNA starting conc. | Stepwise Dilution | (Dilution Name) |
| 5 ng/μl | 1 μl in 49 μl TE | 100 pg/μl (A) |
| 100 pg/μl (A) | 25 μl in 25 μl TE | 50 pg/μl (B) |
| 50 pg/μl (B) | 25 μl in 25 μl TE | 25 pg/μl (C) |
| 25 pg/μl (C) | 20 μl in 30 μl TE | 10 pg/μl (D) |

[0487] a. Serial deletions of a DIG-labeled standard DNA ranging from 100 pg to 10 pg are spotted onto a positively charged nylon membrane, marking the membrane lightly with a pencil to identify each dilution.
[0488] b. Serial dilutions (e.g., 1:50, 1:2500, 1:10,000) of the newly labeled DNA probe are spotted.
[0489] c. The membrane is fixed by UV crosslinking.
[0490] d. The membrane is wetted with a small amount of maleate buffer and then incubated in 1% blocking solution for 15 min at room temp.
[0491] e. The labeled DNA is then detected using alkaline phosphatase conjugated anti-DIG antibody (Boehringer Mannheim, Indianapolis, Ind., cat. no. 1093274) and an NBT substrate according to the manufacture's instruction.
[0492] f. Spot intensities of the control and experimental dilutions are then compared to estimate the concentration of the PCR-DIG-labeled probe.
   D. Prehybridization and Hybridization of Southern Blots

[0493] Solutions:

| | |
|---|---|
| 100% Formamide | purchased from Gibco |
| 20X SSC | (1X = 0.15 M NaCl, 0.015 M Na₃citrate) |
| per L: | 175 g NaCl |
| | 87.5 g Na₃citrate 2H₂0 |

[0494] 20% Sarkosyl (N-lauroyl-sarcosine)
[0495] 20% SDS (sodium dodecyl sulphate)
[0496] 10% Blocking Reagent: In 80 ml deionized distilled water, dissolve 1.16 g maleic acid. Next, add NaOH to adjust the pH to 7.5. Add 10 g of the blocking reagent powder. Heat to 60° C. while stirring to dissolve the powder. Adjust the volume to 100 ml with water. Stir and sterilize.

[0497] Prehybridization Mix:

| Final | | Volume | |
|---|---|---|---|
| Concentration | Components | (per 100 ml) | Stock |
| 50% | Formamide | 50 ml | 100% |
| 5X | SSC | 25 ml | 20X |
| 0.1% | Sarkosyl | 0.5 ml | 20% |
| 0.02% | SDS | 0.1 ml | 20% |
| 2% | Blocking Reagent | 20 ml | 10% |
| | Water | 4.4 ml | |

General Procedures:
[0498] 1. Place the blot in a heat-sealable plastic bag and add an appropriate volume of prehybridization solution (30 ml/100 cm²) at room temperature. Seal the bag with a heat sealer, avoiding bubbles as much as possible. Lay down the bags in a large plastic tray (one tray can accommodate at least 4-5 bags). Ensure that the bags are lying flat in the tray so that the prehybridization solution is evenly distributed throughout the bag. Incubate the blot for at least 2 hours with gentle agitation using a waver shaker.
[0499] 2. Denature DIG-labeled DNA probe by incubating for 10 min. at 98° C. using the PCR machine and immediately cool it to 4° C.
[0500] 3. Add probe to prehybridization solution (25 ng/ml; 30 ml=750 ng total probe) and mix well but avoid foaming. Bubbles may lead to background.
[0501] 4. Pour off the prehybridization solution from the hybridization bags and add new prehybridization and probe solution mixture to the bags containing the membrane.
[0502] 5. Incubate with gentle agitation for at least 16 hours.
[0503] 6. Proceed to medium stringency post-hybridization wash:
[0504] Three times for 20 min. each with gentle agitation using 1×SSC, 1% SDS at 60° C.
[0505] All wash solutions must be prewarmed to 60° C. Use about 100 ml of wash solution per membrane.
[0506] To avoid background keep the membranes fully submerged to avoid drying in spots; agitate sufficiently to avoid having membranes stick to one another.
[0507] 7. After the wash, proceed to immunological detection and CSPD development.
   E. Procedure for Immunological Detection with CSPD

[0508] Solutions:

| | |
|---|---|
| Buffer 1: | Maleic acid buffer (0.1 M maleic acid, 0.15 M |
| | NaCl; adjusted to pH 7.5 with NaoH) |
| Washing buffer: | Maleic acid buffer with 0.3% (v/v) Tween 20. |
| Blocking stock | 10% blocking reagent in buffer 1. Dissolve (10X |
| solution | concentration): blocking reagent powder |
| | (Boehringer Mannheim, Indianapolis, IN, cat. no. |
| | 1096176) by constantly stirring on a 65° C. |
| | heating block or heat in a microwave, |
| | autoclave and store at 4° C. |
| Buffer 2 | Dilute the stock solution 1:10 in Buffer 1. |
| (1X blocking solution): | |
| Detection buffer: | 0.1 M Tris, 0.1 M NaCl, pH 9.5 |

Procedure:
[0509] 1. After the post-hybridization wash the blots are briefly rinsed (1-5 min.) in the maleate washing buffer with gentle shaking.
[0510] 2. Then the membranes are incubated for 30 min. in Buffer 2 with gentle shaking.
[0511] 3. Anti-DIG-AP conjugate (Boehringer Mannheim, Indianapolis, Ind., cat. no. 1093274) at 75 mU/ml (1:10,000) in Buffer 2 is used for detection. 75 ml of solution can be used for 3 blots.
[0512] 4. The membrane is incubated for 30 min. in the antibody solution with gentle shaking.
[0513] 5. The membrane is washed twice in washing buffer with gentle shaking. About 250 mls is used per wash for 3 blots.
[0514] 6. The blots are equilibrated for 2-5 min in 60 ml detection buffer.
[0515] 7. Dilute CSPD (1:200) in detection buffer. (This can be prepared ahead of time and stored in the dark at 4° C.).
[0516] The following steps must be done individually. Bags (one for detection and one for exposure) are generally cut and ready before doing the following steps.
[0517] 8. The blot is carefully removed from the detection buffer and excess liquid removed without drying the membrane. The blot is immediately placed in a bag and 1.5 ml of CSPD solution is added. The CSPD solution can be spread over the membrane. Bubbles present at the edge and on the surface of the blot are typically removed by gentle rubbing. The membrane is incubated for 5 min. in CSPD solution.
[0518] 9. Excess liquid is removed and the membrane is blotted briefly (DNA side up) on Whatman 3MM paper. Do not let the membrane dry completely.
[0519] 10. Seal the damp membrane in a hybridization bag and incubate for 10 min at 37° C. to enhance the luminescent reaction.
   [0520] 11. Expose for 2 hours at room temperature to X-ray film. Multiple exposures can be taken. Luminescence continues for at least 24 hours and signal intensity increases during the first hours.
   [0521] 12.

### Example 3:

### Transformation of Carrot Cells

[0522] Transformation of plant cells can be accomplished by a number of methods, as described above. Similarly, a number of plant genera can be regenerated from tissue culture following transformation. Transformation and regeneration of carrot cells as described herein is illustrative.

[0523] Single cell suspension cultures of carrot (Daucus carota) cells are established from hypocotyls of cultivar Early Nantes in B₅ growth medium (O. L. Gamborg et al., Plant Physiol. 45:372 (1970)) plus 2,4-D and 15 mM CaCl₂ (B₅-44 medium) by methods known in the art. The suspension cultures are subcultured by adding 10 ml of the suspension culture to 40 ml of B₅-44 medium in 250 ml flasks every 7 days and are maintained in a shaker at 150 rpm at 27° C. in the dark.

[0524] The suspension culture cells are transformed with exogenous DNA as described by Z. Chen et al. Plant Mol. Bio. 36:163 (1998). Briefly, 4-days post-subculture cells are incubated with cell wall digestion solution containing 0.4 M sorbitol, 2% driselase, 5 mM MES (2-[N-Morpholino] ethanesulfonic acid) pH 5.0 for 5 hours. The digested cells are pelleted gently at 60×g for 5 min. and washed twice in W5 solution containing 154 mM NaCl, 5 mM KCl, 125 mM CaCl₂ and 5 mM glucose, pH 6.0. The protoplasts are suspended in MC solution containing 5 mM MES, 20 mM CaCl₂, 0.5 M mannitol, pH 5.7 and the protoplast density is adjusted to about 4×10⁶protoplasts per ml. 15-60 μg of plasmid DNA is mixed with 0.9 ml of protoplasts. The resulting suspension is mixed with 40% polyethylene glycol (MW 8000, PEG 8000), by gentle inversion a few times at room temperature for 5 to 25 min. Protoplast culture medium known in the art is added into the PEG-DNA-protoplast mixture. Protoplasts are incubated in the culture medium for 24 hour to 5 days and cell extracts can be used for assay of transient expression of the introduced gene. Alternatively, transformed cells can be used to produce transgenic callus, which in turn can be used to produce transgenic plants, by methods known in the art. See, for example, Nomura and Komamine, Plt. Phys. 79:988-991 (1985), Identification and Isolation of Single Cells that Produce Somatic Embryos in Carrot Suspension Cultures.

[0525] A deposit of an E. coli Library, E. coliLibA021800, was made at the American Type Culture Collection in Manassas, Va., USA on Feb. 23, 2000 to meet the requirements of Budapest Treaty for the international recognition of the deposit of microorganisms. This deposit was assigned accession number PTA-1411.

[0526] A deposit of an E. coli Library, E. coliLib060700, was made at the American Type Culture Collection in Manassas, Va., USA on Jun. 8, 2000 to meet the requirements of Budapest Treaty for the international recognition of the deposit of microorganisms. This deposit was assigned accession number PTA-2007.

[0527] The invention being thus described, it will be apparent to one of ordinary skill in the art that various modifications of the materials and methods for practicing the invention can be made. Such modifications are to be considered within the scope of the invention as defined by the following claims.

[0528] Each of the references from the patent and periodical literature cited herein is hereby expressly incorporated in its entirety by such citation.

The application's sequence listing, which the Patent Office published only in electronic form, follows.

SEQUENCE LISTING (40252 sequences)

SEQ ID NO: 1 - DNA, 323 bp, Brassica napus
gtgccttagctctcaagaccgccgcttctcactaagaagaccaaaacatggtgcacgtttgctactaccgtaactatggaaagaccttcaagggcccacgacgtcctttcgagaaggagcgtctcgactccgagctgaagctagtcggcgagtacggtctccgcaacaagcgtgagctctggagagtccagtactctcttagccgcatccgtaacgcggctagagatcttctcactctcgacgagaagaaccccaagaggatcttcgaaggtgaggcactcctccgtaagatgaaccgttacgggcttcttgacgagagtcag

SEQ ID NO: 2 - protein, 92 aa, Brassica napus
MVHVCYYRNYGKTFKGPRRPFEKERLDSELKLVGEYGLRNKRELWRVQYSLSRIRNAARDLLTLDEKNPKRIFEGEALLRKMNRYGLLDESQ

SEQ ID NO: 3 - DNA, 917 bp, Brassica napus
agtttagtataaactaaaaacttgtgttctacatacggacatattctgtttttttttgtaatggcttcttcctcttacgcaccattctctgcagtcttcagcggtttcgctgcaacgaaacctaacccacctccaacttgttctgcttttctcgtccctaagcgaagatcaaattctcggaatctgaaaaatggggtttccttgaaatcttggaataagcatggatttcaattcacatcaagaaatttgagtgtgtatgcaagagctactgaagagaagactgttcatgatttcactgtaaaggacataagtgggaaggatgtttccctagacaaattcaaaggaaaacctctgttgatcgttaacgttgcttcaaaatgtggtttaacatcatcaaactacacagagctttcacaattgtacgacaaatacagaaaccaaggatttgagattctagctttcccttgcaatcaatttggaggtcaagaacctgaatcaaacccggatatcaagcggttcgtgtgtaccagatttaaagctgagttccctatattcgataaggttgatgtgaatggaccgagcacagctccaatctaccagttcttgaaatcaaagtcgggtgggttcttgggtgatctcatcaagtggaactttgagaaattcttggttgacaaaaaaggcaacgtcgtccagagataccctcccacgacttctcctttacaaattgagaaagacatccagaagttgcttgtggcttaaattttatactgttcataatgtgtgtataagagattcgtagtgtctcaataacctgtttattgttggtataccggaaattcagatagacatgtatcccttatgtaacagtcttatagaaatgacattatacgatcggaaattcaaatgaacatttatgc

SEQ ID NO: 4 - protein, 232 aa, Brassica napus
MASSSYAPFSAVFSGFAATKPNPPPTCSAFLVPKRRSNSRNLKNGVSLKSWNKHGFQFTSRNLSVYARATEEKTVHDFTVKDISGKDVSLDKFKGKPLLIVNVASKCGLTSSNYTELSQLYDKYRNQGFEILAFPCNQFGGQEPESNPDIKRFVCTRFKAEFPIFDKVDVNGPSTAPIYQFLKSKSGGFLGDLIKWNFEKFLVDKKGNVVQRYPPTTSPLQIEKDIQKLLVA

SEQ ID NO: 5 - DNA, 849 bp, Brassica napus
  misc_feature (96)..(96): n is a, c, g, or t
acacaacataaaccaatctctccctcactcactcaaacaaatggcgaaatctccagagacagagcatccgaacaaagcctttggttgggctgccanagacaaatctggtgtactcactcctttccatttctccagaagagacaatggtgacaatgatgtgacagtgaagatcttgtattgtggagtgtgccacactgatttacataccatcaaaaacgactggggcttctcgtattatcctgtagttccagggcatgaaatagttggaatagctacaaaagttggcaaaaacgtgactaaattcagagaaggagaccgtgtaggagtaggagtgatcactggttcttgccaatcttgcgaatcttgtaaccaagatcttgaaaactactgtccccaaatgtctttcatctacaactccataggatccgatggaaccaagacctacggtggatattcggagtccattgtggtcgatcaacgttttgtcttgcagtttcccgagggattacctagcgattcgggtgcccccttgctgtgtgctggaatcactgtgtatagtccaatgaagtattatggtatgaccgagcctgggaagcatttgggtgtggctggacttggtgggcttggtcatgttgctgtcaagattggtaaagcctttggtttgaaagtcactgtgattagttcttctcctagtaaagaagacgaagccattaatcgacttggtgctgattcgtttcttgtctcatctgatcctcagaagatgaaggctgcaattggaacaatggactatattatcgatacagtttcagcagtacatgctttgtttccattgcttggtttactcaaagc

SEQ ID NO: 6 - protein, 282 aa, Brassica napus
  misc_feature (32)..(32): Xaa can be any naturally occurring amino acid
HNINQSLPHSLKQMAKSPETEHPNKAFGWAAXDKSGVLTPFHFSRRDNGDNDVTVKILYCGVCHTDLHTIKNDWGFSYYPVVPGHEIVGIATKVGKNVTKFREGDRVGVGVITGSCQSCESCNQDLENYCPQMSFIYNSIGSDGTKTYGGYSESIVVDQRFVLQFPEGLPSDSGAPLLCAGITVYSPMKYYGMTEPGKHLGVAGLGGLGHVAVKIGKAFGLKVTVISSSPSKEDEAINRLGADSFLVSSDPQKMKAAIGTMDYIIDTVSAVHALFPLLGLLK

SEQ ID NO: 7 - protein, 269 aa, Brassica napus
  misc_feature (19)..(19): Xaa can be any naturally occurring amino acid
MAKSPETEHPNKAFGWAAXDKSGVLTPFHFSRRDNGDNDVTVKILYCGVCHTDLHTIKNDWGFSYYPVVPGHEIVGIATKVGKNVTKFREGDRVGVGVITGSCQSCESCNQDLENYCPQMSFIYNSIGSDGTKTYGGYSESIVVDQRFVLQFPEGLPSDSGAPLLCAGITVYSPMKYYGMTEPGKHLGVAGLGGLGHVAVKIGKAFGLKVTVISSSPSKEDEAINRLGADSFLVSSDPQKMKAAIGTMDYIIDTVSAVHALFPLLGLLK

SEQ ID NO: 8 - protein, 150 aa, Brassica napus
MSFIYNSIGSDGTKTYGGYSESIVVDQRFVLQFPEGLPSDSGAPLLCAGITVYSPMKYYGMTEPGKHLGVAGLGGLGHVAVKIGKAFGLKVTVISSSPSKEDEAINRLGADSFLVSSDPQKMKAAIGTMDYIIDTVSAVHALFPLLGLLK

SEQ ID NO: 9 - DNA, 1005 bp, Brassica napus
  misc_feature (585)..(585): n is a, c, g, or t
  misc_feature (623)..(623): n is a, c, g, or t
  misc_feature (634)..(634): n is a, c, g, or t
  misc_feature (651)..(651): n is a, c, g, or t
  misc_feature (669)..(669): n is a, c, g, or t
  misc_feature (807)..(807): n is a, c, g, or t
  misc_feature (809)..(809): n is a, c, g, or t
  misc_feature (873)..(873): n is a, c, g, or t
  misc_feature (968)..(968): n is a, c, g, or t
attttttgtaaataaattctagctaaacttatcttttcggcatataggcggcgagaacaaaatagagagagcatatacaaaaacacgttgctaaagttggagaagaaaatggagcaaccttatgtgtatgcttacccaccaggcacggctcctccgcctccacaaggcagtggcatcgccggagtgatagtggatccaaggttctgtgctccgtatcccgtggatctggcgatcgtgcggaagatgatgaagttgactgacggtaacttcgttataacggacgttaacgggaacttgttgttcaaggtgaaggagccgatgtttggtcttcatgacaagaggattttattggatggttctggatctccggtcttgactttgagagagaagatggtgagcttgcatgacaggtggcaagtatttagaggagggagtacggagcagcgtgatctactgtacactgttaagagatcgtcgatgcttcagtttaagaccaaacttgatgtgtttttgagtcacaataaggatgagaagagatgcgattttagggtgaaagggagctggtttgagcgctcttgtgtcgtntacgccggcgaatctgacgccatcgttgcccaaatgcncaagaagcacncggtgcagagcgtgttnttgggaaaagataatttntcggtgacggtttatccaaacgtggactatgccttcattgcctctctcgtcgtcattctcgatgatgttaaccgagaagaccgcgccgccgccggcagtagctgatcagatcagacggtgtgcatgtgtgtgtgtgananagagggcttgctcacgtagtagttatgcttttggctttgtattgtgctgtacctatatattctntaaactttggaatgtggacttggttctttgtgtggtgatctttccagttgtaaaataatacaaatgtatgtatagttagtcattcacgcactttnttacataaattttactatatgttatgttttttaattc

SEQ ID NO: 10 - protein, 221 aa, Brassica napus
  misc_feature (159)..(159): Xaa can be any naturally occurring amino acid
  misc_feature (172)..(172): Xaa can be any naturally occurring amino acid
  misc_feature (176)..(176): Xaa can be any naturally occurring amino acid
  misc_feature (181)..(181): Xaa can be any naturally occurring amino acid
  misc_feature (187)..(187): Xaa can be any naturally occurring amino acid
MEQPYVYAYPPGTAPPPPQGSGIAGVIVDPRFCAPYPVDLAIVRKMMKLTDGNFVITDVNGNLLFKVKEPMFGLHDKRILLDGSGSPVLTLREKMVSLHDRWQVFRGGSTEQRDLLYTVKRSSMLQFKTKLDVFLSHNKDEKRCDFRVKGSWFERSCVXYAGESDAIVAQMXKKHXVQSVXLGKDNXSVTVYPNVDYAFIASLVVILDDVNREDRAAAGSS

SEQ ID NO: 11 - protein, 176 aa, Brassica napus
  misc_feature (114)..(114): Xaa can be any naturally occurring amino acid
  misc_feature (127)..(127): Xaa can be any naturally occurring amino acid
  misc_feature (131)..(131): Xaa can be any naturally occurring amino acid
  misc_feature (136)..(136): Xaa can be any naturally occurring amino acid
  misc_feature (142)..(142): Xaa can be any naturally occurring amino acid
MMKLTDGNFVITDVNGNLLFKVKEPMFGLHDKRILLDGSGSPVLTLREKMVSLHDRWQVFRGGSTEQRDLLYTVKRSSMLQFKTKLDVFLSHNKDEKRCDFRVKGSWFERSCVXYAGESDAIVAQMXKKHXVQSVXLGKDNXSVTVYPNVDYAFIASLVVILDDVNREDRAAAGSS

SEQ ID NO: 12 - protein, 175 aa, Brassica napus
  misc_feature (113)..(113): Xaa can be any naturally occurring amino acid
  misc_feature (126)..(126): Xaa can be any naturally occurring amino acid
  misc_feature (130)..(130): Xaa can be any naturally occurring amino acid
  misc_feature (135)..(135): Xaa can be any naturally occurring amino acid
  misc_feature (141)..(141): Xaa can be any naturally occurring amino acid
MKLTDGNFVITDVNGNLLFKVKEPMFGLHDKRILLDGSGSPVLTLREKMVSLHDRWQVFRGGSTEQRDLLYTVKRSSMLQFKTKLDVFLSHNKDEKRCDFRVKGSWFERSCVXYAGESDAIVAQMXKKHXVQSVXLGKDNXSVTVYPNVDYAFIASLVVILDDVNREDRAAAGSS

SEQ ID NO: 13 - DNA, 661 bp, Brassica napus
  misc_feature (399)..(399): n is a, c, g, or t
  misc_feature (508)..(508): n is a, c, g, or t
  misc_feature (526)..(526): n is a, c, g, or t
  misc_feature (530)..(530): n is a, c, g, or t
  misc_feature (600)..(600): n is a, c, g, or t
  misc_feature (656)..(656): n is a, c, g, or t
aagggttcaatcttcctctggtctcgatctgaatctctctctctctctctctggcaggaaacataaaaaaaaaaaaagacggaatctagttagggattttgtaatggcgaacactgcttgctttatgattgtggctcggaatgatattcccatctatgaagctgaagttggatctgctgctaaaagagaagatgtggctcaactgcaccagtttatattacatgccgcgttggatgtcgtccaagacttagcatggactacaagtgccatgttcttgaagtctgtcgacagattcaacgatctggttgtctcagtctatgttactgcaggtcatactcgtctcatgctccttcatgattcacgtaatgaggatggcatcaagagcttcttccaggaggngcatgagctttatataaagattcttctgaatcccttgtatctgcctggttctcgcatcacatcgacgcattttgacaccaaggtacgtgcactagcaagaaagtacctntagagaagaccgagattntgtnttccagctcaatttccttggtcccatatcgcaattgtttcgtctttgattgttatccagcctctactttntttgtaatatcgaaaatatttgctagtaaacatagaatgaaaaaggaagagttttntttgc

SEQ ID NO: 14 - protein, 169 aa, Brassica napus
  misc_feature (133)..(133): Xaa can be any naturally occurring amino acid
  misc_feature (169)..(169): Xaa can be any naturally occurring amino acid
RVQSSSGLDLNLSLSLSGRKHKKKKRRNLVRDFVMANTACFMIVARNDIPIYEAEVGSAAKREDVAQLHQFILHAALDVVQDLAWTTSAMFLKSVDRFNDLVVSVYVTAGHTRLMLLHDSRNEDGIKSFFQEXHELYIKILLNPLYLPGSRITSTHFDTKVRALARKYX

SEQ ID NO: 15 - protein, 135 aa, Brassica napus
  misc_feature (99)..(99): Xaa can be any naturally occurring amino acid
  misc_feature (135)..(135): Xaa can be any naturally occurring amino acid
MANTACFMIVARNDIPIYEAEVGSAAKREDVAQLHQFILHAALDVVQDLAWTTSAMFLKSVDRFNDLVVSVYVTAGHTRLMLLHDSRNEDGIKSFFQEXHELYIKILLNPLYLPGSRITSTHFDTKVRALARKYX

SEQ ID NO: 16 - protein, 128 aa, Brassica napus
  misc_feature (92)..(92): Xaa can be any naturally occurring amino acid
  misc_feature (128)..(128): Xaa can be any naturally occurring amino acid
MIVARNDIPIYEAEVGSAAKREDVAQLHQFILHAALDVVQDLAWTTSAMFLKSVDRFNDLVVSVYVTAGHTRLMLLHDSRNEDGIKSFFQEXHELYIKILLNPLYLPGSRITSTHFDTKVRALARKYX

SEQ ID NO: 17 - DNA, 578 bp, Brassica napus
gaaaactggaaggactctccttcctcggttctgaacatttaccatgagcttatagctgcagggctacgtatatgggttttcagtggagatgcagatgctgttgtaccagttacatcaactcggtacagcatagatgcactaaaacttcacccagtgagtccctatggtccttggtacatagacggacaggtgggagggtggactcaggagtatgatggtctaaactttgtgactgtgagaggtgcagggcatgaagttcctttgcatagaccgaaggaggctcttgcgctattccaggcttttatatctggaacttcattgccaactccagagaacagcatcagaagcgacaagtctgaactcgttggtgactcatgatgagttgtgtgattctcagtcagaaagttgcagtccttgtatgaactagttaagataataatataatagctttaaacgctgttttgaaacatttagtgttggattctatttaagtgtctatcatcatataatccaaactccaatatatatattcatcaagataacacgcattgttcatgagaaattgaaaattaagtatg

SEQ ID NO: 18 - protein, 125 aa, Brassica napus
ENWKDSPSSVLNIYHELIAAGLRIWVFSGDADAVVPVTSTRYSIDALKLHPVSPYGPWYIDGQVGGWTQEYDGLNFVTVRGAGHEVPLHRPKEALALFQAFISGTSLPTPENSIRSDKSELVGDS

SEQ ID NO: 19 - DNA, 509 bp, Brassica napus
aattaaacaactaaatttaaattgatccgaaagcctcttttttttttcttgatccgaaaacttgaacccgacggttgttggctcttcctcctcctcctccatcgtctctcgaatcaaatcaacgaaacgaaaacaaaatggctaatacggcgaagcagagcgctaccctcgcttaccccgacagattctacgccgccgcatcgtacctcggcctcgacggatctgcaccgtcttccgtgaaacaactcagctccaaattctccaacgacgccgtgctgcttctctacgcgcttcaccagcaggccactgtaggaccttgtaatacaccaaaacctagcgcgtggaatccagctgagcaaagcaagtggaaaaggtttgccttccttacactataaggagagaggctttagatttcatcaatgtagcttctaatatagacatagtcttccaccgtatcatcggtagttgtaacggatcctaatcctaagcattgtataagataaatgagc

SEQ ID NO: 20 - protein, 85 aa, Brassica napus
MANTAKQSATLAYPDRFYAAASYLGLDGSAPSSVKQLSSKFSNDAVLLLYALHQQATVGPCNTPKPSAWNPAEQSKWKRFAFLTL

SEQ ID NO: 21 - DNA, 876 bp, Brassica napus
aagtaagcagaatggaatcaaaagaatggagctccggcgtgtggacgcacctcacgtccgtccggcgacaatcgccgctggttcagtgcatcaccaacttggtctcaatggatctcgtggccaacacgcttttatccgccggcgcatcaccggcgatggttcattccgtcgctgaggttcccgatttcacacctcatattcacgcgctctgcgtcaacgtcggcacgcttacgcctgactggctcccctccatgaaagccgctgccgaactcgcttctcagctcggaaagccatgggttctcgatcccgccgccgtgagttgctccggtttccggttgaaggcgtgcttggagctcgttgagcttaaacctagcgtgatcaaaggaaacggttctgagatcattgctctctcgggctctgcttcacagtgtcagactaagggtgcggatagctctcatgaatctacagaggccgtagaagctgccaagtcattagctttgtctagtggtgctgttgttgcagtttcaggagctgttgatatcgttacggatgggaaacgggttgttggtgtccacaacgggacaaagatgatgcagaagatcactgcgactgggtgttctctagctggtctggttgctgcgtttcttgctgtcgatccgttgcatccactggaagctactgtttccgctatgtctgtctttggcatcgcaggtgagttgggtgaagagttggcgaacggtccagcttctttgagaatgcatttgattgattctctttacggtttagatgaaaccactgtgcttagccgtgtgagaatcaccaggttgggttgatgtacaacaagactttgtgttttgctttcaatcaataagtgtt

SEQ ID NO: 22 - protein, 276 aa, Brassica napus
VSRMESKEWSSGVWTHLTSVRRQSPLVQCITNLVSMDLVANTLLSAGASPAMVHSVAEVPDFTPHIHALCVNVGTLTPDWLPSMKAAAELASQLGKPWVLDPAAVSCSGFRLKACLELVELKPSVIKGNGSEIIALSGSASQCQTKGADSSHESTEAVEAAKSLALSSGAVVAVSGAVDIVTDGKRVVGVHNGTKMMQKITATGCSLAGLVAAFLAVDPLHPLEATVSAMSVFGIAGELGEELANGPASLRMHLIDSLYGLDETTVLSRVRITRLG

SEQ ID NO: 23 - protein, 273 aa, Brassica napus
MESKEWSSGVWTHLTSVRRQSPLVQCITNLVSMDLVANTLLSAGASPAMVHSVAEVPDFTPHIHALCVNVGTLTPDWLPSMKAAAELASQLGKPWVLDPAAVSCSGFRLKACLELVELKPSVIKGNGSEIIALSGSASQCQTKGADSSHESTEAVEAAKSLALSSGAVVAVSGAVDIVTDGKRVVGVHNGTKMMQKITATGCSLAGLVAAFLAVDPLHPLEATVSAMSVFGIAGELGEELANGPASLRMHLIDSLYGLDETTVLSRVRITRLG

SEQ ID NO: 24 - protein, 241 aa, Brassica napus
MDLVANTLLSAGASPAMVHSVAEVPDFTPHIHALCVNVGTLTPDWLPSMKAAAELASQLGKPWVLDPAAVSCSGFRLKACLELVELKPSVIKGNGSEIIALSGSASQCQTKGADSSHESTEAVEAAKSLALSSGAVVAVSGAVDIVTDGKRVVGVHNGTKMMQKITATGCSLAGLVAAFLAVDPLHPLEATVSAMSVFGIAGELGEELANGPASLRMHLIDSLYGLDETTVLSRVRITRLG

SEQ ID NO: 25 - DNA, 852 bp, Brassica napus
  misc_feature (697)..(697): n is a, c, g, or t
  misc_feature (753)..(753): n is a, c, g, or t
atcgccctaatttctccaggaggcggcgcgacggattattcgagtttttttttttttttgcgatgaagacagtcaccggaagtgttaacagtgcgaaaccaatctccctcgctaaggcggccacgcttctctccgggttcgtttcttctgagacccaggcctctcaagacgttagcgcctacctccgacgcgcatctgctgccttcactgaattgaggagcttccacagaaagattcgatcggcgaatcaaaaatccgagctccaggagctgggtggagctaaggggattgatgattcggtggaaaacgaagctgtgaccggagaggaatcagttcatggtcggaaacaggatgagataaaggaggttaagaagaagagaaaggagaacgaagaagaagatgttgttgaggagaaggtgatggtgaagttggaagacgagcagaggagcaaagagagaaagaagaagagcaaatatgaaaatgttattgacgagaaggtgaatgtgaagttggaagaagatagaaaggagaggaagagcaagaagaacaaaaaggaagatgttattgacgagaagttggaagaagagaggaagagcaagaaaaagaggaaattaccaaaggagactgatgcttgaagcttgaagacagttttgggattttagctcaaggtttagagaaaactttgtagctgagttcnctgaatttttcaaaagttttgggtaaagtgtagtagctaaagatgttccttagtgncaattaagattgagaaagatttgatttttgggaattgtctgttatatttcgtaattatatgcattctgcaatggtggagttatgattggtttcggtatt

SEQ ID NO: 26 - protein, 210 aa, Brassica napus
RPNFSRRRRDGLFEFFFFFAMKTVTGSVNSAKPISLAKAATLLSGFVSSETQASQDVSAYLRRASAAFTELRSFHRKIRSANQKSELQELGGAKGIDDSVENEAVTGEESVHGRKQDEIKEVKKKRKENEEEDVVEEKVMVKLEDEQRSKERKKKSKYENVIDEKVNVKLEEDRKERKSKKNKKEDVIDEKLEEERKSKKKRKLPKETDA

SEQ ID NO: 27 - protein, 190 aa, Brassica napus
MKTVTGSVNSAKPISLAKAATLLSGFVSSETQASQDVSAYLRRASAAFTELRSFHRKIRSANQKSELQELGGAKGIDDSVENEAVTGEESVHGRKQDEIKEVKKKRKENEEEDVVEEKVMVKLEDEQRSKERKKKSKYENVIDEKVNVKLEEDRKERKSKKNKKEDVIDEKLEEERKSKKKRKLPKETDA

SEQ ID NO: 28 - DNA, 661 bp, Brassica napus
  misc_feature (487)..(487): n is a, c, g, or t
acactaacaacagaggttgagggaaataaattctctagcaagtagcaagtagcaagtcatgacttcttcctctaaatgtttctttcttggttcattggtagtctcgttactacttttcttaggatctacttcgaccatagccttaacaaaagacattaattcaacatgctatcgttattctgtcgataattcttttgtccataacaaaacgttctgcctgcaaacgctcacagcgtatcctcccgctgtctctgcaactaacatggtcgaacttgtgaaagtcacactcgaccttggatcgacccaggctaaagaaagggcaggtttcgttgccggattggaaaaagagcctacatttaaaaaatattttgagatgtgcagtgaatcctatgccataatagtggataactttagaggtgctcgattatgtatggaggatggtgccgcgggtgccgcgggtgcaagcattacaatccttcaaacttangacaatacacaacgtgtgaaggatacaatcggcaagaacacagacaaggcctcgaaaaagctcatggagatgacattagttatggaggatttcgtggctatagctaatgcagccatcagcgtaatattttaattattaaacttttcatgtgctcaaatcctaaagataatattt

SEQ ID NO: 29 - protein, 186 aa, Brassica napus
  misc_feature (143)..(143): Xaa can be any naturally occurring amino acid
MTSSSKCFFLGSLVVSLLLFLGSTSTIALTKDINSTCYRYSVDNSFVHNKTFCLQTLTAYPPAVSATNMVELVKVTLDLGSTQAKERAGFVAGLEKEPTFKKYFEMCSESYAIIVDNFRGARLCMEDGAAGAAGASITILQTXDNTQRVKDTIGKNTDKASKKLMEMTLVMEDFVAIANAAISVIF

SEQ ID NO: 30 - protein, 118 aa, Brassica napus
  misc_feature (75)..(75): Xaa can be any naturally occurring amino acid
MVELVKVTLDLGSTQAKERAGFVAGLEKEPTFKKYFEMCSESYAIIVDNFRGARLCMEDGAAGAAGASITILQTXDNTQRVKDTIGKNTDKASKKLMEMTLVMEDFVAIANAAISVIF

SEQ ID NO: 31 - DNA, 851 bp, Brassica napus
  misc_feature (460)..(460): n is a, c, g, or t
  misc_feature (546)..(546): n is a, c, g, or t
  misc_feature (741)..(741): n is a, c, g, or t
attaatcatcccattcccagcaatctatctcctagaaaaataatctgattcttttcacctaatattagctggagacgaaaccctagattttgtcaagctcgaagaagaagaaatcatatggcaggagttggaccgatgacgcaagattgggagccggtggtgatccgaaagagagcccctaactccgccgccaagcgcgacgagaaaaccgtcaacgccgctcgtcgatccggcgccgatatcgaatccgtcagaaaatacaatgctggaaccaacaaggcagcctcaagtggcacatctctcaacacaaagaggcttgatgacgacactgagaacctcgctcatgagcgtgtgcctactgagcttaagaaagccattatgcaagctcgaactgacaagaagcttacccagtcccaacttgctcaagtattatatttatcctttttctctctatatctgnctcttcttattatcacgcagttcatgacataaagcttgtttctttcttttggtagatcatcaatgagaagccacaagtgatccaanagtatgagtctggtaaagcgatccccaaccagcagatcctttttaagcttgagagagctcttggagctaaacttcgtggtaagaagtgatcatcatcaattcctcaagttgaacatcacttaattgcagtttcactattcttaatgactgtgtggtaacaacaatcagtgctttgatgtaatgtcgtaacttttntaaagaataatcttttctcatgtaagaaagatagaaccgtttgaatgtttggttgataaatcactcttttcataaacatatatcaataaatataagtaactttgggggtt

SEQ ID NO: 32 - protein, 124 aa, Brassica napus
  misc_feature (115)..(115): Xaa can be any naturally occurring amino acid
MAGVGPMTQDWEPVVIRKRAPNSAAKRDEKTVNAARRSGADIESVRKYNAGTNKAASSGTSLNTKRLDDDTENLAHERVPTELKKAIMQARTDKKLTQSQLAQVLYLSFFSLYLXLLIITQFMT

SEQ ID NO: 33 - protein, 118 aa, Brassica napus
  misc_feature (109)..(109): Xaa can be any naturally occurring amino acid
MTQDWEPVVIRKRAPNSAAKRDEKTVNAARRSGADIESVRKYNAGTNKAASSGTSLNTKRLDDDTENLAHERVPTELKKAIMQARTDKKLTQSQLAQVLYLSFFSLYLXLLIITQFMT

SEQ ID NO: 34 - protein, 74 aa, Brassica napus
  misc_feature (66)..(66): Xaa can be any naturally occurring amino acid
MLEPTRQPQVAHLSTQRGLMTTLRTSLMSVCLLSLRKPLCKLELTRSLPSPNLLKYYIYPFSLYIXLFLLSRSS

SEQ ID NO: 35 - DNA, 787 bp, Brassica napus
  misc_feature (550)..(550): n is a, c, g, or t
  misc_feature (575)..(575): n is a, c, g, or t
  misc_feature (594)..(594): n is a, c, g, or t
  misc_feature (597)..(597): n is a, c, g, or t
  misc_feature (631)..(631): n is a, c, g, or t
gaaaaaatcagaaagagagagagagaaaaaggaaaaggaaaaggaaaagtctctctcttttttttttttcttctcccagattctctctcactttcattggttttctcggcggctccatctcctttctttttttctcagaatcgttcggttccatctttcttgggataaatcttcctcctctctgcagacgccatgtcggacaaaggtcgtcccttgccgaagtttggagaatgggatgtgaatgacccagcatcagctgaaggtttcacggtgatattcaacaaagccagggatgagaaaaagactggtggcaaacccggatcacccggtaaatcctctgatggtcatgctaagtccggaggaggaggaggaggagatcctagtaaacctcatcctaaaaaatggctctgctgcatgcaatctccggctgtggactcttgattggcacaaagatggatttgtttgctgcacaacaaaagtggagtaacattgcttagacatctaaagcaatgttcttttttatgttttattgtctttcttgaagtacccncaacaacaacaacaacaaaagtttntaagatgagtttggagccnccnccccctttagtatcacgattatgattccttcttnttctttgaagttgtttgttcttctatataaaatgctgtaaaatcgtgttgtcacttttattggaaaaccagaaaggaaaagaaaaaaaaaacatagtaaaattgtgtatgtaataattctcatgggtcgtttttgggttttaattttatggtgtct

SEQ ID NO: 36 - protein, 82 aa, Brassica napus
MSDKGRPLPKFGEWDVNDPASAEGFTVIFNKARDEKKTGGKPGSPGKSSDGHAKSGGGGGGDPSKPHPKKWLCCMQSPAVDS

SEQ ID NO: 37 - protein, 80 aa, Brassica napus
KNQKERERKRKRKRKSLSLFFFSSPRFSLTFIGFLGGSISFLFFSESFGSIFLGINLPPLCRRHVGQRSSLAEVWRMGCE

SEQ ID NO: 38 - protein, 79 aa, Brassica napus
KKSEREREKKEKEKEKSLSFFFFFSQILSHFHWFSRRLHLLSFFLRIVRFHLSWDKSSSSLQTPCRTKVVPCRSLENGM

SEQ ID NO: 39 - DNA, 865 bp, Brassica napus
  misc_feature (529)..(529): n is a, c, g, or t
agaaactaatccacgttagcctctgagcttccttataagattctcgattgtcccgtttaataacaatttaactcctcgctttagattcgttttactctcaaacacacagaattttccacctattaagagaccaaaggtaagagattctcatgtcgatgtctatttctggagctatgcttagtggggtgggctcttcgttattgatcaacggaagcaagagaagcggcggcgtaggcggtggatctatgagtgttggccggaagaatgcgaccattacaccgcagagaaacaagtcatgggccctagccgccgtgaaaggtgatggaaaatcaaagaacgaccccaaatggctagatgatgcctcacagaaagctggcgagttcgtgaaggacatggggagtgaagtggggcacgtgactgctcagaaaggacaagaagttaaagatcatatagagagtgcaagaaactatattgttgagaaagctggtgaagcgatggacacggtggctgaaaatgctaagaaagcttntgagtttgtgacggataaaggcaaagagaccaaggaagaaactgttttaatgactgaaaaggctaaagatttcattgttgaaaaagctggtgaagccaaagattcggcgacggatatgcgcaagaaaacggccaagtacgttggagataaagcagcagaggctaaagaagctatatttcctccaaaaaacgaagaatagaatattgtatatatgtgaccttaaatagataaacatataaagaactttgaggcagtaatcacaaaagtattttttactttgtgagaatatagtatgtttattttgtgagaataaactgatacatacaataagtactg

SEQ ID NO: 40 - protein, 192 aa, Brassica napus
  misc_feature (127)..(127): Xaa can be any naturally occurring amino acid
MSMSISGAMLSGVGSSLLINGSKRSGGVGGGSMSVGRKNATITPQRNKSWALAAVKGDGKSKNDPKWLDDASQKAGEFVKDMGSEVGHVTAQKGQEVKDHIESARNYIVEKAGEAMDTVAENAKKAXEFVTDKGKETKEETVLMTEKAKDFIVEKAGEAKDSATDMRKKTAKYVGDKAAEAKEAIFPPKNEE

SEQ ID NO: 41 - protein, 190 aa, Brassica napus
  misc_feature (125)..(125): Xaa can be any naturally occurring amino acid
MSISGAMLSGVGSSLLINGSKRSGGVGGGSMSVGRKNATITPQRNKSWALAAVKGDGKSKNDPKWLDDASQKAGEFVKDMGSEVGHVTAQKGQEVKDHIESARNYIVEKAGEAMDTVAENAKKAXEFVTDKGKETKEETVLMTEKAKDFIVEKAGEAKDSATDMRKKTAKYVGDKAAEAKEAIFPPKNEE

SEQ ID NO: 42 - protein, 184 aa, Brassica napus
  misc_feature (119)..(119): Xaa can be any naturally occurring amino acid
MLSGVGSSLLINGSKRSGGVGGGSMSVGRKNATITPQRNKSWALAAVKGDGKSKNDPKWLDDASQKAGEFVKDMGSEVGHVTAQKGQEVKDHIESARNYIVEKAGEAMDTVAENAKKAXEFVTDKGKETKEETVLMTEKAKDFIVEKAGEAKDSATDMRKKTAKYVGDKAAEAKEAIFPPKNEE

SEQ ID NO: 43 - DNA, 654 bp, Brassica napus
  misc_feature (563)..(563): n is a, c, g, or t
aaaatcggagtcgccaaagaggaaaaaaaggagaggtttgggtagagaggggatcgcgagacgaaaatggaggttccaggttcatcgaagaagatgatcgcaacgcaggaagagatggtcgcagccaaagtacccctcggatacagagatcagtgcgctcatctcctgatcccgctcaacaaatgtcgccaggctgagttcttcctcccgtggaagtgcgaggacgagcgccacgtgtacgagaagtgcgagtacgagctcgtcatggagaggatgctcgcgatgcagaagatccgcgaggaagaagccaaggctaaacaggataagaaacaagggaacggtgttcctctgatccctaagaccgctaatgcttagcccctcctcgattcgatcttccaggtttccgggaatctctggaactgtgaagaaggtggggctctgcttttcagtattttcttcttgttggtgatgaaaaatttgttgctacattctcagatgttcaaagattatatctcttttcgtttttttttcttcctcttgtttaactttgtgaaactgtttcncagaaaagaaaaaaataagatgcaaacactcatctttttgttggttttctatctttaatctttgagagagaaaattgaacatattatatac

SEQ ID NO: 44 - protein, 102 aa, Brassica napus
MEVPGSSKKMIATQEEMVAAKVPLGYRDQCAHLLIPLNKCRQAEFFLPWKCEDERHVYEKCEYELVMERMLAMQKIREEEAKAKQDKKQGNGVPLIPKTANA

SEQ ID NO: 45 - protein, 93 aa, Brassica napus
MIATQEEMVAAKVPLGYRDQCAHLLIPLNKCRQAEFFLPWKCEDERHVYEKCEYELVMERMLAMQKIREEEAKAKQDKKQGNGVPLIPKTANA

SEQ ID NO: 46 - protein, 86 aa, Brassica napus
MVAAKVPLGYRDQCAHLLIPLNKCRQAEFFLPWKCEDERHVYEKCEYELVMERMLAMQKIREEEAKAKQDKKQGNGVPLIPKTANA

SEQ ID NO: 47 - DNA, 649 bp, Brassica napus
ttcgaaaacctcatctcctcaaaacacatacttaactcttatccaataatatcgtcgttatggtggcagaagccatgagaatcaaggcagaggtgtaccacggagacaaggcatgcagagagatattcggctcccttttgtccgagatcggtttaccaaaccggctcctaagtaaccaggagatcgaagaatgcggatacgtgaaggacacgggtttcgtgtggctaaagcacaagaagaagaacaaagacgataaaaagagacatcaagactcgtttagattcgataacgtcatggtgtgtttcgaagatgaagtcactgcttatttccagccgaacacgatcaagaaactcactggggttaaggccaaggagttcgtggtctggatctcgctcggtgagattcacgtaaaccgcccctctggtttgattaccttcaagacacaggtcggtttgttgtctaagtcgttgcctctgtcggtttttgaagacgttcaaggtaaacatgatgttatggagaagcctaaacaacaggatcaacaaaaattcaacgatcccaaaatctatttgtactagtagaaaagaaagtaaatgtatatatgtatatgtatctttaatttttattcatataaatggataatataagctct

SEQ ID NO: 48 - protein, 171 aa, Brassica napus
MVAEAMRIKAEVYHGDKACREIFGSLLSEIGLPNRLLSNQEIEECGYVKDTGFVWLKHKKKNKDDKKRHQDSFRFDNVMVCFEDEVTAYFQPNTIKKLTGVKAKEFVVWISLGEIHVNRPSGLITFKTQVGLLSKSLPLSVFEDVQGKHDVMEKPKQQDQQKFNDPKIYLY

SEQ ID NO: 49 - protein, 166 aa, Brassica napus
MRIKAEVYHGDKACREIFGSLLSEIGLPNRLLSNQEIEECGYVKDTGFVWLKHKKKNKDDKKRHQDSFRFDNVMVCFEDEVTAYFQPNTIKKLTGVKAKEFVVWISLGEIHVNRPSGLITFKTQVGLLSKSLPLSVFEDVQGKHDVMEKPKQQDQQKFNDPKIYLY

SEQ ID NO: 50 - protein, 93 aa, Brassica napus
MVCFEDEVTAYFQPNTIKKLTGVKAKEFVVWISLGEIHVNRPSGLITFKTQVGLLSKSLPLSVFEDVQGKHDVMEKPKQQDQQKFNDPKIYLY

SEQ ID NO: 51 - DNA, 780 bp, Brassica napus
  misc_feature (708)..(708): n is a, c, g, or t
  misc_feature (766)..(766): n is a, c, g, or t
aactcaatccacgattccaattattgaacctctataattttactttaatcacaaaaaaaaaaaaaaaaagaatctggtttttgctttgtagaaatcattttactttctaccaactcgagtcttgaaaatttgaaaaacatgactattgctttaacgatcggaggaaatggattctcgggtctatccggatcttcgttttcatcatcttcttcatcgtttcggttaaagaacagcagaagaaaagacacgaagatgctgaacagaacaggagtcttctgttcttcatcttctgtaatggatccgtacaagacccttaggatccgacccgattcatcagaatacgaggtcaagcaagctttcagacaactcgccaaaaagtatcatcctgatgtttgcagaggaagcaactgtggagtacagtttcagacaatcaacgaagcttacaatattgtgttgaagcaaataaagaatcagatggagggaacagaggagtttcagccattcgatgtgtatgacgagggattcaacggaatgaatgatccagattgcgacacgtgggaggaatggatgggatgggaaggtgcagggaccagagactactcctctcacgtcaatccttacgcttgaagaagatgaacaaatgattcgaatgcacataaataacaactgagactgctataatgaacgatgtaaatacatgaaactgtntcgtgaatgatacttaaattgtaaataaaagtagatttatccttccatcatgtaaatntcaacgttaagctt

SEQ ID NO: 52 - protein, 162 aa, Brassica napus
MTIALTIGGNGFSGLSGSSFSSSSSSFRLKNSRRKDTKMLNRTGVFCSSSSVMDPYKTLRIRPDSSEYEVKQAFRQLAKKYHPDVCRGSNCGVQFQTINEAYNIVLKQIKNQMEGTEEFQPFDVYDEGFNGMNDPDCDTWEEWMGWEGAGTRDYSSHVNPYA

SEQ ID NO: 53 - protein, 124 aa, Brassica napus
MLNRTGVFCSSSSVMDPYKTLRIRPDSSEYEVKQAFRQLAKKYHPDVCRGSNCGVQFQTINEAYNIVLKQIKNQMEGTEEFQPFDVYDEGFNGMNDPDCDTWEEWMGWEGAGTRDYSSHVNPYA

SEQ ID NO: 54 - protein, 110 aa, Brassica napus
MDPYKTLRIRPDSSEYEVKQAFRQLAKKYHPDVCRGSNCGVQFQTINEAYNIVLKQIKNQMEGTEEFQPFDVYDEGFNGMNDPDCDTWEEWMGWEGAGTRDYSSHVNPYA

SEQ ID NO: 55 - DNA, 708 bp, Brassica napus
aaaaagcttcggcataatcaccattaaaccgagtctctctctctctctctctctctctctctctctctctctgaactttcacggtacgttttggaaatggcgacagtaccaggacaattgatatgggagatcgttaagaccaacaactgtttcttggtcaaacagttcggaagaggcaacgccaaggttcagttcagcaaagagaagaacaatctctgcaaccttaactcctacaagcactctggtcttgcaaacaagaagacagtgaccatccagccagctgacaaggaacaaggtgttgttttggccaccaccaagaccaagaagcagaacaagcctaaggtctctgtcaacaagtctatccttaagaaggaattccccaggatgtccaaggctgtcgctaaccaggtggttgacaactactacaggccagacttgaagaaattcgctcttgctagactcagtgtcatcagcaaaagcattagggttgccaagtccggtgccaagcaaagaaaccgtcaagcttaagcctttttgaagtactgaagaggtttattaagttgttttttgttcaagtcgaaccttaacactatgctatgcttatccttttcaaaagaagttagaacttttttttatttattatgcttttggtttctggtgtgcttgtgttggatcttttttttatcaaatcaaggatttgatcatgtg

SEQ ID NO: 56 - protein, 143 aa, Brassica napus
MATVPGQLIWEIVKTNNCFLVKQFGRGNAKVQFSKEKNNLCNLNSYKHSGLANKKTVTIQPADKEQGVVLATTKTKKQNKPKVSVNKSILKKEFPRMSKAVANQVVDNYYRPDLKKFALARLSVISKSIRVAKSGAKQRNRQA

SEQ ID NO: 57 - DNA, 417 bp, Brassica napus
atcattaggaacttaaattataaattagagagggactcaaagagtcgcaatctttactttaccttcagaaactgagtcgtcctcttgtctccggtgagatgagagacgcaaaacttataaactgggcggagcttccaccggagctgatctattcgattctgctccgtcttagcgtgcctgatagactaggaaacgctcggaacgtgtgcagatcgtggcgacgcgtctgtcaagaccccctgatgtggcggaaaatcgagatgcgagacatgggagaatacaaagaagccatggattattatcatgccgcggaggccatgtgccgtcgcgccgttgatctaagccagggaggcttgtttgaggtcaacattgagtacttcggcaccgattctctcctcgcctacatagccgacaggt

SEQ ID NO: 58 - protein, 106 aa, Brassica napus
MRDAKLINWAELPPELIYSILLRLSVPDRLGNARNVCRSWRRVCQDPLMWRKIEMRDMGEYKEAMDYYHAAEAMCRRAVDLSQGGLFEVNIEYFGTDSLLAYIADR

SEQ ID NO: 59 - protein, 58 aa, Brassica napus
MWRKIEMRDMGEYKEAMDYYHAAEAMCRRAVDLSQGGLFEVNIEYFGTDSLLAYIADR

SEQ ID NO: 60 - DNA, 964 bp, Brassica napus
ctctggatcaaattagggcacagagaccacttggagacagaaaccatgggaagaaaaaaactagaaatcaagcgaattgagaacaaaagtagccgacaagtcaccttctccaaacgacgcagcggtctcattgagaaagctcgtcagctttctgttctctgcgatgcatccgtcgcgcttctcgttgtctcctcctccggcaagctctacagcttctccgccggtgataacctggtcaggatccttgatcgatatggaaaacagcatgctgatgatcttaaagccctgaatcttcagtcaaaagctctgagctatggttcacacaatgagttacttgaacttgtggatagcaagcttgtggaatcaaatgtcggtggtgtaagcgtggacaccctcgttcagctggagggtgtccttgaaaatgccctctctctaactagagctaggaagacagaactaatgttgaagcttgttgatagcctcaaagaaaaggagaagctgctgaaagaagagaatcaggctttggctggccagaaggagaagaagaatcttgcgggagccgaagctgataatatggagatgtcacctggacaaatctccgacatcaatcttccggtaactctcccactgcttaattagccaccgttagacggggctgatcaaattaaaaaatccaaaacatacaactaaataaataagctttgttgtttttcacccttgaagggtgcacgttgtatatctcaatactcccttggctgagagattgtgtgtttactcctatgttagatataatgagtaaaataaaaataaaaagatctttgtaccttcgtcgagagagaattgtagtgagtgtgcttgtgtgttctttttctcttctttgcttcatggcgaagaagcctaccgtctaatttgtaacggagacgtggccctctctgcccttttgtattcgtaattcctttgtatt

SEQ ID NO: 61 - protein, 212 aa, Brassica napus
LWIKLGHRDHLETETMGRKKLEIKRIENKSSRQVTFSKRRSGLIEKARQLSVLCDASVALLVVSSSGKLYSFSAGDNLVRILDRYGKQHADDLKALNLQSKALSYGSHNELLELVDSKLVESNVGGVSVDTLVQLEGVLENALSLTRARKTELMLKLVDSLKEKEKLLKEENQALAGQKEKKNLAGAEADNMEMSPGQISDINLPVTLPLLN

SEQ ID NO: 62 - protein, 197 aa, Brassica napus
MGRKKLEIKRIENKSSRQVTFSKRRSGLIEKARQLSVLCDASVALLVVSSSGKLYSFSAGDNLVRILDRYGKQHADDLKALNLQSKALSYGSHNELLELVDSKLVESNVGGVSVDTLVQLEGVLENALSLTRARKTELMLKLVDSLKEKEKLLKEENQALAGQKEKKNLAGAEADNMEMSPGQISDINLPVTLPLLN

SEQ ID NO: 63 - DNA, 432 bp, Brassica napus
  misc_feature (284)..(284): n is a, c, g, or t
atcacttttgctttttttaatattttttttttttctcgtaaaacgtgtgaacctccctcttgaacctctaatgctcttgctctaacaactttggttatttctatcgtattcccgtaaatgaatacccacccgtttacccagtgggtccgattctctgcttcaacgaccgtccgattttgaacccatcggagcgagatcgggtcatgacgtggctcgacgagcaacccgagtcatcggtagtgttcctctgcttcggaagcttgaagaatctcgatgcggctcanattcaggagatagctcgagctctagagatcgttggatgcagatttctctggtcgattcggacagatccaaaggagtacccgaacccgatcgaaattttaccggacggtttcatgaaccgagtctcgaatctgggctttgtgtgcggtt

SEQ ID NO: 64 - protein, 76 aa, Brassica napus
  misc_feature (27)..(27): Xaa can be any naturally occurring amino acid
MTWLDEQPESSVVFLCFGSLKNLDAAXIQEIARALEIVGCRFLWSIRTDPKEYPNPIEILPDGFMNRVSNLGFVCG

SEQ ID NO: 65 - DNA, 945 bp, Brassica napus
gggtctacatcttattctctgtactactaaagacaataccaatctcgcctttgaatcagtgaagaaaaagaagaaaccatttactaaacatggcgaattcgggagaagagaagctgaagctatactcttactggagaagctcctgcgctcatcgtgtccgtatcgccctctctcttaaaggtcttgaatatgagtatatacctgtgaatctgctcaagggtgaacagtccgatccagatttcaagaagatcagtccaatgggtactgtaccagcccttgttgatggaggtgttgtcatatccgattctcttgccatcataatgtatctggacgagaagtaccctgagccacctctcttacctcgcgacctccacaaacgggctgtcaatttccaggcagcgagtattgtcttgtctgggatacagcctcatcaaaacctgggtgttattaaattcattgaagaaaagataaattcggaggagaaaactgcttgggttactaatgctatcacaaaaggattcacagctctcgagaaactgttggtgagctgcgctggaaaacacgcaactggtgatgaagtttacttggctgatctctttctagcaccacagatctacggagctatcaacagattccagattaacttggaaccgtacccgacccttgcaacgtgttacgagtcatacaaggatcttcctgcgtttcaaaacgcagcaccagagaagcagccagatgctcctgcttccaccagctgatcctgtgaactggtagtaagctatcctcagcttaataaaacttcacagggcaacatcagcaacaatgataaagaataactttgtactcatatatatattgatgtatcatatgaaccagtttacttccaagttactctacttgtatttataaaataaagatcacagactttggaactcgcaaacatagttt

SEQ ID NO: 66 - protein, 221 aa, Brassica napus
MANSGEEKLKLYSYWRSSCAHRVRIALSLKGLEYEYIPVNLLKGEQSDPDFKKISPMGTVPALVDGGVVISDSLAIIMYLDEKYPEPPLLPRDLHKRAVNFQAASIVLSGIQPHQNLGVIKFIEEKINSEEKTAWVTNAITKGFTALEKLLVSCAGKHATGDEVYLADLFLAPQIYGAINRFQINLEPYPTLATCYESYKDLPAFQNAAPEKQPDAPASTS

SEQ ID NO: 67 - protein, 165 aa, Brassica napus
MGTVPALVDGGVVISDSLAIIMYLDEKYPEPPLLPRDLHKRAVNFQAASIVLSGIQPHQNLGVIKFIEEKINSEEKTAWVTNAITKGFTALEKLLVSCAGKHATGDEVYLADLFLAPQIYGAINRFQINLEPYPTLATCYESYKDLPAFQNAAPEKQPDAPASTS

SEQ ID NO: 68 - protein, 144 aa, Brassica napus
MYLDEKYPEPPLLPRDLHKRAVNFQAASIVLSGIQPHQNLGVIKFIEEKINSEEKTAWVTNAITKGFTALEKLLVSCAGKHATGDEVYLADLFLAPQIYGAINRFQINLEPYPTLATCYESYKDLPAFQNAAPEKQPDAPASTS

SEQ ID NO: 69 - DNA, 682 bp, Brassica napus
  misc_feature (657)..(657): n is a, c, g, or t
aaaaaaaaacatttcgagcatgtctgggcgaggaaagggaggaaagggactgggaaagggaggagccaagaggcacaggaaggtcctccgagacaacatccaggggatcactaagccggcgattcgtcgtttagcgaggagaggcggtgtgaagcgtatcagcggtttgatctacgaggagactcgcggcgttctcaagatctttctagagaatgtgattcgtgacgctgttacttacactgagcacgctaggaggaagaccgtgacggcgatggatgttgtgtatgctttgaagaggcagggaaggactctgtacgggttcggcggctgaggggattcaattaggggtttttaaatcgcgtttgtgtttttacggtttggttctatttgggagtttaacaactctctaagttgtctttatctgaatgttttaaaaaagctttatctgaacttgtccgtctcttagaaattattgaggcatttagaaggtgggaaggagtatgagcttctgataatcgaatatcgacaagtaatagttgttgtgagctgggacgggtagagatttcgatactggtcatttaacgatgttgtgaaaaggataatgtccgagactaagatgaacctttacatactatgctatctctcaattattaatcnctggaaacgaatcaattgttgaagc

SEQ ID NO: 70 - protein, 109 aa, Brassica napus
KKNISSMSGRGKGGKGLGKGGAKRHRKVLRDNIQGITKPAIRRLARRGGVKRISGLIYEETRGVLKIFLENVIRDAVTYTEHARRKTVTAMDVVYALKRQGRTLYGFGG

SEQ ID NO: 71 - protein, 103 aa, Brassica napus
MSGRGKGGKGLGKGGAKRHRKVLRDNIQGITKPAIRRLARRGGVKRISGLIYEETRGVLKIFLENVIRDAVTYTEHARRKTVTAMDVVYALKRQGRTLYGFGG

SEQ ID NO: 72 - DNA, 763 bp, Brassica napus
aattgattccttcgtcaagcctcaatcactttcctcactcctctctctctcaaatcaacagcacgaagagatgaagcacctgatccgccgcctctcccgcgtcgccgactccgcgaactacagcctcctccgctccgattcgcagcgacctagccgccgtccaccgccgcctcgtcgctcgaagaagcacacatcctccgttcccgagggacacgtgcctgtctacgtgggagacgagatggagcggttcgtcgtgagcgcggagctgcttaaccacccggttttcatcggtttgttgaaccgatcggctcaagagtacggttacgaacagaaaggagttctgcagatcccctgccacgtgttggtattcgagcgaatcatggagtcgctccggctcggattagcggtgccgagcgacctacaagatctgatcggcgacgagacgatttgacacgcgagggaatctttggtagttagagagagatattgatctggttcttcttttttttggctcagatgcagtacgacgtcgtgttgatggtgtacatagctatatgtatatttttttttttcgggatgatgatgatgaaaagttcaaatgggaaggggaaagattagcgatatttttagggcttttctttttgaatttttttttctttttataaaatttgtttgttgcaaatttcctgtttttcgccggtttaagaaccggtttgagactcttgtgaaggtttatatggaaattgcttcggtttggttatgc

SEQ ID NO: 73 - protein, 149 aa, Brassica napus
IDSFVKPQSLSSLLSLSNQQHEEMKHLIRRLSRVADSANYSLLRSDSQRPSRRPPPPRRSKKHTSSVPEGHVPVYVGDEMERFVVSAELLNHPVFIGLLNRSAQEYGYEQKGVLQIPCHVLVFERIMESLRLGLAVPSDLQDLIGDETI

SEQ ID NO: 74 - protein, 126 aa, Brassica napus
MKHLIRRLSRVADSANYSLLRSDSQRPSRRPPPPRRSKKHTSSVPEGHVPVYVGDEMERFVVSAELLNHPVFIGLLNRSAQEYGYEQKGVLQIPCHVLVFERIMESLRLGLAVPSDLQDLIGDETI

SEQ ID NO: 75 - DNA, 692 bp, Brassica napus
  misc_feature (526)..(526): n is a, c, g, or t
actactctctctacttagcaaaaacacacaacaaagtttttttttttttttttttgctaaataacacacaacaaagttggtttacataaagagtaacaagagatggcaattaagtgtttagccgtgttcctcgttgctctcacgggggctcattccgtcaccgccacaagaccggcaccggccaagaatgtcggagctggtcttgaagaccaaaagaactttgttgcgtttgctggcgtcggtggagctgctggagttggtggtgttgggacaggtcttggtggtgtagccggtggagttggtggtgtcgccggagttctacctgtaggtggagtaggcggcggaattggtggtcttggaggtggtgtaggtggtctagggggtggttcgggtctcggtggtggaataggtggtggttcaggtcttggcggcgtaggtggactcggcggtgtaggtggactcggtggtgtaggcggagtcggtggtttgggaggaattgacggtggaagcgattgcggtggcgttntacctcacccttgatattaaaaacgtttttctatataaaccaaagatcgatccaagggtttataatgtttgtatcagttttctaatgttgtaagtttttattttcccgatgttatgtttaagtctttgcttgtttttttcatgctgttttttattaattacttgag

SEQ ID NO: 76 - protein, 145 aa, Brassica napus
  misc_feature (142)..(142): Xaa can be any naturally occurring amino acid
MAIKCLAVFLVALTGAHSVTATRPAPAKNVGAGLEDQKNFVAFAGVGGAAGVGGVGTGLGGVAGGVGGVAGVLPVGGVGGGIGGLGGGVGGLGGGSGLGGGIGGGSGLGGVGGLGGVGGLGGVGGVGGLGGIDGGSDCGGVXPHP

SEQ ID NO: 77 - DNA, 1470 bp, Brassica napus
  misc_feature (1444)..(1444): n is a, c, g, or t
  misc_feature (1449)..(1449): n is a, c, g, or t
ccacctaagcctcaaccaaagccaccaccaaagccgcaaccaaagccaccaccggcacctaccccgtctccatgcccaccgcaaccaccaaagccgcaaccaaagccaccaccggcacctaccccgtctccatgcccaccgcaaccaccaaaaccgcaaccaaagccaccaccagcacctggtccatcaccaaagccaggtccatcaccatcaccacctaagccaccacctagtccagctccgaaacctgttccaccaccttctccatcgccaaaacctagcccacccaagccacctgcaccatcgccaaaacctagcccacccaagccacctgccccatcaccacctaagccacagaacaaaaccataccggctgtgtttttctttggtgattcaatctttgacacaggaaataacaataacctagacacaaagctaaaatgtaattatcgtccctatggtatggattttcctatgggagtcgccaccggtagattcagcaacggaagggtcgcttccgattatatatccaaatatttgggagtaaaagaaattgtaccggcatatgtagacaagaaactacaacaaaacaacgaactacaacaaagcgatctacttacgggcgtatcttttgcttcgggtggtgctggctaccttcctcaaacatctgaatcatggaaagtaacaacaatgttggaccagttgacatatttccaagactacaagaaaagaatgaagaagctagtaggaaaaaagaagactaaaaagattgtgagcaaaggagcagccattgtggtcgccggaagcaatgatctgatttatacatattttggaaatggtgctcaacacctcaaaaatgacgtcgactcttttaccactatgatggctgattctgctgccagtttcgtcttgcaactgtatggatatggagcaagacgtataggagtgatcggaacaccaccgattggatgtacaccttcacagagagttaaaaagaaaaaaatatgtaatgaagatctaaattatgctgctcagcttttcaattctaagctcgtaattattttgggtcaactgtccaaaaccctaccaaattctacaattgtttacggggacatctactctatcttcagtaagatgctagaaagcccggaagactatgggtttgaggagataaaaaaaccgtgttgcaaaataggattgacgaaaggaggtgtattctgcaaagagaggacactcaaaaatatgtccaatgcatcgtcttatctgttttgggacggtctccatcccagtcagagagcttatgaaatatcaaacagaaaacttgtaaagaaatacatccattttatctgattaataagtacctttattatattattattaatcgtttttatcttacgaaaaggaaaacttttgcaatattaataacgtaggcatggtcagtttnttctncaaataatgcaaacaaccttt

SEQ ID NO: 78 - protein, 449 aa, Brassica napus
PPKPQPKPPPKPQPKPPPAPTPSPCPPQPPKPQPKPPPAPTPSPCPPQPPKPQPKPPPAPGPSPKPGPSPSPPKPPPSPAPKPVPPPSPSPKPSPPKPPAPSPKPSPPKPPAPSPPKPQNKTIPAVFFFGDSIFDTGNNNNLDTKLKCNYRPYGMDFPMGVATGRFSNGRVASDYISKYLGVKEIVPAYVDKKLQQNNELQQSDLLTGVSFASGGAGYLPQTSESWKVTTMLDQLTYFQDYKKRMKKLVGKKKTKKIVSKGAAIVVAGSNDLIYTYFGNGAQHLKNDVDSFTTMMADSAASFVLQLYGYGARRIGVIGTPPIGCTPSQRVKKKKICNEDLNYAAQLFNSKLVIILGQLSKTLPNSTIVYGDIYSIFSKMLESPEDYGFEEIKKPCCKIGLTKGGVFCKERTLKNMSNASSYLFWDGLHPSQRAYEISNRKLVKKYIHFI

SEQ ID NO: 79 - protein, 295 aa, Brassica napus
MDFPMGVATGRFSNGRVASDYISKYLGVKEIVPAYVDKKLQQNNELQQSDLLTGVSFASGGAGYLPQTSESWKVTTMLDQLTYFQDYKKRMKKLVGKKKTKKIVSKGAAIVVAGSNDLIYTYFGNGAQHLKNDVDSFTTMMADSAASFVLQLYGYGARRIGVIGTPPIGCTPSQRVKKKKICNEDLNYAAQLFNSKLVIILGQLSKTLPNSTIVYGDIYSIFSKMLESPEDYGFEEIKKPCCKIGLTKGGVFCKERTLKNMSNASSYLFWDGLHPSQRAYEISNRKLVKKYIHFI

SEQ ID NO: 80 - protein, 291 aa, Brassica napus
MGVATGRFSNGRVASDYISKYLGVKEIVPAYVDKKLQQNNELQQSDLLTGVSFASGGAGYLPQTSESWKVTTMLDQLTYFQDYKKRMKKLVGKKKTKKIVSKGAAIVVAGSNDLIYTYFGNGAQHLKNDVDSFTTMMADSAASFVLQLYGYGARRIGVIGTPPIGCTPSQRVKKKKICNEDLNYAAQLFNSKLVIILGQLSKTLPNSTIVYGDIYSIFSKMLESPEDYGFEEIKKPCCKIGLTKGGVFCKERTLKNMSNASSYLFWDGLHPSQRAYEISNRKLVKKYIHFI

SEQ ID NO: 81 - DNA, 777 bp, Brassica napus
aaagctcgacatatataaataacgtcacacaccttcttgttcaatacaaaccatccattataaaaaaaaaaaaacacaacatgactaagctcattttattcctcgccgtgcaaatcttcctcctcatcgccgtttcttccgccggagatgacggtgaacactttgcaagaaccatagaccgtaaacttctcggtctccacaagaaagagaaactaacacatttcaaagtgtattggcacgacatcttaagcggtccaaacccaagctccatcagaatccagccaccggttgcaaactccactacctactttggaggaatcactatgatcgacaacgccttgacgtccaaagttgagatgaactcaacgttaataggccaggcacaagggttttacgccggtgcggctcaaaaggagttgggttttttcatggcgatgaactttgctttcaagacagggaagtataatggaagtaccatcacgattcttggtcggaacagggcgatgtccgaggtgagagagatgccgatcatcggaggaagtgggcttttccggtttgctagaggctacgttgaggctcgaacaaaatggcttaattttcagaatggtgatgctactgttgagtacagttgttatgttttgcattattgatgctaatcatgtctttgtcctattttatcgtatttaatttgatgacgtaatagttatggttttcttgttgcatttggcttatggtttgtgatagatttgttggattagttttgtgtcttactagagc

SEQ ID NO: 82 - protein, 215 aa, Brassica napus
SSTYINNVTHLLVQYKPSIIKKKKHNMTKLILFLAVQIFLLIAVSSAGDDGEHFARTIDRKLLGLHKKEKLTHFKVYWHDILSGPNPSSIRIQPPVANSTTYFGGITMIDNALTSKVEMNSTLIGQAQGFYAGAAQKELGFFMAMNFAFKTGKYNGSTITILGRNRAMSEVREMPIIGGSGLFRFARGYVEARTKWLNFQNGDATVEYSCYVLHY

SEQ ID NO: 83 - protein, 189 aa, Brassica napus
MTKLILFLAVQIFLLIAVSSAGDDGEHFARTIDRKLLGLHKKEKLTHFKVYWHDILSGPNPSSIRIQPPVANSTTYFGGITMIDNALTSKVEMNSTLIGQAQGFYAGAAQKELGFFMAMNFAFKTGKYNGSTITILGRNRAMSEVREMPIIGGSGLFRFARGYVEARTKWLNFQNGDATVEYSCYVLHY

SEQ ID NO: 84 - protein, 108 aa, Brassica napus
MIDNALTSKVEMNSTLIGQAQGFYAGAAQKELGFFMAMNFAFKTGKYNGSTITILGRNRAMSEVREMPIIGGSGLFRFARGYVEARTKWLNFQNGDATVEYSCYVLHY

SEQ ID NO: 85 - DNA, 814 bp, Brassica napus
  misc_feature (802)..(802): n is a, c, g, or t
  misc_feature (808)..(808): n is a, c, g, or t
gaagcttttttttatctctctctccgccgtcactctcacctgcggcgaggcttaacgatctcagccatggccgccgccgtagaaatcgacgcagagatccagcagcagcttaccaacgaggtcaagctcttcaaccgctggacctacgatgacgtctcggttgcagatatcagtcttgttgactacattggagttcaagcagccaaacacgccacctttgtcccccacactgcaggaagatactctgtgaagagattcaggaaggctcagtgcccaattgttgagaggctcacaaactctctcatgatgcacggaagaaacaatggaaagaagttgatggcggtgaggatcatcaagcacgccatggagatcatccacctcttgactgacgccaacccgattcagatcatcatcgatgccattgtcaacagtggtccacgtgaagatgccaccagaattggatctgctggtgtcgttaggagacaagctgttgatatctctcctttgagacgtgttaaccaggcgatcttcttgctcacaaccggtgctcgtgaggctgctttcagaaacattaagactattgctgagtgccttgctgatgagttaatcaacgcagccaagggctcgtccaacagctatgccatcaaaaagaaggatgagattgagagagttgccaaggctaatcgttaagggaaagtcttcttttaccctgatggttgttacaatcttatcaatgaaatttatgttttgtttcgactaagattgggaatatgtaacagatgttttgctcttttcgtcttangaaagnttattt

SEQ ID NO: 86 - protein, 229 aa, Brassica napus
EAFFYLSLRRHSHLRRGLTISAMAAAVEIDAEIQQQLTNEVKLFNRWTYDDVSVADISLVDYIGVQAAKHATFVPHTAGRYSVKRFRKAQCPIVERLTNSLMMHGRNNGKKLMAVRIIKHAMEIIHLLTDANPIQIIIDAIVNSGPREDATRIGSAGVVRRQAVDISPLRRVNQAIFLLTTGAREAAFRNIKTIAECLADELINAAKGSSNSYAIKKKDEIERVAKANR

SEQ ID NO: 87 - protein, 207 aa, Brassica napus
MAAAVEIDAEIQQQLTNEVKLFNRWTYDDVSVADISLVDYIGVQAAKHATFVPHTAGRYSVKRFRKAQCPIVERLTNSLMMHGRNNGKKLMAVRIIKHAMEIIHLLTDANPIQIIIDAIVNSGPREDATRIGSAGVVRRQAVDISPLRRVNQAIFLLTTGAREAAFRNIKTIAECLADELINAAKGSSNSYAIKKKDEIERVAKANR

SEQ ID NO: 88 - protein, 128 aa, Brassica napus
MMHGRNNGKKLMAVRIIKHAMEIIHLLTDANPIQIIIDAIVNSGPREDATRIGSAGVVRRQAVDISPLRRVNQAIFLLTTGAREAAFRNIKTIAECLADELINAAKGSSNSYAIKKKDEIERVAKANR

SEQ ID NO: 89 - DNA, 944 bp, Brassica napus
aaatctcctctctttgtttctttttgatcagaaaaaaaaaaacagagagaacaaaacacacacacaaaaaaaaaacagaggacattttatggcgatggctgtctccggagctgtgctcagtggtcttggtccttcgttcctctccggaggcaagattagtgcctccgcattaggaagcggcgtaggcgctggagcagcgagagttggccggaaaactctgattgtcgccgctgccgccgcttctcagcccaagaaatcatggatccccgccgttaaaggcggcggcaacttcctcgaccctgaatggctcgatggctcgctacccggagatttcgggttcgacccattgggtctcggaaaagacccggcttttctgaaatggtacagagaagcagagctgatccacggccggtgggcgatggcggcggttctcgggatcttcgtcgggcaggcatggagcggcgtgccgtggttcgaagccggggctgatccacgagccatcgcgccgttctcgttcgggtcccttctcgggacgcagctgcttctcatgggttgggtggagagcaaacggtgggtcgacttcttcaacccggattctcagtcagttgagtgggccacgccgtggtcgagaaccgcagagaatttcgcgaactatactggtgaccaagggtatccgggtgggagattctttgatccgttgggtttggctgggaagacacgtggcggtgtttacgaggcggatagggagaagctggagaggttgaaagtggcggagattaagcactctaggttggcgatgcttgctatgttggtcttttatttcgaggctggtcaggggaaaacgcctctaggtgctcttggtttgtgacttgtgacttgtgagcatgtatgtttgagtctgtagttaaacttgattctcaccaagtcatgagttttagctgttc

SEQ ID NO: 90 - protein, 288 aa, Brassica napus
NLLSLFLFDQKKKNRENKTHTQKKNRGHFMAMAVSGAVLSGLGPSFLSGGKISASALGSGVGAGAARVGRKTLIVAAAAASQPKKSWIPAVKGGGNFLDPEWLDGSLPGDFGFDPLGLGKDPAFLKWYREAELIHGRWAMAAVLGIFVGQAWSGVPWFEAGADPRAIAPFSFGSLLGTQLLLMGWVESKRWVDFFNPDSQSVEWATPWSRTAENFANYTGDQGYPGGRFFDPLGLAGKTRGGVYEADREKLERLKVAEIKHSRLAMLAMLVFYFEAGQGKTPLGALGL

SEQ ID NO: 91 - protein, 259 aa, Brassica napus
MAMAVSGAVLSGLGPSFLSGGKISASALGSGVGAGAARVGRKTLIVAAAAASQPKKSWIPAVKGGGNFLDPEWLDGSLPGDFGFDPLGLGKDPAFLKWYREAELIHGRWAMAAVLGIFVGQAWSGVPWFEAGADPRAIAPFSFGSLLGTQLLLMGWVESKRWVDFFNPDSQSVEWATPWSRTAENFANYTGDQGYPGGRFFDPLGLAGKTRGGVYEADREKLERLKVAEIKHSRLAMLAMLVFYFEAGQGKTPLGALGL

SEQ ID NO: 92 - protein, 257 aa, Brassica napus
MAVSGAVLSGLGPSFLSGGKISASALGSGVGAGAARVGRKTLIVAAAAASQPKKSWIPAVKGGGNFLDPEWLDGSLPGDFGFDPLGLGKDPAFLKWYREAELIHGRWAMAAVLGIFVGQAWSGVPWFEAGADPRAIAPFSFGSLLGTQLLLMGWVESKRWVDFFNPDSQSVEWATPWSRTAENFANYTGDQGYPGGRFFDPLGLAGKTRGGVYEADREKLERLKVAEIKHSRLAMLAMLVFYFEAGQGKTPLGALGL

SEQ ID NO: 93 - DNA, 501 bp, Brassica napus
accttagcctcctcctcatctttcaccacctctacttcgccgttcgctcctccgtctccgtctccgtcgaagtcaacatggcgccgaagaaggataaggttccgccgccgtcatctaagccagcgaaatccggaggaggaaagcagaagaagaagaagtggagcaagggaaagcaaaaggagaaggtgaacaacatggtcttgtttgatcaggctacttacgacaagcttctcactgaagctcccaagttcaagctcatcactccttccattctctccgaccgtatgaggattaacgggtctttagcaaggagggctattagggagctgatggcgaaaggtgtgatcaggatggtcgctgctcactctagtcagcagatctacactcgtgccaccaacacctaatatgttttgctcttaatttgttttttcttacctcctttgtttggttcttcaagaactttgttagaatcttgttttcgagatattttaatgcattgag

SEQ ID NO: 94 - protein, 133 aa, Brassica napus
LSLLLIFHHLYFAVRSSVSVSVEVNMAPKKDKVPPPSSKPAKSGGGKQKKKKWSKGKQKEKVNNMVLFDQATYDKLLTEAPKFKLITPSILSDRMRINGSLARRAIRELMAKGVIRMVAAHSSQQIYTRATNT

SEQ ID NO: 95 - protein, 108 aa, Brassica napus [sequence omitted]

SEQ ID NO: 96 - protein, 69 aa, Brassica napus
MVLFDQATYDKLLTEAPKFKLITPSILSDRMRINGSLARRAIRELMAKGVIRMVAAHSSQQIYTRATNT

SEQ ID NO: 97 - DNA, 799 bp, Brassica napus
aaagtgcgaaaagaagagaggaaaaaaaaaaaacacgccgataagatctccgtctccgtcgtgactcagcctccggttcgatctgagagagataaacgatggatccgatggatatagttggaaagtctaaggaagatgcttcgcttcctaaagctacaatgactaaaataataaaggagatgttaccagcagatgttcgtgttgctagagatgctcaagatcttctcatcgagtgctgtgttgagttcattaatcttatatcatcagagtctaatgaagtgtgtaacaaagaggataagcgaacgatcgcacctgagcatgttctcaaagcgcttcaggttcttggctttggggaatacgtggaagaagtctacgctgcttatgaacagcatcgatacgaaaccatgcaagattcacagaggagtgtgaagatgaacagcggagcagagatgacggaggaggaagcagcagcggaacaacagaggatgtttgctgaagctcgagctagaatgaatggtggtggtggtggcgtttctgttcctcagccagatcctgagcaacaagtagatacccaacagcagtcaaatctacaaagctaatcaagaagaagggagaagcctttatttaacattgtctttttttctagcatttctctgtaaagtgcaaaaaaaagaagtctgtcttggtgttgatatgctctttacattttaacttagatttgtttttcttcttcttcttttgaacctaaaatcactttgtgattcagatgtaattagtaagcattgctttgtttctttgc

SEQ ID NO: 98 - protein, 166 aa, Brassica napus
MDPMDIVGKSKEDASLPKATMTKIIKEMLPADVRVARDAQDLLIECCVEFINLISSESNEVCNKEDKRTIAPEHVLKALQVLGFGEYVEEVYAAYEQHRYETMQDSQRSVKMNSGAEMTEEEAAAEQQRMFAEARARMNGGGGGVSVPQPDPEQQVDTQQQSNLQS

SEQ ID NO: 99 - protein, 163 aa, Brassica napus
MDIVGKSKEDASLPKATMTKIIKEMLPADVRVARDAQDLLIECCVEFINLISSESNEVCNKEDKRTIAPEHVLKALQVLGFGEYVEEVYAAYEQHRYETMQDSQRSVKMNSGAEMTEEEAAAEQQRMFAEARARMNGGGGGVSVPQPDPEQQVDTQQQSNLQS

SEQ ID NO: 100 - protein, 146 aa, Brassica napus
MTKIIKEMLPADVRVARDAQDLLIECCVEFINLISSESNEVCNKEDKRTIAPEHVLKALQVLGFGEYVEEVYAAYEQHRYETMQDSQRSVKMNSGAEMTEEEAAAEQQRMFAEARARMNGGGGGVSVPQPDPEQQVDTQQQSNLQS

SEQ ID NO: 101 - DNA, 1097 bp, Brassica napus
  misc_feature (567)..(567): n is a, c, g, or t
  misc_feature (635)..(635): n is a, c, g, or t
  misc_feature (718)..(718): n is a, c, g, or t
  misc_feature (835)..(835): n is a, c, g, or t
acaaaaacctgaaccatctgtggccatggcagcctctctccaatccgccaccacattcctccagtcggcgaagatttccaccgctccttctcgtggcagtgctcacctccggtcgactcagaccgtcggcaaatcattcgggctagaaacttcctctgctcgcctcacttgttccttccagtctgacttcaaggacttcgccggcaaatgctccgacgctgtcaagatcgccggatttgcgctagcaacctctgctctcgtcgtctcgggagcaagtgcagaaggagctccgaagagattgacttacgatgagatacagagcaagacatacatggaagtgaagggaactggaaccgccaaccagtgcccaaccattgacggtggctctgagactttctccttcaaaccgggaaagtacgccggcaagaagttctgcttcgagcctacttccttcaccgtcaaggctgagagtgttagcaagaacgcacctcctgacttccagaacaccaagctcatgacccgtctcacctacactcttgacgagatcgaaggccccttcgaggtttnttctgacggaagcgtgaagttcaaggaagaagacggaatcgattacgctgcagtcaccgtccagcttncaggaggcgagcgtgtgtcgttcctcttcacggtcaagcagcttgacgcctcaggcaaaccagacaacttcactggcaaattnttagtcccttcgtaccgtggctcctccttcttggacccaaagggccgtggtggatccacaggatatgacaacgccgttgcattgccagctggaggcagaggagacgaagaggagctntcaaaggagaacgtgaagaacacggcagcttcggtgggtgagatcactctgaaagtgacaaagagcaaaccggagacaggagaagtgattggagtgttcgagagtctccagccgtctgatactgacttgggtgccaaggtaccaaaggatgtgaagatccaaggggtgtggtatggtcaacttgagtgatgatcatgttatctatatcaaaacatcttctgttaattgtattcgatgataatgagaacatcttttgatgctc

SEQ ID NO: 102 - protein, 340 aa, Brassica napus
  misc_feature (189)..(189): Xaa can be any naturally occurring amino acid
  misc_feature (212)..(212): Xaa can be any naturally occurring amino acid
  misc_feature (239)..(239): Xaa can be any naturally occurring amino acid
  misc_feature (278)..(278): Xaa can be any naturally occurring amino acid
QKPEPSVAMAASLQSATTFLQSAKISTAPSRGSAHLRSTQTVGKSFGLETSSARLTCSFQSDFKDFAGKCSDAVKIAGFALATSALVVSGASAEGAPKRLTYDEIQSKTYMEVKGTGTANQCPTIDGGSETFSFKPGKYAGKKFCFEPTSFTVKAESVSKNAPPDFQNTKLMTRLTYTLDEIEGPFEVXSDGSVKFKEEDGIDYAAVTVQLXGGERVSFLFTVKQLDASGKPDNFTGKXLVPSYRGSSFLDPKGRGGSTGYDNAVALPAGGRGDEEEXSKENVKNTAASVGEITLKVTKSKPETGEVIGVFESLQPSDTDLGAKVPKDVKIQGVWYGQLE

SEQ ID NO: 103 - protein, 332 aa, Brassica napus
  misc_feature (181)..(181): Xaa can be any naturally occurring amino acid
  misc_feature (204)..(204): Xaa can be any naturally occurring amino acid
  misc_feature (231)..(231): Xaa can be any naturally occurring amino acid
  misc_feature (270)..(270): Xaa can be any naturally occurring amino acid
MAASLQSATTFLQSAKISTAPSRGSAHLRSTQTVGKSFGLETSSARLTCSFQSDFKDFAGKCSDAVKIAGFALATSALVVSGASAEGAPKRLTYDEIQSKTYMEVKGTGTANQCPTIDGGSETFSFKPGKYAGKKFCFEPTSFTVKAESVSKNAPPDFQNTKLMTRLTYTLDEIEGPFEVXSDGSVKFKEEDGIDYAAVTVQLXGGERVSFLFTVKQLDASGKPDNFTGKXLVPSYRGSSFLDPKGRGGSTGYDNAVALPAGGRGDEEEXSKENVKNTAASVGEITLKVTKSKPETGEVIGVFESLQPSDTDLGAKVPKDVKIQGVWYGQLE

SEQ ID NO: 104 - protein, 230 aa, Brassica napus
  misc_feature (79)..(79): Xaa can be any naturally occurring amino acid
  misc_feature (102)..(102): Xaa can be any naturally occurring amino acid
  misc_feature (129)..(129): Xaa can be any naturally occurring amino acid
  misc_feature (168)..(168): Xaa can be any naturally occurring amino acid
MEVKGTGTANQCPTIDGGSETFSFKPGKYAGKKFCFEPTSFTVKAESVSKNAPPDFQNTKLMTRLTYTLDEIEGPFEVXSDGSVKFKEEDGIDYAAVTVQLXGGERVSFLFTVKQLDASGKPDNFTGKXLVPSYRGSSFLDPKGRGGSTGYDNAVALPAGGRGDEEEXSKENVKNTAASVGEITLKVTKSKPETGEVIGVFESLQPSDTDLGAKVPKDVKIQGVWYGQLE

SEQ ID NO: 105 - DNA, 852 bp, Brassica napus
atcatcatctctctatcaacaatagcgattcgttccgtagccagcagaaaaaccctagcgggcctaaaggagacatcttcgaggcttcttggtctccgatcaatccagaccttcacgcttcctgatctcccctatgattacagcgccttggagccggcgatcagcggcgagatcatgcagatccatcaccagaagcatcaccaggcgtacgtcactaattacaacaatgccctcgagcagctggatcaggccgtcaacaagggagacgcttccggcgtcgttaagttgcagagcgccatcaagttcaacggcggaggtcatgtgaaccactctattttctggaagaatcttgctcctgtcaaggaaggtgggggagagccaccaaagggagctcttggctacgccattgacactcattttggctcccttgaaggtttggtgaagaagatgagtgctgaaggtgctgctctgcaagggtcaggatgggtgtggctcggtttagacaaagagcttaagaagcttgtggttgacacaaccgccaatcaggatccacttgtgacaaaaggaggaagcttggttcctctggtgggtattgatgtttgggagcacgcctactatttacagtacaagaatgtgaggccggagtatttgaagaacgtgtggaaagtggtcaactggaaatatgcaagcgaagtttataaggagtgcaagtgagttcgttacataaagagaggaaccagttcccagctcggctttgtttttataagtttgtttgaaacaaacgtataatgtctctttggtctttgagttagctcgaaatgaccatgtggttgcaataatacacgttgtttt

SEQ ID NO: 106 - protein, 237 aa, Brassica napus
IIISLSTIAIRSVASRKTLAGLKETSSRLLGLRSIQTFTLPDLPYDYSALEPAISGEIMQIHHQKHHQAYVTNYNNALEQLDQAVNKGDASGVVKLQSAIKFNGGGHVNHSIFWKNLAPVKEGGGEPPKGALGYAIDTHFGSLEGLVKKMSAEGAALQGSGWVWLGLDKELKKLVVDTTANQDPLVTKGGSLVPLVGIDVWEHAYYLQYKNVRPEYLKNVWKVVNWKYASEVYKECK

SEQ ID NO: 107 - protein, 179 aa, Brassica napus
MQIHHQKHHQAYVTNYNNALEQLDQAVNKGDASGVVKLQSAIKFNGGGHVNHSIFWKNLAPVKEGGGEPPKGALGYAIDTHFGSLEGLVKKMSAEGAALQGSGWVWLGLDKELKKLVVDTTANQDPLVTKGGSLVPLVGIDVWEHAYYLQYKNVRPEYLKNVWKVVNWKYASEVYKECK

SEQ ID NO: 108 - DNA, 467 bp, Brassica napus
ctcctcgtctccggactccacttcaaaaaaaaactaatcaaactccgtttaacctccgagacagccatgccgccgaagcttgacccgagccagatcgtggacgtctacgtccgcgtaaccggcggagaagtcggagcagcgagttccctcgctcccaagatcggtcccctcggtctggctcccaaaaagatcggagaagacatcgccaaggagacggccaaggagtggaaggggctccgcgtcacggtgaagctgacggtgcagaatcgccaggcgaaagtgacggtggtgccttcggcggcggcgctggtgatcaaggccttgaaggagccggagagggacaggaagaaggtgaagaacattaagcacaacgggaacatttcgttcgatgacgtgattgagatcgcgaggatcatgaggccgaggtctattgccaaggagctgagcgggacagtgagggagattct

SEQ ID NO: 109 - protein, 155 aa, Brassica napus
LLVSGLHFKKKLIKLRLTSETAMPPKLDPSQIVDVYVRVTGGEVGAASSLAPKIGPLGLAPKKIGEDIAKETAKEWKGLRVTVKLTVQNRQAKVTVVPSAAALVIKALKEPERDRKKVKNIKHNGNISFDDVIEIARIMRPRSIAKELSGTVREI

SEQ ID NO: 110 - protein, 133 aa, Brassica napus
MPPKLDPSQIVDVYVRVTGGEVGAASSLAPKIGPLGLAPKKIGEDIAKETAKEWKGLRVTVKLTVQNRQAKVTVVPSAAALVIKALKEPERDRKKVKNIKHNGNISFDDVIEIARIMRPRSIAKELSGTVREI

SEQ ID NO: 111 - DNA, 658 bp, Brassica napus
  misc_feature (273)..(273): n is a, c, g, or t
  misc_feature (555)..(555): n is a, c, g, or t
aatttatctgctccggatctctctctctctctctctctctctctctctctctctacgtgtaagactggtgattgttttttaggcggggaaaatgtcaggaaaaggagcgaaagggctgataatggggaaatccagcggcaacgacaaggacaaagacaagaagaaacccactactcgctcttctcgtgctggtcttcagtttccagtcgggagagtccacagactgttgaaaggaaggtcaaccgctcacggacgcgttggcgcaaccgcagnggtttacacagccgctattttggagtatctaaccgcggaagtcctcgagctcgctggcaacgcgagcaaggatctgaaagtgaagcgtatcacgccgaggcatctgcagctcgctattcgcggtgatgaagagcttgatactctcatcaaaggaactattgctggtggtggtgtcattcctcacatccacaagtctctcatcaacaaatctggccaagagtagcttttgtctctgtctctcgaacctttttgcttaaatataatcgtttgtgtgttaagacnttagtagagagaaaactcttgggagattgtttgttttgttaaagactcacgtgtgacttgtttgttggctcttgtttctgatttaatgttttggtgtttgttc

SEQ ID NO: 112 - protein, 134 aa, Brassica napus
  misc_feature (61)..(61): Xaa can be any naturally occurring amino acid
MSGKGAKGLIMGKSSGNDKDKDKKKPTTRSSRAGLQFPVGRVHRLLKGRSTAHGRVGATAXVYTAAILEYLTAEVLELAGNASKDLKVKRITPRHLQLAIRGDEELDTLIKGTIAGGGVIPHIHKSLINKSGQE

SEQ ID NO: 113 - protein, 132 aa, Brassica napus
  misc_feature (91)..(91): Xaa can be any naturally occurring amino acid
NLSAPDLSLSLSLSLSLSTCKTGDCFLGGENVRKRSERADNGEIQRQRQGQRQEETHYSLFSCWSSVSSRESPQTVERKVNRSRTRWRNRXGLHSRYFGVSNRGSPRARWQREQGSESEAYHAEASAARYSR

SEQ ID NO: 114 - protein, 124 aa, Brassica napus
  misc_feature (51)..(51): Xaa can be any naturally occurring amino acid
MGKSSGNDKDKDKKKPTTRSSRAGLQFPVGRVHRLLKGRSTAHGRVGATAXVYTAAILEYLTAEVLELAGNASKDLKVKRITPRHLQLAIRGDEELDTLIKGTIAGGGVIPHIHKSLINKSGQE

SEQ ID NO: 115 - DNA, 1020 bp, Brassica napus
  misc_feature (965)..(965): n is a, c, g, or t
  misc_feature (968)..(968): n is a, c, g, or t
  misc_feature (971)..(971): n is a, c, g, or t
  misc_feature (986)..(986): n is a, c, g, or t
aaagatcttttctttttctctccctgtgtcaggaacttacctctttgatgttataatattcgtattatataaattaatcaaagaaaattatttcatcatcgtcgtcatcttcttcatcttgtagaagtgcaccttgtcaaggtgaaaagttttaatggctttgacttcgtgcctaaacactggagtagttccgatgtctccgaccaccggatgtaatctttccgggagtcttgtgaagttggacagtggcttctccgttccgggaaagttacagagcgttcgaaaaagtggtagagagaggttgagagtccaagcggttttcagctttcctccggcgtttctaacgagaaacggtcgagcggagaagcagaagcagctgaagcaagatcttctcgaagccattgagcctctcgaacgtggcgccatcgcttctcctgatgaccagcttcggattgatcagttggcgcgtaaagtggaagcagtgaatccaaccaaggagcctttgaaatcagatttgctcaatgggaaatgggagctcatttacacaacctctgcttctattctgcaggctaagaaaccaaagttcttgagatcgataacaaactaccagtctatcaatgtggatacactcaaggttcaaaacatggagacttggcctttcttcaactcggtaactggagacataagacccctcaattcaaggaaggtcgcagtgcagctcaaagtgtttaaaattctcggccttatccctgtaaatgcacctgataccgcacgtggtgaactagagattacctatgtggacgaggaactacggctatcaaggggtgacaagggaaacttgtttatattgaagatgtttgatcccacttaccgaatccctctctgaagccaaaatggttccaagcccatcatacaaacatcgcttgttctttatctcttctatcatatgtatagatgaatgtttnttnttntacaaacataaagtntaataaaaaaaaaaaagagacgagctcttgtccc

SEQ ID NO: 116 - protein, 243 aa, Brassica napus
MALTSCLNTGVVPMSPTTGCNLSGSLVKLDSGFSVPGKLQSVRKSGRERLRVQAVFSFPPAFLTRNGRAEKQKQLKQDLLEAIEPLERGAIASPDDQLRIDQLARKVEAVNPTKEPLKSDLLNGKWELIYTTSASILQAKKPKFLRSITNYQSINVDTLKVQNMETWPFFNSVTGDIRPLNSRKVAVQLKVFKILGLIPVNAPDTARGELEITYVDEELRLSRGDKGNLFILKMFDPTYRIPL

SEQ ID NO: 117 - protein, 230 aa, Brassica napus
MSPTTGCNLSGSLVKLDSGFSVPGKLQSVRKSGRERLRVQAVFSFPPAFLTRNGRAEKQKQLKQDLLEAIEPLERGAIASPDDQLRIDQLARKVEAVNPTKEPLKSDLLNGKWELIYTTSASILQAKKPKFLRSITNYQSINVDTLKVQNMETWPFFNSVTGDIRPLNSRKVAVQLKVFKILGLIPVNAPDTARGELEITYVDEELRLSRGDKGNLFILKMFDPTYRIPL

SEQ ID NO: 118 - DNA, 751 bp, Brassica napus
  misc_feature (557)..(557): n is a, c, g, or t
aattaattgataaggtgttgaaagagaggaggccaagggaagtgagaagcgaaaagtgattactctccacttgtttggtcaaaaaatggaagcggcgacgaagcagagctttacaaaccgccttctcgccctcaagtcagcctccggcaagacttacagtcaattagcggcggagacagggctcaccaacgtctacgtggctcagctgctccgtcgccaagctcagctcaaacccgaaacagtgcccaagctccgtgcagccttacctgctttgaccgaagaactcatcgccgccatgatgtctccgccgtggagatcgtatgatccaaacctcatccaagaacccaccgtctacaggttgaacgaagcagtgatgcattttggtgagagtataaaggagatcatcaatgaagattttggcgacggcatcatgtcggcgatagacttctattgctctgtggacaaagttaaaggagttgacggtaataacccgcgttgtcgtgacacttgatgggaagtatctttctcattccgaacagaggactgagaatatggtntcaaggctaaacctcaagggaagtacaagcgaatgatatgaaaatgtaagaagaaaacgattcatatgaatgtaagcagcaatccatgaaggcttttatgtctaaagctgtaaacattgtaatatttatggtgtttgtttattctgtactctatgcaactccagcctcgagctgtttcaggttgaacaacagtg

SEQ ID NO: 119 - protein, 141 aa, Brassica napus
MEAATKQSFTNRLLALKSASGKTYSQLAAETGLTNVYVAQLLRRQAQLKPETVPKLRAALPALTEELIAAMMSPPWRSYDPNLIQEPTVYRLNEAVMHFGESIKEIINEDFGDGIMSAIDFYCSVDKVKGVDGNNPRCRDT

SEQ ID NO: 120 - protein, 71 aa, Brassica napus
MMSPPWRSYDPNLIQEPTVYRLNEAVMHFGESIKEIINEDFGDGIMSAIDFYCSVDKVKGVDGNNPRCRDT

SEQ ID NO: 121 - protein, 70 aa, Brassica napus
MSPPWRSYDPNLIQEPTVYRLNEAVMHFGESIKEIINEDFGDGIMSAIDFYCSVDKVKGVDGNNPRCRDT

SEQ ID NO: 122 - DNA, 804 bp, Brassica napus
  misc_feature (544)..(544): n is a, c, g, or t
  misc_feature (559)..(559): n is a, c, g, or t
  misc_feature (672)..(672): n is a, c, g, or t
  misc_feature (689)..(689): n is a, c, g, or t
  misc_feature (731)..(731): n is a, c, g, or t
atagatcatcttcctctctaatctagcgatctgctattatctcgatctgatctgttcgccatggaagagaagaaggcagaatcgacgaacaagaatgttaagaaggcaaatctgttggagcacaactcgatcaagcacatcctcgacgaatccgtctctgacatcgttaggagccgtggatacaaggaggacgtgaggctgagcaacctgaagctgatcttagggacggttatcatcgtggttgctctcgttgctcagttctacaacaagaagtttccggagaacagagactttttgattggatgcatcgcatcgtatgtagtgctgaatggggtgttgcagctgattctgtatactaaggagaagaatgctatattgttcaccaatcctcctgagggatcattcaccagcactggcttggttatgtcttcaaagctgccgagattctctgatgagtacactctcaccatcgacagtgctgatccaaaatcaatctcagctgggaagtctgtccagctcaccaaaagtgtcacccaatggttcncgaaagatggagttnttgttgaaggtttgttttggaaagacgtggaagcattaatcaaggactatgcagaagaaggagaaccaaagaagaagaaatgatgatatgatattaaggagaaaatactgttnttacaactccaacatgnatcgttttagataattaaaaatcgatggggacatttgcttanagatgacaataatattcccgataagaatattccagtgtttttttggttataacagaaaaaaaatcgaattaat

SEQ ID NO: 123 - protein, 193 aa, Brassica napus
  misc_feature (162)..(162): Xaa can be any naturally occurring amino acid
  misc_feature (167)..(167): Xaa can be any naturally occurring amino acid
MEEKKAESTNKNVKKANLLEHNSIKHILDESVSDIVRSRGYKEDVRLSNLKLILGTVIIVVALVAQFYNKKFPENRDFLIGCIASYVVLNGVLQLILYTKEKNAILFTNPPEGSFTSTGLVMSSKLPRFSDEYTLTIDSADPKSISAGKSVQLTKSVTQWFXKDGVXVEGLFWKDVEALIKDYAEEGEPKKKK

SEQ ID NO: 124 - DNA, 883 bp, Brassica napus
  misc_feature (484)..(484): n is a, c, g, or t
  misc_feature (781)..(781): n is a, c, g, or t
atctaactcattcgtcaacttgcagatggagagagaagcatacgaggtgatagtagaggatgggagactaatgtacaaacagaacatgactctgatcagttcaacagaagaatccaagacgatcttcgtacttagcaccactagaaccttgtacgtaggtcagaagaagaaaggcgttttccagcactctagtttcttatctggcggcgccacaacagctgcaggaagattggtcgcccgcgacggtgtcctcgaggctatatggccgtacagtggacactacctaccaacagaagacaacttcaaggagttcataagtttcctggaagagaacaatgttgatctcaccaatgttaagaggtgcactgtgaatgaggaatattcgtcgttcaaatacgaagaagaaacaaaagaagatgaaacagaaaataaacatgtggaaaccaacattacagaggacaaagaagaagaagagaaagagacncaaagaccggtgttcgagctgtcgaagaggctatcttgcaaatggaacagtggagttggtccaagaattgggtgtgttagagattatcccatggagctgcagtcacaagcatttgaacaagtcagcttgtctcctcggatttcgcctgcttctgcacgtttcccctcaccatacggtccaattccttcaccaaggcctagtcctagagtaagactctctccacgcttagcatacatgggaataccaagccctagagttcaggtgaactgctaggcttttgctgttaaattggttccncaataaacgagtcttatgacttttaaggtgtgagaaaaggctttattaattctcacatcctttgttctttaattcatgtcaaataaaagtttatttcttctt

SEQ ID NO: 125 - protein, 251 aa, Brassica napus
  misc_feature (161)..(161): Xaa can be any naturally occurring amino acid
SNSFVNLQMEREAYEVIVEDGRLMYKQNMTLISSTEESKTIFVLSTTRTLYVGQKKKGVFQHSSFLSGGATTAAGRLVARDGVLEAIWPYSGHYLPTEDNFKEFISFLEENNVDLTNVKRCTVNEEYSSFKYEEETKEDETENKHVETNITEDKEEEEKEXQRPVFELSKRLSCKWNSGVGPRIGCVRDYPMELQSQAFEQVSLSPRISPASARFPSPYGPIPSPRPSPRVRLSPRLAYMGIPSPRVQVNC

SEQ ID NO: 126 - protein, 243 aa, Brassica napus
  misc_feature (153)..(153): Xaa can be any naturally occurring amino acid
MEREAYEVIVEDGRLMYKQNMTLISSTEESKTIFVLSTTRTLYVGQKKKGVFQHSSFLSGGATTAAGRLVARDGVLEAIWPYSGHYLPTEDNFKEFISFLEENNVDLTNVKRCTVNEEYSSFKYEEETKEDETENKHVETNITEDKEEEEKEXQRPVFELSKRLSCKWNSGVGPRIGCVRDYPMELQSQAFEQVSLSPRISPASARFPSPYGPIPSPRPSPRVRLSPRLAYMGIPSPRVQVNC

SEQ ID NO: 127 - protein, 228 aa, Brassica napus
  misc_feature (138)..(138): Xaa can be any naturally occurring amino acid
MYKQNMTLISSTEESKTIFVLSTTRTLYVGQKKKGVFQHSSFLSGGATTAAGRLVARDGVLEAIWPYSGHYLPTEDNFKEFISFLEENNVDLTNVKRCTVNEEYSSFKYEEETKEDETENKHVETNITEDKEEEEKEXQRPVFELSKRLSCKWNSGVGPRIGCVRDYPMELQSQAFEQVSLSPRISPASARFPSPYGPIPSPRPSPRVRLSPRLAYMGIPSPRVQVNC

SEQ ID NO: 128 - DNA, 710 bp, Brassica napus
  misc_feature (119)..(119): n is a, c, g, or t
  misc_feature (522)..(522): n is a, c, g, or t
  misc_feature (622)..(622): n is a, c, g, or t
aaatcgattagttcctctctcattttgtcttctttgctttcgttatctcaggaagagaaaaaaaaaaaaaaatctcgattcagcgatcaaacaagcgttagatagatcagatggcggcncctttcacgttgaggaaaatcggcgtccctccgaactcagcgaacctgacggaagctcgccgccgtgtattcgatttcttcagagcagcctgcagatccatccctaccatcatggacatttacaatctccaagacgtcgtcgcgccttcccagctccgcttcgcaatctctgctcagattcgtaacaacgctcacgtcaccgaccctaaggtaattgatcttcttctattcaagggaatggaagagctgactgacatagtggatcacgctaagcagcgtcaccacatcatcggtcagtacgttgtgggtgaagggctggtgcagaataccggaagcaaagatcaaggaaagtctgattttctcaagaatttctacaccagcaactacttttgaactcattttngagtttgccgttccagtattgtatttcatgacttgaagaagccgtcttcccgaaaataataagaccttttttcatttgtatgagtttggtcaaacctctntaagttttatctgtgacagtgtttgttgtgcagatattgctatgatttaactctcaaatataaattgaattggtctgtttgatttatg

SEQ ID NO: 129 - protein, 133 aa, Brassica napus
  misc_feature (3)..(3): Xaa can be any naturally occurring amino acid
MAXPFTLRKIGVPPNSANLTEARRRVFDFFRAACRSIPTIMDIYNLQDVVAPSQLRFAISAQIRNNAHVTDPKVIDLLLFKGMEELTDIVDHAKQRHHIIGQYVVGEGLVQNTGSKDQGKSDFLKNFYTSNYF

SEQ ID NO: 130 - protein, 100 aa, Brassica napus
  misc_feature (40)..(40): Xaa can be any naturally occurring amino acid
NRLVPLSFCLLCFRYLRKRKKKKNLDSAIKQALDRSDGGXFHVEENRRPSELSEPDGSSPPCIRFLQSSLQIHPYHHGHLQSPRRRRAFPAPLRNLCSDS

SEQ ID NO: 131 - protein, 93 aa, Brassica napus
MDIYNLQDVVAPSQLRFAISAQIRNNAHVTDPKVIDLLLFKGMEELTDIVDHAKQRHHIIGQYVVGEGLVQNTGSKDQGKSDFLKNFYTSNYF

SEQ ID NO: 132 - DNA, 724 bp, Brassica napus
  misc_feature (703)..(703): n is a, c, g, or t
aaaaaaaaagagagatctgaatccgtcaaacaaacaaacaaaaaaaaccccaaacgttcgttcacagatctcgagagatgaaaggtggtgaaagcaaagcgcaagcgaagagcactgacgagagattgaagacgagagggaagaaagcagggaagaaggtgaaggatccgaacaagcctaagaggcctccaagtgctttcttcgtcttcctggagggattccgaaaggagttcaatctagctaaccctgacaacaaatccgttggagctgttggtaaagctgctggagccaaatggaaatcaatgactgctgaagataaagctccttatgtagccaaggctgagaccaagaagactgaatacgccaagactatgcaaaaatacaacatgaaattggctaatggaacgagtacagctggagatgatgactctgacaagtccaagtctgaggtcaacgacgaggaagatgctgcaagtgatgaggaggaagatgatgattaaaatgatggatcagcagcagcagtttgtttaattgaagtatcttctcttctgttatgtgttagctttactagttttagggagaaagttgttatgtcttccccccccttttatgttttaactgggattaattcacatctctctacttccaacttcctcatgataactttggatttagctttgaacttcgtttctagttttatganatggtatccatgtgtttgctt

SEQ ID NO: 133 - protein, 140 aa, Brassica napus
MKGGESKAQAKSTDERLKTRGKKAGKKVKDPNKPKRPPSAFFVFLEGFRKEFNLANPDNKSVGAVGKAAGAKWKSMTAEDKAPYVAKAETKKTEYAKTMQKYNMKLANGTSTAGDDDSDKSKSEVNDEEDAASDEEEDDD

SEQ ID NO: 134 - DNA, 573 bp, Brassica napus
aaaactcgaaaagaaagaagaggaaagagatggcttctacctccgccgtgtcattgttcatgccactcacccaaaaccgatcgccgtcgtcgacaaaaactgtagccttacgcaagccactattgcctttgaagccatctaaggcgtcatcctcctccttagccatgccttcacggaggtttcaagtgaatgcatctaacctgaagatggagaaggctgtgagcggcttagcagcagcagctctcaccgtttcaatggtgatccctgaggtggctgaagccgcaggctccggagtctctccctctctcaagaacttcttgcttagcattgccgcgggaggggtggtgctcacggtcatcatcggtgtggttgttggtgtctccaactttgatcctgttaagagaggctaaggacgagagatatctgtgtgtcattatattatggtaatgatttgtcaatttatgttataattaactcttgcattcttcttctatcttatatttgacaatttcccattggtctcaagattatatttttatctccagaactataataatatattagaataatatg

SEQ ID NO: 135 - protein, 135 aa, Brassica napus
NSKRKKRKEMASTSAVSLFMPLTQNRSPSSTKTVALRKPLLPLKPSKASSSSLAMPSRRFQVNASNLKMEKAVSGLAAAALTVSMVIPEVAEAAGSGVSPSLKNFLLSIAAGGVVLTVIIGVVVGVSNFDPVKRG

SEQ ID NO: 136 - protein, 126 aa, Brassica napus
MASTSAVSLFMPLTQNRSPSSTKTVALRKPLLPLKPSKASSSSLAMPSRRFQVNASNLKMEKAVSGLAAAALTVSMVIPEVAEAAGSGVSPSLKNFLLSIAAGGVVLTVIIGVVVGVSNFDPVKRG

SEQ ID NO: 137 - protein, 116 aa, Brassica napus
MPLTQNRSPSSTKTVALRKPLLPLKPSKASSSSLAMPSRRFQVNASNLKMEKAVSGLAAAALTVSMVIPEVAEAAGSGVSPSLKNFLLSIAAGGVVLTVIIGVVVGVSNFDPVKRG

SEQ ID NO: 138 - DNA, 457 bp, Brassica napus
acacaaagaagctccataattaattattgccctttcagttcgccatcggcagccgagcaccatgagctccacaggcggcggcgacgatggcgccaagaagtcttggccggaagtggtcgggctcagcctggaagaagccaagagggtgatcctgtgcgacaagcccgacgccgacatcgtcgtgctgcccgtcggcacgccggtgaccatggatttccgccccaaccgcgtccgcatcttcgtcgacaccgtcgcggaggcaccccacatcggctgaggtttaaatctacaaaatgaatgactcggacatgccatgcgtacctgtccgtcgccgaataatggatgtgtgtgtgcttcgttccaataaattgctagtaaaaataatggcatcgtcggtatgcatgaataaaatgtatcagaatgttcatcctttcacgattggatatatgaaaattgg

SEQ ID NO: 139 - protein, 98 aa, Brassica napus
TQRSSIINYCPFSSPSAAEHHELHRRRRRWRQEVLAGSGRAQPGRSQEGDPVRQARRRHRRAARRHAGDHGFPPQPRPHLRRHRRGGTPHRLRFKSTK

SEQ ID NO: 140 - protein, 71 aa, Brassica napus
MSSTGGGDDGAKKSWPEVVGLSLEEAKRVILCDKPDADIVVLPVGTPVTMDFRPNRVRIFVDTVAEAPHIG

SEQ ID NO: 141 - protein, 54 aa, Brassica napus
MNDSDMPCVPVRRRIMDVCVLRSNKLLVKIMASSVCMNKMYQNVHPFTIGYMKI

SEQ ID NO: 142 - DNA, 954 bp, Brassica napus
  misc_feature (767)..(767): n is a, c, g, or t
atttccaatataaggagttctcaagaataataaaacaagaaaagtaataattgtgtaaaagatcagcaaaatggttgctcaagggttcactgtggatcttgacaagccccttgctttccaggttggtcatctcggagaagcttacgacgaatgggttcaccaacctattgtaacaaaggaaggccctcggtttttccataatgacttttgggagttcttgacccttacagtttggtgggcggttcctgtcatttggttgccagttgttgtctggtgcatctccatgtcaggaagcatgggctgttcattcccagaagttgtctcattggttgccttgggaatatttatctggacttttatagaatactgtcttcaccgtttccttttccacatgaagaccaagagttactggggaaacacggcacactatcttatccacggataccatcacaagcacccaatggaccaccttcgactcgtctttcctcctgccttaacagctattatgtgctttcctctctggaaccttgcgaagctaatcgcaactccttcagctgcacctgcattgtttggaggcggcctgttcggctatgtgatgtacgatcttactcactactaccttcaccatgccaacccaactataccagtaaccaaaaacctcaagaaatcccatttgaaccatcacttcaggattcaggacaagggatatggagtaacttcgtcgctatgggacatagtgtttggtacacttcccaccacaaaagctntcaaaagagagcaacaaaagtactaagatggatgcaaacgaaaaaggatattaatttgtaatatacagttcatcttaaactatttaatcaatcactctatgttaatctgatcacgtttgttttggactaataatgtctttgtatatcaatatactacacatcctatgtaatagtttttatgtgtttc

SEQ ID NO: 143 - protein, 240 aa, Brassica napus
  misc_feature (233)..(233): Xaa can be any naturally occurring amino acid
MVAQGFTVDLDKPLAFQVGHLGEAYDEWVHQPIVTKEGPRFFHNDFWEFLTLTVWWAVPVIWLPVVVWCISMSGSMGCSFPEVVSLVALGIFIWTFIEYCLHRFLFHMKTKSYWGNTAHYLIHGYHHKHPMDHLRLVFPPALTAIMCFPLWNLAKLIATPSAAPALFGGGLFGYVMYDLTHYYLHHANPTIPVTKNLKKSHLNHHFRIQDKGYGVTSSLWDIVFGTLPTTKAXKREQQKY

SEQ ID NO: 144 - protein, 169 aa, Brassica napus
  misc_feature (162)..(162): Xaa can be any naturally occurring amino acid
MSGSMGCSFPEVVSLVALGIFIWTFIEYCLHRFLFHMKTKSYWGNTAHYLIHGYHHKHPMDHLRLVFPPALTAIMCFPLWNLAKLIATPSAAPALFGGGLFGYVMYDLTHYYLHHANPTIPVTKNLKKSHLNHHFRIQDKGYGVTSSLWDIVFGTLPTTKAXKREQQKY

SEQ ID NO: 145 - protein, 165 aa, Brassica napus
  misc_feature (158)..(158): Xaa can be any naturally occurring amino acid
MGCSFPEVVSLVALGIFIWTFIEYCLHRFLFHMKTKSYWGNTAHYLIHGYHHKHPMDHLRLVFPPALTAIMCFPLWNLAKLIATPSAAPALFGGGLFGYVMYDLTHYYLHHANPTIPVTKNLKKSHLNHHFRIQDKGYGVTSSLWDIVFGTLPTTKAXKREQQKY

SEQ ID NO: 146 - DNA, 887 bp, Brassica napus
  misc_feature (133)..(134): n is a, c, g, or t
  misc_feature (415)..(415): n is a, c, g, or t
  misc_feature (728)..(728): n is a, c, g, or t
  misc_feature (740)..(740): n is a, c, g, or t
  misc_feature (761)..(761): n is a, c, g, or t
  misc_feature (795)..(795): n is a, c, g, or t
gatttcaatctgcgaatttctctttaaaccctacaaacccttttcccgatcaaacaatgacgctccacgccgcagtgatccagaagcttctcaacaccggctcccatctcggccgccgcgccgccgagcaccnnttcaaacagtacgcctacggaacccgcaacgggatgaccatcatcgactccgacaaaaccctgatctgcctccgcagcgccgccagcttcgtcgccaacctcgcgcacatgagggggaacatctacttcgtcaacacgaaccctctcttcgacgagatcgtcgagctcacttcccgccgcatccagggcgacgcgtacaaccacaaccgctcgatgaatctgtggaatatgggaggttttttgacgaacagttacagtcctaagaagtttcggtcgaggcncaagaagctttgctttggtccgacgacgatgcctgattgtgtcgttgtgtttgataccgagaggaagagctcggtgatactcgaggccgcgaagcttcagattcctgttgtggcgattgtggatccgaatgtgccgttggagttctttgagaagattacttatcctgtgccggcacgtgactcggttaagtttgtttatttgttttgtaatgtgatcactaagtgctttgtggctgagcagatgaagatggggatcaaagatgggggcaaggatgatgtgatgaaggatttagctgcatgatttggatattcncagcacacgttnttagtctcgaatcattgtttnttcagcattgtggtttttctctactttgaaattntgagtcttctttattacatttgggtgattttgttcatgtgattgttataaagcaacagcttttttcaaaggtagatacatcagagccaattt

SEQ ID NO: 147 - protein, 237 aa, Brassica napus
  misc_feature (44)..(44): Xaa can be any naturally occurring amino acid
  misc_feature (138)..(138): Xaa can be any naturally occurring amino acid
FQSANFSLNPTNPFPDQTMTLHAAVIQKLLNTGSHLGRRAAEHXFKQYAYGTRNGMTIIDSDKTLICLRSAASFVANLAHMRGNIYFVNTNPLFDEIVELTSRRIQGDAYNHNRSMNLWNMGGFLTNSYSPKKFRSRXKKLCFGPTTMPDCVVVFDTERKSSVILEAAKLQIPVVAIVDPNVPLEFFEKITYPVPARDSVKFVYLFCNVITKCFVAEQMKMGIKDGGKDDVMKDLAA

SEQ ID NO: 148 - protein, 219 aa, Brassica napus
  misc_feature (26)..(26): Xaa can be any naturally occurring amino acid
  misc_feature (120)..(120): Xaa can be any naturally occurring amino acid
MTLHAAVIQKLLNTGSHLGRRAAEHXFKQYAYGTRNGMTIIDSDKTLICLRSAASFVANLAHMRGNIYFVNTNPLFDEIVELTSRRIQGDAYNHNRSMNLWNMGGFLTNSYSPKKFRSRXKKLCFGPTTMPDCVVVFDTERKSSVILEAAKLQIPVVAIVDPNVPLEFFEKITYPVPARDSVKFVYLFCNVITKCFVAEQMKMGIKDGGKDDVMKDLAA

SEQ ID NO: 149 - protein, 182 aa, Brassica napus
  misc_feature (83)..(83): Xaa can be any naturally occurring amino acid
MTIIDSDKTLICLRSAASFVANLAHMRGNIYFVNTNPLFDEIVELTSRRIQGDAYNHNRSMNLWNMGGFLTNSYSPKKFRSRXKKLCFGPTTMPDCVVVFDTERKSSVILEAAKLQIPVVAIVDPNVPLEFFEKITYPVPARDSVKFVYLFCNVITKCFVAEQMKMGIKDGGKDDVMKDLAA

SEQ ID NO: 150 - DNA, 935 bp, Brassica napus
  misc_feature (69)..(69): n is a, c, g, or t
  misc_feature (483)..(483): n is a, c, g, or t
  misc_feature (542)..(542): n is a, c, g, or t
  misc_feature (550)..(550): n is a, c, g, or t
  misc_feature (644)..(644): n is a, c, g, or t
  misc_feature (745)..(745): n is a, c, g, or t
  misc_feature (766)..(766): n is a, c, g, or t
  misc_feature (817)..(817): n is a, c, g, or t
atagatttgatttcttctacaaacatcgatcgaaagagagacgatcctttaagatggcgaccgtagacnagagttcttcagctaagagatggcttccacttgaagctaacccagatgttatgaatcagtttctgtgggggcttggacttgccccagatgcagctgagtgtaatgatgtgtttggtttagatgacgagcttcttgagatggttccaaagcctgtccttgctgttctcttcctttaccctatcaccaaaaagagtgaagaagagagaattgagcaagacaaggagatcaaggagaaggtgcatattgataaagtttactttatgaaacaaactgttggtaatgcttgtggaaccattggtcttcttcatgctattggcaacattacctctgaaatcaagctttctgagggatccttcttagataagtttttcaaaaccaccagcaatatgactcctatggagcgtggaaggtttntagagaatgatagtcaaatagaagatgctcattctgcagctgttacagctggtgaaacnccggcttntgatgacgtgaacacgcatttcatctgtctagcttgtgtagatggtgagctctatgaacttgatggaaggaaagcaggaccaatttcacatggngcttcctctccagctaccctgttgaaggattcgacgaaagtgataaagaagattatcgaaaagaatccggacacgctcaacttcaatgttatggccatctntaagagaacctgaggatgttnttaagaagcgaagctcatttcatttagtcttgcgtttttgagtttgtgacncaatgaaccaaccacacagattgtttatctaggtggattctgttttactgctttctgaatcttctttttcttgtttctgaaacttttaagagtttatgatctcaaggttttttttttt

SEQ ID NO: 151 - protein, 251 aa, Brassica napus
  misc_feature (23)..(23): Xaa can be any naturally occurring amino acid
  misc_feature (161)..(161): Xaa can be any naturally occurring amino acid
  misc_feature (180)..(180): Xaa can be any naturally occurring amino acid
  misc_feature (183)..(183): Xaa can be any naturally occurring amino acid
  misc_feature (214)..(214): Xaa can be any naturally occurring amino acid
  misc_feature (248)..(248): Xaa can be any naturally occurring amino acid
RFDFFYKHRSKERRSFKMATVDXSSSAKRWLPLEANPDVMNQFLWGLGLAPDAAECNDVFGLDDELLEMVPKPVLAVLFLYPITKKSEEERIEQDKEIKEKVHIDKVYFMKQTVGNACGTIGLLHAIGNITSEIKLSEGSFLDKFFKTTSNMTPMERGRFXENDSQIEDAHSAAVTAGEXPAXDDVNTHFICLACVDGELYELDGRKAGPISHXASSPATLLKDSTKVIKKIIEKNPDTLNFNVMAIXKRT

SEQ ID NO: 152 - protein, 234 aa, Brassica napus
  misc_feature (6)..(6): Xaa can be any naturally occurring amino acid
  misc_feature (144)..(144): Xaa can be any naturally occurring amino acid
  misc_feature (163)..(163): Xaa can be any naturally occurring amino acid
  misc_feature (166)..(166): Xaa can be any naturally occurring amino acid
  misc_feature (197)..(197): Xaa can be any naturally occurring amino acid
  misc_feature (231)..(231): Xaa can be any naturally occurring amino acid
MATVDXSSSAKRWLPLEANPDVMNQFLWGLGLAPDAAECNDVFGLDDELLEMVPKPVLAVLFLYPITKKSEEERIEQDKEIKEKVHIDKVYFMKQTVGNACGTIGLLHAIGNITSEIKLSEGSFLDKFFKTTSNMTPMERGRFXENDSQIEDAHSAAVTAGEXPAXDDVNTHFICLACVDGELYELDGRKAGPISHXASSPATLLKDSTKVIKKIIEKNPDTLNFNVMAIXKRT

SEQ ID NO: 153 - protein, 212 aa, Brassica napus
  misc_feature (122)..(122): Xaa can be any naturally occurring amino acid
  misc_feature (141)..(141): Xaa can be any naturally occurring amino acid
  misc_feature (144)..(144): Xaa can be any naturally occurring amino acid
  misc_feature (175)..(175): Xaa can be any naturally occurring amino acid
  misc_feature (209)..(209): Xaa can be any naturally occurring amino acid
MNQFLWGLGLAPDAAECNDVFGLDDELLEMVPKPVLAVLFLYPITKKSEEERIEQDKEIKEKVHIDKVYFMKQTVGNACGTIGLLHAIGNITSEIKLSEGSFLDKFFKTTSNMTPMERGRFXENDSQIEDAHSAAVTAGEXPAXDDVNTHFICLACVDGELYELDGRKAGPISHXASSPATLLKDSTKVIKKIIEKNPDTLNFNVMAIXKRT

SEQ ID NO: 154 - DNA, 683 bp, Brassica napus
agattccgtttcatcgcctctcgtctcaggatctagaagtaagggaacaccaaatcgtgagcgagaacatggcaggcaagggagggaaagggctcgttgctgcaaagacgatggctgctaacaaggacaaagacaagggcaagatgaaacccatctctcgatctgctcgtgctggtattcagtttccagtgggccgtatccataggcaactcaagaccagggtttcagcacacggaagagttggtgccactgctgctgtgtacactgcttcgattctagagtacctgactgcagaagttcttgagttggctggaaacgcaagcaaggatctgaaagtgaagaggataactccaaggcatttgcagttggcaatcagaggagatgaggagcttgacacgctcatcaaaggaaccattgccggaggtggtgtgatccctcacatccacaagtctctcatcaacaaaaccaccaatgagtgatttgtttcctaagcactaaggttgtttgatcggctagttagtagcttatcatgtcagtgtttgttaagtcttggactgcttttcttttccttttttagtgtcgcctttaattggacatcttcaggtgtacatgagttaatttgaactcttatgcttctcctttgcatactcttgttgttttctgtcaagtaaaccaatttaatt

SEQ ID NO: 155 - protein, 158 aa, Brassica napus
IPFHRLSSQDLEVREHQIVSENMAGKGGKGLVAAKTMAANKDKDKGKMKPISRSARAGIQFPVGRIHRQLKTRVSAHGRVGATAAVYTASILEYLTAEVLELAGNASKDLKVKRITPRHLQLAIRGDEELDTLIKGTIAGGGVIPHIHKSLINKTTNE

SEQ ID NO: 156 - protein, 136 aa, Brassica napus
MAGKGGKGLVAAKTMAANKDKDKGKMKPISRSARAGIQFPVGRIHRQLKTRVSAHGRVGATAAVYTASILEYLTAEVLELAGNASKDLKVKRITPRHLQLAIRGDEELDTLIKGTIAGGGVIPHIHKSLINKTTNE

SEQ ID NO: 157 - protein, 122 aa, Brassica napus
MAANKDKDKGKMKPISRSARAGIQFPVGRIHRQLKTRVSAHGRVGATAAVYTASILEYLTAEVLELAGNASKDLKVKRITPRHLQLAIRGDEELDTLIKGTIAGGGVIPHIHKSLINKTTNE

SEQ ID NO: 158 - DNA, 632 bp, Brassica napus
agaacatcctaatcgaaaaatcactcatcactgcacacttctcattttgcaaacagtcaaaagctcctaaaactaagaaaaatggctggtctagtgaagttgtcatgcttggtcttggcctgcatgattgtggccggtccaatagcaacgaacgcggctctaagctgtggaaccgttagcggtaatttggcagcatgcattggctacttaacccaaaatgggcccgttcccacagcgtgctgcagcggcgttactagtctaaacaacatggcccgtacaaccccagaccgtcagcaagcttgccgttgccttgtaggagccgctaacgccttgcctactatcaacgttgcccgtgcagctggacttcctaaggcatgtggagtcaacattccttacaagatcagcaaaaccaccaactgcaacagtgtgaaatgagcggcggtcggatgaagctaatcgagacgttcaagtattatgtaatggatgagcgaataacctaaaataagatgctccaatggttgttgtttttagagttttcaatttcctgtcttttatgttgtgacgttcctattactttggtcgtttgtactatgttcacaatcaacgttatatgaatttcaggtctaagattt

SEQ ID NO: 159 - protein, 117 aa, Brassica napus
MAGLVKLSCLVLACMIVAGPIATNAALSCGTVSGNLAACIGYLTQNGPVPTACCSGVTSLNNMARTTPDRQQACRCLVGAANALPTINVARAAGLPKACGVNIPYKISKTTNCNSVK

SEQ ID NO: 160 - protein, 103 aa, Brassica napus
MIVAGPIATNAALSCGTVSGNLAACIGYLTQNGPVPTACCSGVTSLNNMARTTPDRQQACRCLVGAANALPTINVARAAGLPKACGVNIPYKISKTTNCNSVK

SEQ ID NO: 161 - protein, 58 aa, Brassica napus
NILIEKSLITAHFSFCKQSKAPKTKKNGWSSEVVMLGLGLHDCGRSNSNERGSKLWNR

SEQ ID NO: 162 - DNA, 830 bp, Arabidopsis thaliana
attgagatcgaaattctcttcattttctcaggctccaatgtcgctggacttagctcgttgatcatcgtacaaaaagcttgctcgtagctatcagctccccggagaagaagatggtgcggaaacagtttcaacaggctaaaactggaatagaggcattgaagtcaatggatgctaacaactacttgaagaaggttggattagggcgtgacgatatgttcttttggaaacaagtgggaaaagcattgctatgcacttacacaatctttggtatggcttggatttacaatgaaacgtctcctttaggttggtggacgctgaagccaagaccaaaggaagagagagaattggctcatttgtatgagcggcgtgagtttccttatcctggtgatacagaggctatggaggattttgttgcaaaggggggaatgattggtactgcaattggaccgaaaggaattgttgagtccgaaggtgaggctgataattaccagaaggaaatggagaagaagaagtttgataaagaggctcagaaactgtggttgagaatgaggaatgaggttattactgaacttcaagagaaagggcataatcttgaataaggaagtgcaatagggttttgataaataaaaaagctgtgtgtaatttagggtgtgtatcagttagactaaggattcaaccactcgtacaagtgtttctgtctacgtatagctgaaagtactatactggttgatgttcttgctcttggggaagtagctcttgtcctttattggtggcttgattcatgttttggcttaaaccctttggaatataacttgatgcgttttgctccc

SEQ ID NO: 163 - protein, 162 aa, Arabidopsis thaliana
MVRKQFQQAKTGIEALKSMDANNYLKKVGLGRDDMFFWKQVGKALLCTYTIFGMAWIYNETSPLGWWTLKPRPKEERELAHLYERREFPYPGDTEAMEDFVAKGGMIGTAIGPKGIVESEGEADNYQKEMEKKKFDKEAQKLWLRMRNEVITELQEKGHNLE

SEQ ID NO: 164 - protein, 144 aa, Arabidopsis thaliana
MDANNYLKKVGLGRDDMFFWKQVGKALLCTYTIFGMAWIYNETSPLGWWTLKPRPKEERELAHLYERREFPYPGDTEAMEDFVAKGGMIGTAIGPKGIVESEGEADNYQKEMEKKKFDKEAQKLWLRMRNEVITELQEKGHNLE

SEQ ID NO: 165 - protein, 128 aa, Arabidopsis thaliana
MFFWKQVGKALLCTYTIFGMAWIYNETSPLGWWTLKPRPKEERELAHLYERREFPYPGDTEAMEDFVAKGGMIGTAIGPKGIVESEGEADNYQKEMEKKKFDKEAQKLWLRMRNEVITELQEKGHNLE

SEQ ID NO: 166 - DNA, 971 bp, Arabidopsis thaliana
aaagaaattataactacaaactcttctgtttattattattattatagttagctttttaatataaaacggatattagaattttgtaacaaagaaatcggcgggagtcgtgtgctttagcccaaaaacattggcctcgttgtccaacgtgtgtatttggaggaaaacatcattagagggccacatatacatctctctaattacactttacgaatattaaacacatttaattgtacttaatcctcggcataacacttgtccattaagtcaccatgtacttgctataaatatggtcaagtccagtccataatatatgcatctctgatctttcttggtgagagtaatagacatgggagctcttgattctctttccgagtatatctccgactacttccgcgtcaccagaaaaaggaggaagcggaaagtcatgcagacggtgaatataaaggtgaaaatggactgcgatggttgtgaacgcagagtcaagaacgcggtttcctccatgaaaggtgtgaaatcggtggaggtgaatagaaagatacataaagtgacggtgagtggatacgtggaaccaaagaaggtattaaagagaatcgaaaggacagggaaaaaagcggagatatggccgtacgttccttacaacatggtcgcatatccatacgcggtcggaacttacgacaaaaaagctccggccggttatgtcaggaaatctgagcagtcgcagttgcagctgttgccgggagctcccgagaaccactacatttctctttttagcgacgagaatcccaacgcttgcaccgttatgtaataaataatttactctagtagtattatccacagcatgtaacgtttttatcaagcaattggctctctctctctctctctttttgttatgttaatgcagagaggaagaaccaactatagctagttgtgtaaaaatttcaatatttcaaaataagttagtggaatgtgta

SEQ ID NO: 167 - protein, 152 aa, Arabidopsis thaliana
MGALDSLSEYISDYFRVTRKRRKRKVMQTVNIKVKMDCDGCERRVKNAVSSMKGVKSVEVNRKIHKVTVSGYVEPKKVLKRIERTGKKAEIWPYVPYNMVAYPYAVGTYDKKAPAGYVRKSEQSQLQLLPGAPENHYISLFSDENPNACTVM

SEQ ID NO: 168 - protein, 126 aa, Arabidopsis thaliana
MQTVNIKVKMDCDGCERRVKNAVSSMKGVKSVEVNRKIHKVTVSGYVEPKKVLKRIERTGKKAEIWPYVPYNMVAYPYAVGTYDKKAPAGYVRKSEQSQLQLLPGAPENHYISLFSDENPNACTVM

SEQ ID NO: 169 - protein, 117 aa, Arabidopsis thaliana
MDCDGCERRVKNAVSSMKGVKSVEVNRKIHKVTVSGYVEPKKVLKRIERTGKKAEIWPYVPYNMVAYPYAVGTYDKKAPAGYVRKSEQSQLQLLPGAPENHYISLFSDENPNACTVM

SEQ ID NO: 170 - DNA, 1153 bp, Arabidopsis thaliana
gtcgacccacgcgtccgctccaagaggagagagagagaaagagattcaattatatgcagagagaaaaagaagccaattggttctctctctctctctctctctctctgattgattgatccagcgattcgtctggctggctcggtttccgcgggaaaaccttcttcttcgttgaccttacacgagttttgttgattcggcagggggatcgacgacggagatggcgattctgtacgccctcgtggctcgtggcacggtggttctttctgagttcaccgccacctctacgaatgcgagcaccatcgccaaacagatcctcgagaaggtccctggagacaacgacagcaacgtctcctactctcaggatcgttacgtcttccacgttaaacgcaccgatggcctcaccgttctctgtatggccgaagaaaccgccggaaggagaattccttttgcctttttggaggatattcaccagagattcgtacggacttatggcagggctgttcatacagcactagcttatgcaatgaatgaggaattctctagagttctcagtcagcagattgactattactctaatgatcctaatgccgataggattaatcgtattaagggtgaaatgaatcaggtgcggggtgtcatgatagaaaacattgacaaagtcctagatagaggtgaacgtttggagcttcttgtcgataaaaccgccaatatgcaggggaatacattccggttcagaaagcaagctcgtcgttttagaagcaacgtctggtggagaaactgcaagctcacggtcctcttaatactactactactggtgatcatatacattgcagtggcctttctctgccacggacctactctaccatcttgcatttaagtgcatctgtctcttaaggaatccatcccgattctgcgcgttgccacgactttttatctcctcatctgattgtaaaccttgtgttttcctgagcattttcatgtggcttaaaaagcttatgtttccaactcacgtatatgaaaaagtatacttatttatagagcaatgtaaaagctcattgctttgcgaagtgtgtgaatctttgttgacatcatgttctataaattacatacatagtggaaaagtgaacaggcttgctttgtctgatatgttcat

SEQ ID NO: 171 - protein, 219 aa, Arabidopsis thaliana
MAILYALVARGTVVLSEFTATSTNASTIAKQILEKVPGDNDSNVSYSQDRYVFHVKRTDGLTVLCMAEETAGRRIPFAFLEDIHQRFVRTYGRAVHTALAYAMNEEFSRVLSQQIDYYSNDPNADRINRIKGEMNQVRGVMIENIDKVLDRGERLELLVDKTANMQGNTFRFRKQARRFRSNVWWRNCKLTVLLILLLLVIIYIAVAFLCHGPTLPSCI

SEQ ID NO: 172 - protein, 154 aa, Arabidopsis thaliana
MAEETAGRRIPFAFLEDIHQRFVRTYGRAVHTALAYAMNEEFSRVLSQQIDYYSNDPNADRINRIKGEMNQVRGVMIENIDKVLDRGERLELLVDKTANMQGNTFRFRKQARRFRSNVWWRNCKLTVLLILLLLVIIYIAVAFLCHGPTLPSCI

SEQ ID NO: 173 - protein, 117 aa, Arabidopsis thaliana
MNEEFSRVLSQQIDYYSNDPNADRINRIKGEMNQVRGVMIENIDKVLDRGERLELLVDKTANMQGNTFRFRKQARRFRSNVWWRNCKLTVLLILLLLVIIYIAVAFLCHGPTLPSCI

SEQ ID NO: 174 - DNA, 911 bp, Arabidopsis thaliana
actaaaacaaaaaatctcttaacaacttctccaccttctccccaccaccaccactcaccgtcggagaaagaaaaaaaacaaccaccatgaaagactgtgaaaaccacggccactctcgccggaaactaataaggcgaatattttggtcaataatcttcgtcctcttcatcatcttcctaacaatcctcctcatttgggcaattctccaaccatcaaagccacgcttcatcctccaagacgccaccgtctacgccttcaacgtctccggcaatccaccgaacctcctcacctccaacttccaaatcactctctcttcccggaaccctaacaacaaaatcggcatttactacgaccggcttgacgtctacgctacttaccggagccaacaaatcactttcccaacatcaatccctcccacgtatcagggacacaaagatgtcgacatctggtcgccgtttgtttacggaacctccgttcccatcgctccttttaacggcgttagtcttgacaccgataaagataacggtgtcgttttgttgatcattcgtgctgatggtagagtgaggtggaaggttgggacttttatcaccgggaagtatcatcttcatgtgaagtgtccagcatatataaacttcggtaacaaagctaacggagttatcgtcggagacaacgccgttaagtatacgtttaccactagttgtagtgttagtgtgtgaaacggcgacgaagaaaaataaggtaactaaacgtcttcgttaagtaatctgtcttagtgatgtgaattgtacattttgcttatacgaatagcaaatattacagattcgtgatgttgtaacgaattttaagaatttcaatatgtatactttttttttattatagttgaattctaaattctattataagttgtgatg

SEQ ID NO: 175 - protein, 209 aa, Arabidopsis thaliana
MKDCENHGHSRRKLIRRIFWSIIFVLFIIFLTILLIWAILQPSKPRFILQDATVYAFNVSGNPPNLLTSNFQITLSSRNPNNKIGIYYDRLDVYATYRSQQITFPTSIPPTYQGHKDVDIWSPFVYGTSVPIAPFNGVSLDTDKDNGVVLLIIRADGRVRWKVGTFITGKYHLHVKCPAYINFGNKANGVIVGDNAVKYTFTTSCSVSV

SEQ ID NO: 176 - DNA, 1166 bp, Arabidopsis thaliana
aaagttggagttagctaagcttagctacaaaagaacagtcgccggcaaaagtctcagcctttttcctctccgccgttcacagttcaccggcatttctctcttctttctttttctccgactagatttccttgtctctttggtttcttggcgatgggagacgagaagccggtgattgttatggccaatcgagaaagagatcgagagcttctgattcccgtcgctgattccggcgacaaagacgacggttcttcttcgaagccttcttcttcttcctctgcttcttcttcttcgcatcaatccagccacgagactttaagcttgttcattaggggctgggcgtcaaagaagttcatgacaggctgtgttatcctacttcctattgcaattactttctatataacatggtggtttattcactttgtcgatggattcttctctccaatatatgcacaacttggaatcaacgtatttggtttcggttttttgacttccattgcattcatcttcttggttggggtgttcatgtcttcgtggttgggggcatcggttctgaacttgggagagtggtttatcaagcggatgccgtttgttcgtcacatctacaacgcctccaagcaaatcagcactgccatatcgcctgatcaaaatacacaagctttcaaggaagttgcaatcatcaggcatccccgtgtaggtgaatacgcatttggcttcattacatcaactgttgttctccagaactatccaaccgaggaggaactttgctgtgtatacgttcccacgaaccacctttacattggagatatactacttgtcaacagtaatgacgttatcaggccaaacctctcggtccgggaaggaattgagattgttgtttcgggtggaatgtcaatgccacagattctgtccactgttgataaacctttggcctcgattgatagagctacaagcttatagtttaaagcagaagaatttctctttttgttgggatttgttgatgagtgtttgtgtgtctctggagtctcttcaatattgttgtaatatttcatgtgtttacaagtgtataatgtaaggtaggtctctctctccctctcttcttagatatgaatctttttcctgaaaatattattcttcttgaaaagtattgcgaaatttcttctagtttt

SEQ ID NO: 177 - protein, 268 aa, Arabidopsis thaliana
MGDEKPVIVMANRERDRELLIPVADSGDKDDGSSSKPSSSSSASSSSHQSSHETLSLFIRGWASKKFMTGCVILLPIAITFYITWWFIHFVDGFFSPIYAQLGINVFGFGFLTSIAFIFLVGVFMSSWLGASVLNLGEWFIKRMPFVRHIYNASKQISTAISPDQNTQAFKEVAIIRHPRVGEYAFGFITSTVVLQNYPTEEELCCVYVPTNHLYIGDILLVNSNDVIRPNLSVREGIEIVVSGGMSMPQILSTVDKPLASIDRATSL

SEQ ID NO: 178 - protein, 259 aa, Arabidopsis thaliana
MANRERDRELLIPVADSGDKDDGSSSKPSSSSSASSSSHQSSHETLSLFIRGWASKKFMTGCVILLPIAITFYITWWFIHFVDGFFSPIYAQLGINVFGFGFLTSIAFIFLVGVFMSSWLGASVLNLGEWFIKRMPFVRHIYNASKQISTAISPDQNTQAFKEVAIIRHPRVGEYAFGFITSTVVLQNYPTEEELCCVYVPTNHLYIGDILLVNSNDVIRPNLSVREGIEIVVSGGMSMPQILSTVDKPLASIDRATSL

SEQ ID NO: 179 - protein, 201 aa, Arabidopsis thaliana
MTGCVILLPIAITFYITWWFIHFVDGFFSPIYAQLGINVFGFGFLTSIAFIFLVGVFMSSWLGASVLNLGEWFIKRMPFVRHIYNASKQISTAISPDQNTQAFKEVAIIRHPRVGEYAFGFITSTVVLQNYPTEEELCCVYVPTNHLYIGDILLVNSNDVIRPNLSVREGIEIVVSGGMSMPQILSTVDKPLASIDRATSL

SEQ ID NO: 180 - DNA, 795 bp, Arabidopsis thaliana
gctcagataagggagacaaaaatggaagtgaaagggaaagagacagcttcggttctgtgtctgagcaaatacgtggatctatcgagtgaagagagtcatagatactatcttgcgcggcgaaatggcttgcagatgctccgagacagaggctacgaagtctccgacgaagatatcaatctctcccttcacgattttcgaactgtttacggtgaacgtcccgatgttgatcgtcttcgcatctccgctctgcatcgctccgattctaccaaaaaggtaaaaattgtcttttttggtactagtatggttaaagtcaacgcaatccgcagtgtagtagcggatatacttagccaagaaaccataactgggctgatattggttctgcaaaaccatgtaaccaatcaagccttgaaagccattgaacttttttctttcaaggtcgagatattccagataacggatctgctagtcaacataaccaaacattcactgaagccacaacatcaggtgttgaatgatgaagagaagacaacacttctcaagaagttcagcattgaggaaaaacagcttcctcggatttcaaagaaagatgctatcgtccggtactacggattagagaaagggcaagttgtgaaggtgaattacagaggcgaactcacggaatcgcatgttgccttccgatgtgtgtggtgaagaaaccaattaaaaaccatcttgtgtacttattttcaggaaaaaataacttgtatgtttctaaggttttgtttttaatcctagaagatccgttgctttgaacac

SEQ ID NO: 181 - protein, 229 aa, Arabidopsis thaliana
AQIRETKMEVKGKETASVLCLSKYVDLSSEESHRYYLARRNGLQMLRDRGYEVSDEDINLSLHDFRTVYGERPDVDRLRISALHRSDSTKKVKIVFFGTSMVKVNAIRSVVADILSQETITGLILVLQNHVTNQALKAIELFSFKVEIFQITDLLVNITKHSLKPQHQVLNDEEKTTLLKKFSIEEKQLPRISKKDAIVRYYGLEKGQVVKVNYRGELTESHVAFRCVW

SEQ ID NO: 182 - protein, 222 aa, Arabidopsis thaliana
MEVKGKETASVLCLSKYVDLSSEESHRYYLARRNGLQMLRDRGYEVSDEDINLSLHDFRTVYGERPDVDRLRISALHRSDSTKKVKIVFFGTSMVKVNAIRSVVADILSQETITGLILVLQNHVTNQALKAIELFSFKVEIFQITDLLVNITKHSLKPQHQVLNDEEKTTLLKKFSIEEKQLPRISKKDAIVRYYGLEKGQVVKVNYRGELTESHVAFRCVW

SEQ ID NO: 183 - protein, 185 aa, Arabidopsis thaliana
MLRDRGYEVSDEDINLSLHDFRTVYGERPDVDRLRISALHRSDSTKKVKIVFFGTSMVKVNAIRSVVADILSQETITGLILVLQNHVTNQALKAIELFSFKVEIFQITDLLVNITKHSLKPQHQVLNDEEKTTLLKKFSIEEKQLPRISKKDAIVRYYGLEKGQVVKVNYRGELTESHVAFRCVW

SEQ ID NO: 184 - DNA, 1362 bp, Arabidopsis thaliana
acaaattcaattccaattctcaaagtgctctctttttaaaccaatctgctctcttccacttactctctctatctctctcccatctcgtttcttttttggtcattaaaagagaaacctttgctctgaatcttgaaaatggattctttgatcaaactcttcttctgcctctttatcttcttatgtacttcgctcttatttggagaaatcaatggagtggagggttcaaatcaaaatcatcacttgtatccatttaggccaacgaagctctttgtgttcggagattcttatgccgataccggaaacattaaaaaggctttctctagctcttggaaattcccttacggtatcactttccccggaaaacccgctggccgtttctccgatggccgtgtggcaacagattttctagctaaatttgtggggataaaatcaccaatcccatacttttggaaagattacgcgggaaagaaacgattacagtacggaatgaattttgcgtacggaggaacaggagtgttcaacactcaaactccattgcctaacatgacaactcaaatcgacatcttccagaacattctcaccaccggcgacatctactatcctcccgagcttacttcatccgtggctctcgtcagtgtcgctggcaacgactactccaatttcatcgccctaaaccgccctgcctctgaattcccagcattcataaagcaagttgtggatcaaacagaggtgaatttgagacggatccacgctttgggagtgaaaaagattgcagtaccatccctgcaaccgcttggttgtctccctcccttcacattcgtaacctcgttccagcgttgcaacgagacacaaaacgctttagttaacctccacaacaacttattgcagcaagttgtggcaaagctcaataacgagactaaacagtcgactttcatcatccttgatctctacaatgctttcttgactgtgttcaagaacaaaggatctaatccagggagtacaaggtttgagagtccattaaagccgtgttgcgtaggtgtgagccgcgagtataactgtggaagtgtggatgagaagggagtgaagaagtatattgtatgtgataatcctaaaactgctttcttttgggatggacttcaccctacagaagaaggatggagatcggtttactctgttttacgcgaaagtcttaccgcgtctttgattaaagcgtgagaaacaaaagaaacacacattttgcttaggttttttcttatgaagctcaatgtttgagcgctctgttcctgttttcagtatctcttcattcatttgtgtttgtgtgtttaaagattgtgtgactaataaaatctcttaactggttcg

SEQ ID NO: 185 - protein, 359 aa, Arabidopsis thaliana
MDSLIKLFFCLFIFLCTSLLFGEINGVEGSNQNHHLYPFRPTKLFVFGDSYADTGNIKKAFSSSWKFPYGITFPGKPAGRFSDGRVATDFLAKFVGIKSPIPYFWKDYAGKKRLQYGMNFAYGGTGVFNTQTPLPNMTTQIDIFQNILTTGDIYYPPELTSSVALVSVAGNDYSNFIALNRPASEFPAFIKQVVDQTEVNLRRIHALGVKKIAVPSLQPLGCLPPFTFVTSFQRCNETQNALVNLHNNLLQQVVAKLNNETKQSTFIILDLYNAFLTVFKNKGSNPGSTRFESPLKPCCVGVSREYNCGSVDEKGVKKYIVCDNPKTAFFWDGLHPTEEGWRSVYSVLRESLTASLIKA

SEQ ID NO: 186 - protein, 242 aa, Arabidopsis thaliana
MNFAYGGTGVFNTQTPLPNMTTQIDIFQNILTTGDIYYPPELTSSVALVSVAGNDYSNFIALNRPASEFPAFIKQVVDQTEVNLRRIHALGVKKIAVPSLQPLGCLPPFTFVTSFQRCNETQNALVNLHNNLLQQVVAKLNNETKQSTFIILDLYNAFLTVFKNKGSNPGSTRFESPLKPCCVGVSREYNCGSVDEKGVKKYIVCDNPKTAFFWDGLHPTEEGWRSVYSVLRESLTASLIKA

SEQ ID NO: 187 - protein, 223 aa, Arabidopsis thaliana
MTTQIDIFQNILTTGDIYYPPELTSSVALVSVAGNDYSNFIALNRPASEFPAFIKQVVDQTEVNLRRIHALGVKKIAVPSLQPLGCLPPFTFVTSFQRCNETQNALVNLHNNLLQQVVAKLNNETKQSTFIILDLYNAFLTVFKNKGSNPGSTRFESPLKPCCVGVSREYNCGSVDEKGVKKYIVCDNPKTAFFWDGLHPTEEGWRSVYSVLRESLTASLIKA

SEQ ID NO: 188 - DNA, 1919 bp, Arabidopsis thaliana
aagaagaaacttcaagatacaaaattattgcaatcagtagatttggcgtggatgatgcatctgtcatcgcaatcttgtcttcttcttcattgacaagttccatgtgtattgtgtagctccaggtgttgttctctaatcggctttatctctatccaaccatcttcacgactgtggtctaattgatttgttagtgttcttctatttcctggttcagattcttcactgctgtgtatagttcttctcattcaattacttgggttgtggtttaaatcaccaatttggtcatcttcttgtgtttttttctatcgttgacttcgagctttacatagtgagatcgagatgtcaggtttctccagtggaaatgttaattctagggttgtggatatactcagtggtgttgtgcctttgttgaagcttatctgtttaaccgtgattggtctacttcttgctcatcccaagactcaattagtcccaagagccacgtttaggctcttaagcaagcttgtgtttgctttgttcttaccttgtttgattttcactgagcttggagaaagcattactcttgataacattgttcaatggtggtttataccggtcaacgtgttactcagtgcggtcgttgggtccttgataggatacttggtagtcctcatatgcagaccacctcctgagtttaatagattcaccattgttatgactgcttttggaaatactgggaatcttttgttagctattgttagctcggtgtgtcacacgaagacgaacccttttggaccgaattgtaactcgagaggggtttcgtatgtatcgtttgcgcaatgggttgctgtgattcttgtttatactgttgtgtatcatatgatggagccgcctttggagtactatgaggtcgttgaggaagaaggggttgagatagaggagatcaatgtggagaatcatgatgctagtaggcctcttctagtggaagctgagtggccagggattgaggacaaagagacagaacattgcaagacaccttttattgctagagtcttcaacagcatatctagtttctctcagacttcttttcctgaagttgatctcgggggagaatatggaggagagagttccagccctaggtctattcaatgcttggctgagcctagagtaatgaggagaataagagttgtggctgaacagactccagtcaaacacatacttcaacctccaacaatcgcatctctattagcgatcattatcggatcagtgcctcagctgaaaagtgttgtctttgggtatgatgctccgctttctttcatcacagatagtttgaatataatgggaagtgcaatggttccctctgtgatgcttgtacttggtggtatgctctctgaaggaccaaatgaatcaactcttgggttacgtactacgattggaataagtgttgcaagactcttggtgcttccgttagtgggaatagggattgtgatgtcagctgataaacttggtctcatttcctcagcagatccaatgttcaagtttgtgcttcttttgcagtattcgactccgagtgccattttacttggagccatcgcgagtctaagaggttacgctgttagagaagcctcggcacttctattctggcaacacatctttgcactgttgtctcttacgttctacattgtcatcttcttcaaactcaccgttgagactactgtccaaggtatgcaataaatctaaagttaaatgtcaactttgtttgtaaagaatgtgatgttatcaaatacattgaacttcaatggtgtgtgttggtgagtgttggtggagtattaccaattcaaagtttaagaagttttgtaccaaaagtggcatgaaccgtgcacttgcttgatcttatttcgtggcctaaatcatcttttaaatagagcatcatcgtattc

SEQ ID NO: 189 - protein, 457 aa, Arabidopsis thaliana
MSGFSSGNVNSRVVDILSGVVPLLKLICLTVIGLLLAHPKTQLVPRATFRLLSKLVFALFLPCLIFTELGESITLDNIVQWWFIPVNVLLSAVVGSLIGYLVVLICRPPPEFNRFTIVMTAFGNTGNLLLAIVSSVCHTKTNPFGPNCNSRGVSYVSFAQWVAVILVYTVVYHMMEPPLEYYEVVEEEGVEIEEINVENHDASRPLLVEAEWPGIEDKETEHCKTPFIARVFNSISSFSQTSFPEVDLGGEYGGESSSPRSIQCLAEPRVMRRIRVVAEQTPVKHILQPPTIASLLAIIIGSVPQLKSVVFGYDAPLSFITDSLNIMGSAMVPSVMLVLGGMLSEGPNESTLGLRTTIGISVARLLVLPLVGIGIVMSADKLGLISSADPMFKFVLLLQYSTPSAILLGAIASLRGYAVREASALLFWQHIFALLSLTFYIVIFFKLTVETTVQGMQ

SEQ ID NO: 190 - protein, 339 aa, Arabidopsis thaliana
MTAFGNTGNLLLAIVSSVCHTKTNPFGPNCNSRGVSYVSFAQWVAVILVYTVVYHMMEPPLEYYEVVEEEGVEIEEINVENHDASRPLLVEAEWPGIEDKETEHCKTPFIARVFNSISSFSQTSFPEVDLGGEYGGESSSPRSIQCLAEPRVMRRIRVVAEQTPVKHILQPPTIASLLAIIIGSVPQLKSVVFGYDAPLSFITDSLNIMGSAMVPSVMLVLGGMLSEGPNESTLGLRTTIGISVARLLVLPLVGIGIVMSADKLGLISSADPMFKFVLLLQYSTPSAILLGAIASLRGYAVREASALLFWQHIFALLSLTFYIVIFFKLTVETTVQGMQ

SEQ ID NO: 191 - protein, 284 aa, Arabidopsis thaliana
MMEPPLEYYEVVEEEGVEIEEINVENHDASRPLLVEAEWPGIEDKETEHCKTPFIARVFNSISSFSQTSFPEVDLGGEYGGESSSPRSIQCLAEPRVMRRIRVVAEQTPVKHILQPPTIASLLAIIIGSVPQLKSVVFGYDAPLSFITDSLNIMGSAMVPSVMLVLGGMLSEGPNESTLGLRTTIGISVARLLVLPLVGIGIVMSADKLGLISSADPMFKFVLLLQYSTPSAILLGAIASLRGYAVREASALLFWQHIFALLSLTFYIVIFFKLTVETTVQGMQ

SEQ ID NO: 192 - DNA, 1029 bp, Arabidopsis thaliana
aattaggttttcttctacacttgttcttcttcatttgctctcttcttcatcaatctctctctttttgtaaacggcgattttaaaatggttgatgcaaaacaagttcgtttcatcatcggagttatcggaaatgttatctcctttggtctctttgccgcaccagcgaagactttctggaggatcttcaagaagaaatcagtggaagagttttcgtatgtgccgtacgtagcaacggtgatgaattgtatgttgtgggtgttttacggtctccctgtggttcacaaagacagtattctagtttcaaccattaatggtgttgggttagttatcgaacttttctacgttggtgtctacttgatgtactgtggtcacaagaagaaccatcgaaggaacattttgggattcttagctcttgaagttattttggtggtggctatcattcttattacgctctttgcgcttaagggtgattttgttaagcaaacatttgttggtgtgatttgcgatgtcttcaacattgctatgtatggagctccttcattggccattattaaagtggtaaaaacaaagagtgttgaatacatgccattcttgttgtctttggtctgtttcgttaatgctggaatttggactacttactcgctcatcttcaagatcgattactacgtcctcgcaagtaatgggattggaacctttttggcactttctcagttgatagtgtacttcatgtactataagtcaactccaaaggagaagacggtgaagccatcagaagttgagatttctgctacggagagggtttaggagaattgtgctttggattctatcttcttacgtacattttacatacacaatttgtgtgtatgtttaggcttttgggtttttatgtttggtagaattttccaatcgtttagtttctggattttgaggattcgtcttggttcattttcttaatacattttttatggtgtgaaacgctttgacggaaatcatcaagttttggatttattctatttatgttttagatac

SEQ ID NO: 193 - protein, 239 aa, Arabidopsis thaliana
MVDAKQVRFIIGVIGNVISFGLFAAPAKTFWRIFKKKSVEEFSYVPYVATVMNCMLWVFYGLPVVHKDSILVSTINGVGLVIELFYVGVYLMYCGHKKNHRRNILGFLALEVILVVAIILITLFALKGDFVKQTFVGVICDVFNIAMYGAPSLAIIKVVKTKSVEYMPFLLSLVCFVNAGIWTTYSLIFKIDYYVLASNGIGTFLALSQLIVYFMYYKSTPKEKTVKPSEVEISATERV

SEQ ID NO: 194 - protein, 188 aa, Arabidopsis thaliana
MNCMLWVFYGLPVVHKDSILVSTINGVGLVIELFYVGVYLMYCGHKKNHRRNILGFLALEVILVVAIILITLFALKGDFVKQTFVGVICDVFNIAMYGAPSLAIIKVVKTKSVEYMPFLLSLVCFVNAGIWTTYSLIFKIDYYVLASNGIGTFLALSQLIVYFMYYKSTPKEKTVKPSEVEISATERV

SEQ ID NO: 195 - protein, 185 aa, Arabidopsis thaliana
MLWVFYGLPVVHKDSILVSTINGVGLVIELFYVGVYLMYCGHKKNHRRNILGFLALEVILVVAIILITLFALKGDFVKQTFVGVICDVFNIAMYGAPSLAIIKVVKTKSVEYMPFLLSLVCFVNAGIWTTYSLIFKIDYYVLASNGIGTFLALSQLIVYFMYYKSTPKEKTVKPSEVEISATERV

SEQ ID NO: 196 - DNA, 1292 bp, Arabidopsis thaliana
aaattacattgaaaccagaccttatcttctcagacttaaaacccgtctttgccggcgacacttctctactgaatatttcagtaaataatctcttcttagatctctccggcaatggcaattccgttgcctcttacctcttgctccccaatctcaacttcttcgtctatttcccgaacctccttcgtccctcttacacttcgcaatcgtactttcttctccaaccagaattacagtaggcgtgtacttatcagctgctcttcttctttgtcctcagacaatggttcatctccagactccatgaacggaaacgggaacgggaacgggagtagcttaaacgggcaatcatctttcccacgactgccttcctttgatggaacatccaaaccaccgcttaaatggagaagggttttactcaaagtcagtggagaagctcttgctggagacgaggagcaaaatatcgacccaaaggttactatggcgattgcaagggaagttgcagcagtgactcgacttggcattgaggttgctatagttgttggaggaggaaatatctttcgtggatctacctgggctgggtgcagtggccttgatcgctcctctgctgattatatcgggatgctggcaactgtgatgaatgcaatatttcttcaagcgacaatggagagtattggcatcccaacccgtgttcaaactgctttccgcatgtcggaagtcgcagagccttacataagaagacgagcaatcagacatctagaaaaaggaagggttgtaatatttgcagctggaacaggcaatccatttttcaccaccgatactgcagcggctcttcgatgtgctgaaattaatgcagaagtagtgctgaaagcaacaaatgttgatggcgtgttcgacgatgatcctaaaagaaacccaaacgctcgtctgcttgactcactaacttaccaagaggtcacctcaaaggacctctctgtaatggatatgactgctatcactttgtgccaagaaaataacatcccagttgtggtattcaatctttcggaacctgggaacatcgccaaagcaatcaaaggggagagagttggtacattgataggaggaacttggaactccattgttacaacaacctcatgaagaagcctattctcaaaacacaaaacttattagagtatcttaggtcaggagaatcttgtaactcctgtatatattagtttgcagacaagttttacattctaggaatctgtctgaaatttttgaaagttaatctttttatacatgaagctcattttaaacct

SEQ ID NO: 197 - protein, 339 aa, Arabidopsis thaliana
MAIPLPLTSCSPISTSSSISRTSFVPLTLRNRTFFSNQNYSRRVLISCSSSLSSDNGSSPDSMNGNGNGNGSSLNGQSSFPRLPSFDGTSKPPLKWRRVLLKVSGEALAGDEEQNIDPKVTMAIAREVAAVTRLGIEVAIVVGGGNIFRGSTWAGCSGLDRSSADYIGMLATVMNAIFLQATMESIGIPTRVQTAFRMSEVAEPYIRRRAIRHLEKGRVVIFAAGTGNPFFTTDTAAALRCAEINAEVVLKATNVDGVFDDDPKRNPNARLLDSLTYQEVTSKDLSVMDMTAITLCQENNIPVVVFNLSEPGNIAKAIKGERVGTLIGGTWNSIVTTTS

SEQ ID NO: 198 - protein, 277 aa, Arabidopsis thaliana
MNGNGNGNGSSLNGQSSFPRLPSFDGTSKPPLKWRRVLLKVSGEALAGDEEQNIDPKVTMAIAREVAAVTRLGIEVAIVVGGGNIFRGSTWAGCSGLDRSSADYIGMLATVMNAIFLQATMESIGIPTRVQTAFRMSEVAEPYIRRRAIRHLEKGRVVIFAAGTGNPFFTTDTAAALRCAEINAEVVLKATNVDGVFDDDPKRNPNARLLDSLTYQEVTSKDLSVMDMTAITLCQENNIPVVVFNLSEPGNIAKAIKGERVGTLIGGTWNSIVTTTS

SEQ ID NO: 199 - protein, 218 aa, Arabidopsis thaliana
MAIAREVAAVTRLGIEVAIVVGGGNIFRGSTWAGCSGLDRSSADYIGMLATVMNAIFLQATMESIGIPTRVQTAFRMSEVAEPYIRRRAIRHLEKGRVVIFAAGTGNPFFTTDTAAALRCAEINAEVVLKATNVDGVFDDDPKRNPNARLLDSLTYQEVTSKDLSVMDMTAITLCQENNIPVVVFNLSEPGNIAKAIKGERVGTLIGGTWNSIVTTTS

SEQ ID NO: 200 - DNA, 735 bp, Arabidopsis thaliana
atgatgtaccaaacttgttagtcaaacaaaaaaaaaaaatatccaagaagctttgaagaaccatggcgatgtctcatgtccagcctgtgcttttcttcctcgcatcactcttcttcttactggctttgtgcagcgccaacgattttgaatattgcaccaaaaatggacatgattatggtgtcgtctcttggatcgaggtctttcgggttgggcctcaggaaaacccaaccctcactataaatgtatttggtactgcgacgaaagaaatatccgcgggaacccttgtatatgtagcctatagatctggggattttacaggccttttaaaaacttacgacctatgtgatgtgagtttggcatgtaacattgattctgagattgaagctggcgacgtgtttgacttcagtcttaaagacgttctttatgttggttttgatgagggaatcaagtattccgtatctttgcgtcaaaaaaccgcagaggaggaggatccaataataaaaatgtgtatcgacttcaaagtacctgcctcagcttctgcatttgtctctatttagtcacgttggctgatgaaaagatgtttccaactctttcattatatgactctttctcgcttgcatttttccttttttatgtgttgtccaacaaataaatcaaatccttgaaccgatatcgctatagatattgctttgttgtaattttggcctgattaatatgaaccaacatgcctttccc

SEQ ID NO: 201 - protein, 164 aa, Arabidopsis thaliana
MAMSHVQPVLFFLASLFFLLALCSANDFEYCTKNGHDYGVVSWIEVFRVGPQENPTLTINVFGTATKEISAGTLVYVAYRSGDFTGLLKTYDLCDVSLACNIDSEIEAGDVFDFSLKDVLYVGFDEGIKYSVSLRQKTAEEEDPIIKMCIDFKVPASASAFVSI

SEQ ID NO: 202 - protein, 162 aa, Arabidopsis thaliana
MSHVQPVLFFLASLFFLLALCSANDFEYCTKNGHDYGVVSWIEVFRVGPQENPTLTINVFGTATKEISAGTLVYVAYRSGDFTGLLKTYDLCDVSLACNIDSEIEAGDVFDFSLKDVLYVGFDEGIKYSVSLRQKTAEEEDPIIKMCIDFKVPASASAFVSI

SEQ ID NO: 203 - DNA, 2292 bp, Arabidopsis thaliana
gtcaaggacgttttaagaatctggtggaattgatttgatagtagtatacaattgtgatgtatatatacatacaaatattaactgttcttggatttattgaaaggaaatgactttaaattacaagaagcgtgacccacacgttaagtcagtctttctttactaatattcttttcgattagtcaaataaacctcatgaacaagtcattggagcccacttaaactctacttttctattcttcttctttctttttgttattctatatattagttagcaacttccacgttgtagcgatggaaggatccaagctacttccttgcgtccataagtctccggttcccacctcccaccaattatatataaattatgagattttgggtttaacaaaactcaaaaaacacaaatacacccaaaacaagatgagctcctctgactcttcttccgccgaatcccgtctagccacggctaagacggttctcaccaccgcggcttcggtggctgcgaccgcaatgctagctcgatctttagtccaagattatttgcctgacgaggtgcatcactacatttcctatggattccgttccatctttggttacttctcatcccaaatgacgataatcatcgaagaatttgaaggttttgctcacaatgaagtctttgaagctgcagaggcctatctagccaccaagatctctccttctaacaaaagaatcaaagtgagtaaacatgagaaagaaaacaactacaatgtcaccgtggagcgtgacgaagaagttgttgacacctacaatggcgtcaaattccagtggatcctccattgtcgtcatgtcgagtccaagcacttccacaacccacgggatctaaactccacactgagatctgaggtccgatcattcgaactcaacttccacaagaaattcaaagacgtagctcttgaatcttacttgccattcatggtgaaaagagccacgttgatgaagcaagagaagaaaacactcaagatcttcactctctccccagaaaacatgtatgggaactactctgacgcgtggacctctgttactcttgaccatccttctaccttcaaaactctagcaatggattcagatgtcaagacaagtgtgatggaagatctagacaaattcgtaaagcgaagagacttctataaaagggttggtaaagcttggaagagaggttacttgctgtacggtccaccaggcacagggaagtcaagcttgatcgcagccatggccaatcatctcaactttgatatatacgacctagagttgaccgcggttaacaacaattctgagctccggcgattattgattgccactgctaatcgttcgattcttatcgtagaagatatcgattgttcactagaattgaaagataggactagcgatgaacctcctcgggaatctgacgatatagaagatccacggtataaaaaagtgacactctctggactgttgaatttcatagatggtctatggtcaagctgcggtgacgaaaggatcataatcttcacaaccaattacaaagagaaactcgacgcggccttgctgagaccaggacgtatggatatgcacatccacatgtcgtattgcacaccaagtactttcaaagctcttgctttgaactatcttgagatcaaagagcaccgccttttcagcaagatcgaggaaggtattgaggcgacagaggtcactccagcagaagtagctgaacagcttatgagaaatgactctgtagacaaggttcttgagggtttgattgagttcttgaaagtcaagaagatcgaaaacgaacaagataaggccaaaacagagaagcaagagttggagaacaagaaaaagaccaaggagggaacagattccgtagtcaagaaagaggttgatgaacagctagtgaggaatgaccgtgttgataaggttcttgagggtttggtcgagttgttaaaagccaagaagatcgaggacgaccaagataaagccaaacatgaggaggttgaacaacattaacttgtgagatatcaatacctaaatcattaaatcgccagttactgtctataatctacagattcatttataaacctagtcctaagataaaataatcttagagagattgagaccaaaaaagggaaaaaattgaggagatcagataaaacacctctgcatccgagtggtagctgtaaagagaagagcacgtgtatttatacaaaactatgcgtttagcttgttttttctctctgttttttttctaactttttttagcacaatttgttttaagct

SEQ ID NO: 204 - protein, 576 aa, Arabidopsis thaliana
MEGSKLLPCVHKSPVPTSHQLYINYEILGLTKLKKHKYTQNKMSSSDSSSAESRLATAKTVLTTAASVAATAMLARSLVQDYLPDEVHHYISYGFRSIFGYFSSQMTIIIEEFEGFAHNEVFEAAEAYLATKISPSNKRIKVSKHEKENNYNVTVERDEEVVDTYNGVKFQWILHCRHVESKHFHNPRDLNSTLRSEVRSFELNFHKKFKDVALESYLPFMVKRATLMKQEKKTLKIFTLSPENMYGNYSDAWTSVTLDHPSTFKTLAMDSDVKTSVMEDLDKFVKRRDFYKRVGKAWKRGYLLYGPPGTGKSSLIAAMANHLNFDIYDLELTAVNNNSELRRLLIATANRSILIVEDIDCSLELKDRTSDEPPRESDDIEDPRYKKVTLSGLLNFIDGLWSSCGDERIIIFTTNYKEKLDAALLRPGRMDMHIHMSYCTPSTFKALALNYLEIKEHRLFSKIEEGIEATEVTPAEVAEQLMRNDSVDKVLEGLIEFLKVKKIENEQDKAKTEKQELENKKKTKEGTDSVVKKEVDEQLVRNDRVDKVLEGLVELLKAKKIEDDQDKAKHEEVEQH

SEQ ID NO: 205 - protein, 534 aa, Arabidopsis thaliana
MSSSDSSSAESRLATAKTVLTTAASVAATAMLARSLVQDYLPDEVHHYISYGFRSIFGYFSSQMTIIIEEFEGFAHNEVFEAAEAYLATKISPSNKRIKVSKHEKENNYNVTVERDEEVVDTYNGVKFQWILHCRHVESKHFHNPRDLNSTLRSEVRSFELNFHKKFKDVALESYLPFMVKRATLMKQEKKTLKIFTLSPENMYGNYSDAWTSVTLDHPSTFKTLAMDSDVKTSVMEDLDKFVKRRDFYKRVGKAWKRGYLLYGPPGTGKSSLIAAMANHLNFDIYDLELTAVNNNSELRRLLIATANRSILIVEDIDCSLELKDRTSDEPPRESDDIEDPRYKKVTLSGLLNFIDGLWSSCGDERIIIFTTNYKEKLDAALLRPGRMDMHIHMSYCTPSTFKALALNYLEIKEHRLFSKIEEGIEATEVTPAEVAEQLMRNDSVDKVLEGLIEFLKVKKIENEQDKAKTEKQELENKKKTKEGTDSVVKKEVDEQLVRNDRVDKVLEGLVELLKAKKIEDDQDKAKHEEVEQH

SEQ ID NO: 206 - protein, 504 aa, Arabidopsis thaliana
MLARSLVQDYLPDEVHHYISYGFRSIFGYFSSQMTIIIEEFEGFAHNEVFEAAEAYLATKISPSNKRIKVSKHEKENNYNVTVERDEEVVDTYNGVKFQWILHCRHVESKHFHNPRDLNSTLRSEVRSFELNFHKKFKDVALESYLPFMVKRATLMKQEKKTLKIFTLSPENMYGNYSDAWTSVTLDHPSTFKTLAMDSDVKTSVMEDLDKFVKRRDFYKRVGKAWKRGYLLYGPPGTGKSSLIAAMANHLNFDIYDLELTAVNNNSELRRLLIATANRSILIVEDIDCSLELKDRTSDEPPRESDDIEDPRYKKVTLSGLLNFIDGLWSSCGDERIIIFTTNYKEKLDAALLRPGRMDMHIHMSYCTPSTFKALALNYLEIKEHRLFSKIEEGIEATEVTPAEVAEQLMRNDSVDKVLEGLIEFLKVKKIENEQDKAKTEKQELENKKKTKEGTDSVVKKEVDEQLVRNDRVDKVLEGLVELLKAKKIEDDQDKAKHEEVEQH

SEQ ID NO: 207 - DNA, 1194 bp, Arabidopsis thaliana
attcgtaaccccgtgcaaaaaaaactgaaaaccccaaatccaacctctctcactcaaaaaccatgtcttggctcttcaaatctcgcggcgatgacgatcacgatcccgatcccgatccttccacaactcatggcggtgtcaaagaagatttatcttccttactccgtggcgtcgcagctttcctggcaccgcctccttctccacctgtaaacgaacgccgactctcctctgataattcaccaactcagctaggtcttctcgggatccgcaacgatctagccgagattcgtggaaatttctccaatttcgcatctaatttactccaatttcctagtaatctaagagatagagaaagtagtagaagatctccgttgaacgatcaagttcctggaatctctgaagaagtagtcgatttcgctgttaaaatctcgacgaaacctggttgttggacagattttccattgtcactcgatactgaatttgaactgtctgaggctcaaagggcacatgcatcagccattgaagatttggttcctggccttgtagctgtgaagaatcaagttagtagttacatggatgatgaacacttctggctgatttattttattttgctgatgccgagactgaatgggcatgattttgaactcttagcaacatgcaaggtatttgaaacaagggatcaacttttactaaagctgcaaaagaaagagacagggtcaagcaagagcactactggtcacgaaactcctgaagaaggtagcagtagggaaacagaaaccgttgagggagtcattgacaagatagagactctaaaaattgagcaaagggagataagtgatgagtcatctgaagaacaacggaggagtttcagagatgaagaggtaatctcctttagtgatttagatgtcgatgatctctcggagaagccaagtcccaacaggagtacactgaaaagaccagcatcaaacgcaagcgggtcaagctgggttcagctcagcaagagccaagttggacatagcaaggattcggaaggtgattccagtgactggcttccaattggcgattctgattaacgtttaaaggtatgaaattgaatattactgtaaagtgaagtgttagcaatgacttttaaatgaaaccatgcacatttttattaataaaaatcttactgtgtagtaatggagtcgctacttg

SEQ ID NO: 208 - protein, 336 aa, Arabidopsis thaliana
MSWLFKSRGDDDHDPDPDPSTTHGGVKEDLSSLLRGVAAFLAPPPSPPVNERRLSSDNSPTQLGLLGIRNDLAEIRGNFSNFASNLLQFPSNLRDRESSRRSPLNDQVPGISEEVVDFAVKISTKPGCWTDFPLSLDTEFELSEAQRAHASAIEDLVPGLVAVKNQVSSYMDDEHFWLIYFILLMPRLNGHDFELLATCKVFETRDQLLLKLQKKETGSSKSTTGHETPEEGSSRETETVEGVIDKIETLKIEQREISDESSEEQRRSFRDEEVISFSDLDVDDLSEKPSPNRSTLKRPASNASGSSWVQLSKSQVGHSKDSEGDSSDWLPIGDSD

SEQ ID NO: 209 - DNA, 1535 bp, Arabidopsis thaliana
ccggctttgcaaagttgcaacctttttgggtttagtacttgaagagaatcaatctgacagcaaatagttttggcgtctttctaactcaacccatcatctctgttgcattttatcgagagaatatttgaggtggatatggcctcgacccttttctccagaactttcttggctgctagtcaccgactgattactccttctcttccgcaaaagatctttaatccagccacctttctcagtaggtcactccactctcagttaggctccgcttctacagcctataaatcaactacttgggctcgtcgagctatggcttctactggagttgagacaaaagccggttactccacatcatccgtatcaaccagtgaacctgttgtttctgttgattggcttcatgctaatcttagagagcctgatttgaagattttggatgcttcatggtatatgccggatgagcagagaaatccgatccaagaatatcaggttgctcatattccccgcgctctcttctttgatttggatggaatatcagatcgaaaaactagtttgccacatatgttgcccactgaggaagcttttgctgctggttgttctgctcttggaattgataacaaagatgaagtggttgtctatgatggaaaggggatctttagtgcagcccgtgtatggtggatgttccgagtttttggacatgaaaaagtttgggtgctcgatggaggtctaccaagatggcgtgcatcaggttatgatgttgaatctagtgcatcaggtgatgctattctgaaagccagtgccgcaagtgaggctatagagaaaatttatcaaggacaaaccgtcagtccgataacctttcagactaagttccagccacatctagtgtggacacttgatcaggtcaagaacaatatggaggatccgacttatcaacacatagacgctcgttccaaagccaggtttgatggtactgctccagaaccccgtaagggaataagaagcggtcatatacctggaagcaaatgtatcccttttcctcagatgtttgattcttgtaacacattgttaccagcagaggagctgaagaaacgatttgaccaagaagatatctcactggacaagcctattatggcctcgtgtgggactggtgtaacagcttgcatcttggcaatggggcttcaccggctggggaaaaccgacgtgccgatctatgatgggtcgtggactgaatgggcgacacaaccagacttgcccatagagagtgttgaatcttcttcatgaaagtctccaccgtaaaggctagcgacaagattacaagccacagacggaaataattatcatgtttaagttgagggatttgtttgaagttaatcataatcctggctttaaatttgcctcaaccctcaagccgaagaggactgtatctatagaacttggaacttttccttttcgtttctggattcatcttctcagataacaaaaggttgttttctgtgttttctttctaataaaatcaagaaccaggaaatttctcaacgatc

SEQ ID NO: 210 - protein, 379 aa, Arabidopsis thaliana
MASTLFSRTFLAASHRLITPSLPQKIFNPATFLSRSLHSQLGSASTAYKSTTWARRAMASTGVETKAGYSTSSVSTSEPVVSVDWLHANLREPDLKILDASWYMPDEQRNPIQEYQVAHIPRALFFDLDGISDRKTSLPHMLPTEEAFAAGCSALGIDNKDEVVVYDGKGIFSAARVWWMFRVFGHEKVWVLDGGLPRWRASGYDVESSASGDAILKASAASEAIEKIYQGQTVSPITFQTKFQPHLVWTLDQVKNNMEDPTYQHIDARSKARFDGTAPEPRKGIRSGHIPGSKCIPFPQMFDSCNTLLPAEELKKRFDQEDISLDKPIMASCGTGVTACILAMGLHRLGKTDVPIYDGSWTEWATQPDLPIESVESSS

SEQ ID NO: 211 - protein, 322 aa, Arabidopsis thaliana
MASTGVETKAGYSTSSVSTSEPVVSVDWLHANLREPDLKILDASWYMPDEQRNPIQEYQVAHIPRALFFDLDGISDRKTSLPHMLPTEEAFAAGCSALGIDNKDEVVVYDGKGIFSAARVWWMFRVFGHEKVWVLDGGLPRWRASGYDVESSASGDAILKASAASEAIEKIYQGQTVSPITFQTKFQPHLVWTLDQVKNNMEDPTYQHIDARSKARFDGTAPEPRKGIRSGHIPGSKCIPFPQMFDSCNTLLPAEELKKRFDQEDISLDKPIMASCGTGVTACILAMGLHRLGKTDVPIYDGSWTEWATQPDLPIESVESSS

SEQ ID NO: 212 - protein, 276 aa, Arabidopsis thaliana
MPDEQRNPIQEYQVAHIPRALFFDLDGISDRKTSLPHMLPTEEAFAAGCSALGIDNKDEVVVYDGKGIFSAARVWWMFRVFGHEKVWVLDGGLPRWRASGYDVESSASGDAILKASAASEAIEKIYQGQTVSPITFQTKFQPHLVWTLDQVKNNMEDPTYQHIDARSKARFDGTAPEPRKGIRSGHIPGSKCIPFPQMFDSCNTLLPAEELKKRFDQEDISLDKPIMASCGTGVTACILAMGLHRLGKTDVPIYDGSWTEWATQPDLPIESVESSS

SEQ ID NO: 213 - DNA, 748 bp, Arabidopsis thaliana
agcattttcaacatttctattaatatttccatagactagatctctctttcttatacatccatatcaccgatgatgcctcgccgtgacgtcctcttcctctcactcctcctcgtcatcgccaccgtctccgctgtcgcattagccgacgatgaagcagattgtgtctacacattcttccttagaaccggatcaaccttcaaagccggtacagattcgatcataagcgctagagtctacgacaaatacggagactacatcgggatccgaaacctagaagcatggggtggtttaatgggaccaggttacaactactacgagaggggtaatctcgacattttcagtgggaaagcaccatgtcttccgagcccagtctgttcattaaatctgacctctgacggctccggtgaccaccacggttggtatgttaactacgtggaagtcacgacagccggagttcatgcaaagtgctcgtaccaaagctttgatgttgagcaatggcttgcgtccgatacatcgccgtatgagctcagtgctgttcggaataactgtccagtttcgcttagggaaagtgtcggtcgggtcgggtctgagatccggaagactctctcttggatcgtgtgagagtagtgaatgaaatgtcaaatgtgtatgtgtgtgtgtaacttggagagttgttctttgttgtcttgtgaacgtgtgatggcaataatgaaaatgattcgatcgaataaaagttccgttctttgtt

SEQ ID NO: 214 - protein, 183 aa, Arabidopsis thaliana
MMPRRDVLFLSLLLVIATVSAVALADDEADCVYTFFLRTGSTFKAGTDSIISARVYDKYGDYIGIRNLEAWGGLMGPGYNYYERGNLDIFSGKAPCLPSPVCSLNLTSDGSGDHHGWYVNYVEVTTAGVHAKCSYQSFDVEQWLASDTSPYELSAVRNNCPVSLRESVGRVGSEIRKTLSWIV

SEQ ID NO: 215 - protein, 182 aa, Arabidopsis thaliana
MPRRDVLFLSLLLVIATVSAVALADDEADCVYTFFLRTGSTFKAGTDSIISARVYDKYGDYIGIRNLEAWGGLMGPGYNYYERGNLDIFSGKAPCLPSPVCSLNLTSDGSGDHHGWYVNYVEVTTAGVHAKCSYQSFDVEQWLASDTSPYELSAVRNNCPVSLRESVGRVGSEIRKTLSWIV

SEQ ID NO: 216 - protein, 109 aa, Arabidopsis thaliana
MGPGYNYYERGNLDIFSGKAPCLPSPVCSLNLTSDGSGDHHGWYVNYVEVTTAGVHAKCSYQSFDVEQWLASDTSPYELSAVRNNCPVSLRESVGRVGSEIRKTLSWIV

SEQ ID NO: 217 - DNA, 509 bp, Arabidopsis thaliana
ctcttcttcttcatcagctcctctatctctctctttcctgattgtcttcatcaaaaactggaaaaagcaaatcaagaaaagagaagaagaagcagatgtgtccgttaaggcttatcctcatattcctttcagcgactctcgctggcttcttcgtcctccagaagctcaactctacctctgacgatcctctcgatgattccttcaccgacgctgaacacgccgacgacgattcagtctctggattctccaaggtgggaatggcaatgaagtctggattttggacatgcgttgacatggcaagtggtcgctatctctggaacaatctctgttcaaatgccaaacgctcttcttgagttttgttactctctatctgtctctctattgtctgtaactgtttaattgaactgcaatcgacggcaccaaatttacatattgtctctgtactatatactatagatcttgtcttcactactaaatctcaataaagtcgaagcctttatcccagtttc

SEQ ID NO: 218 - protein, 85 aa, Arabidopsis thaliana
MCPLRLILIFLSATLAGFFVLQKLNSTSDDPLDDSFTDAEHADDDSVSGFSKVGMAMKSGFWTCVDMASGRYLWNNLCSNAKRSS

SEQ ID NO: 219 - protein, 59 aa, Arabidopsis thaliana
SSSSSAPLSLSFLIVFIKNWKKQIKKREEEADVSVKAYPHIPFSDSRWLLRPPEAQLYL

SEQ ID NO: 220 - DNA, 886 bp, Arabidopsis thaliana
aaccgattccgatttcgagttcgtcgccgggaggaatgaaccggttgaaggagcaaaaggggccgaagttcgacggcgaagaatcacctccacctgattttgatgaagatcgaagtgtgggtgaggtagacggaggagatcacacgccattcgctggaggtaaagtcagaaggaaagcgtctcgctatagagagcatcgtggtgactatcttcacgtttcttctcgtcctggattgatgcgaattctggagaaacaaggtgatacatcgattctttttgctgataaagttttgaagttcaccggctcggggaagatgaaacggcgtatttttatcctcactgattttgcgatctatctaattgatcccgagactgaagctatgaccaggagaattgctttgtcatcagtagagaagatgtgtttaagcaaattgagtgataacttcttcgctatcattattcccacggaatatgatctcttcatggccagcactaggaagactgagcttgttcaggtcatggtagatgtcactaaaagtgcttctgactatgaacttgaagtgcttctctctaacagatttgagtacaatgcatctgcctcattagtaaaggaagtttcttttgaggaatctgaagggggtatcaagaccaaatttgtgtggaagtgactacatctcaactttcctcgctgttcataaactttggagggaccactagtaagatctgtttcgactttcgaatgtcttttctgttggttactaatagctgaaatcatggtggtatgtgttgtttattatattctgtttcgactttcgaaaatgtgaatggattctttcatgtaacacaagaccagtagtgtcaatataagaaacaaatggttacaagg

SEQ ID NO: 221 - protein, 221 aa, Arabidopsis thaliana
PIPISSSSPGGMNRLKEQKGPKFDGEESPPPDFDEDRSVGEVDGGDHTPFAGGKVRRKASRYREHRGDYLHVSSRPGLMRILEKQGDTSILFADKVLKFTGSGKMKRRIFILTDFAIYLIDPETEAMTRRIALSSVEKMCLSKLSDNFFAIIIPTEYDLFMASTRKTELVQVMVDVTKSASDYELEVLLSNRFEYNASASLVKEVSFEESEGGIKTKFVWK

SEQ ID NO: 222 - protein, 210 aa, Arabidopsis thaliana
MNRLKEQKGPKFDGEESPPPDFDEDRSVGEVDGGDHTPFAGGKVRRKASRYREHRGDYLHVSSRPGLMRILEKQGDTSILFADKVLKFTGSGKMKRRIFILTDFAIYLIDPETEAMTRRIALSSVEKMCLSKLSDNFFAIIIPTEYDLFMASTRKTELVQVMVDVTKSASDYELEVLLSNRFEYNASASLVKEVSFEESEGGIKTKFVWK

SEQ ID NO: 223 - protein, 143 aa, Arabidopsis thaliana
MRILEKQGDTSILFADKVLKFTGSGKMKRRIFILTDFAIYLIDPETEAMTRRIALSSVEKMCLSKLSDNFFAIIIPTEYDLFMASTRKTELVQVMVDVTKSASDYELEVLLSNRFEYNASASLVKEVSFEESEGGIKTKFVWK

SEQ ID NO: 224 - DNA, 1466 bp, Arabidopsis thaliana
ataaaaaataaaaaatactgtaaaataaatagatagtcataactagtgtattacaaaaaaaaaataaagtaaataaaagtaatcactagctagtgactaaactaaatcccaattatgggtcgtgtacattttggtgtatcagcattctttgttttttgtttgttaggtttatcagctaatgcaaagatcttcaatattaattctcctccaggttctgatatcactaacgcattgttgaaagcattcaatgaggcatgccaattcccgacaaagagcaccgttatgatcccaaaaggtgaatacaagcttggggagatcgtgatgatgggtccatgcaaagctcctataaggattgctcttctaggtaccgtgaaagctgacggtaacgctaatggaaaggagaaatgggtcgctttccgcaacattaatgggtttaagttgaacggaggtggtgttttcgacggtgaaggaaacgcagcttggagggtcaacaactgccacaagactttcaactgcaagaagctccccatcagcattaggtttgatttcgtcaccgacgcgaaaattagaggcattacctccttagatgcaaagcacttccacattaacgtcattggagcaaagaacgtgacattcgaagacgtcaagatcattgcccctgcagagagtcccaacaccgatggtatccacgttggaagaagtgacggaatcaagatcatcaattcatttatctccacaggagatgactgtgtctctgttggagatgggatgaagaaccttcttgtcgaaagagttacatgcggtccgggacatggaatcagtattggaagtcttggaaggtacagccacgaggaaaacgttagtggcatcaagatcatcaactgcactctccaagagactgacaatggtctaaggatcaagacatggccttctgctgcttgtaccacaaccgcctccgatatccatttcgagaacatcctcctcaagaacgtcagcaaccccatcctcatcgaccaagagtactgcccatggaaccaatgcaacaagcagaaaccatcaacgatcaagttggccaacattagcttcaagaagatcagaggaacatcaggaaacaaagacgcagtgaagcttttgtgtagcaagggatatccatgtcagaacgttgaggttggtgacgtgaacatccagtataccggagcagatggtccagcgactttccaatgctctaacgtatcaccaaagcttgtgggaactcagattccaaaagcgtgtagcagcccggtgacaaagccaccaaagtagaatgtgtatatattataaactcaatacacaatctaaatgtacacccttagtgtatgctgtatgcttcaattgatatctttgtgaaatgacctattttttgagcttttggtatattgtaagaaatgaaccattcttgaaaaaaaaaaacatctaactaatttaat

SEQ ID NO: 225 - protein, 395 aa, Arabidopsis thaliana
MGRVHFGVSAFFVFCLLGLSANAKIFNINSPPGSDITNALLKAFNEACQFPTKSTVMIPKGEYKLGEIVMMGPCKAPIRIALLGTVKADGNANGKEKWVAFRNINGFKLNGGGVFDGEGNAAWRVNNCHKTFNCKKLPISIRFDFVTDAKIRGITSLDAKHFHINVIGAKNVTFEDVKIIAPAESPNTDGIHVGRSDGIKIINSFISTGDDCVSVGDGMKNLLVERVTCGPGHGISIGSLGRYSHEENVSGIKIINCTLQETDNGLRIKTWPSAACTTTASDIHFENILLKNVSNPILIDQEYCPWNQCNKQKPSTIKLANISFKKIRGTSGNKDAVKLLCSKGYPCQNVEVGDVNIQYTGADGPATFQCSNVSPKLVGTQIPKACSSPVTKPPK

SEQ ID NO: 226 - protein, 339 aa, Arabidopsis thaliana
MIPKGEYKLGEIVMMGPCKAPIRIALLGTVKADGNANGKEKWVAFRNINGFKLNGGGVFDGEGNAAWRVNNCHKTFNCKKLPISIRFDFVTDAKIRGITSLDAKHFHINVIGAKNVTFEDVKIIAPAESPNTDGIHVGRSDGIKIINSFISTGDDCVSVGDGMKNLLVERVTCGPGHGISIGSLGRYSHEENVSGIKIINCTLQETDNGLRIKTWPSAACTTTASDIHFENILLKNVSNPILIDQEYCPWNQCNKQKPSTIKLANISFKKIRGTSGNKDAVKLLCSKGYPCQNVEVGDVNIQYTGADGPATFQCSNVSPKLVGTQIPKACSSPVTKPPK

SEQ ID NO: 227 - protein, 326 aa, Arabidopsis thaliana
MMGPCKAPIRIALLGTVKADGNANGKEKWVAFRNINGFKLNGGGVFDGEGNAAWRVNNCHKTFNCKKLPISIRFDFVTDAKIRGITSLDAKHFHINVIGAKNVTFEDVKIIAPAESPNTDGIHVGRSDGIKIINSFISTGDDCVSVGDGMKNLLVERVTCGPGHGISIGSLGRYSHEENVSGIKIINCTLQETDNGLRIKTWPSAACTTTASDIHFENILLKNVSNPILIDQEYCPWNQCNKQKPSTIKLANISFKKIRGTSGNKDAVKLLCSKGYPCQNVEVGDVNIQYTGADGPATFQCSNVSPKLVGTQIPKACSSPVTKPPK

SEQ ID NO: 228 - DNA, 1466 bp, Arabidopsis thaliana
aagatttttaagaatgttgtagtagcttcgcgaataatctcaggtcttctataaaaccaaactagcgattagtcgactcttcctctttattattacaaagacgaaaaggcttcgagttttgtaatttcttcttctgttacaagttcttttcactgtgaaagtaattcttcaatggcgaaagacggacctaattgggatggtttgcttaagtggagtctctctcacgccgacggtactcgacccactcgccagttgagtgaggaggatcgaaaatggtttatggaggctatgcaatcgcagactgtagatgtagtcaaacgcatgaaggagattacactagttatgcaaacacctgaacaagttttggtggaacatggagtaacacctgaagatatccaagatttgctggatgagctgcaagagcacgttgaatcgatcgatatggctaacgatcttcattcaattggaggcttggttcctcttcttagtttccttaaaaactctcatgctaatattcgggcaaaagctgcggatgtagttagcacaatagttcagaacaatcctagaagtcaggaacttgttatggaaaccaatgctctggagtcattgctctcgaatttcacttcagacactgatattcacgctcgaacccaggctcttggcgcaatatcatctttgattcgccataacaaaccaggagtaacggctttcaagcttgccaatggttatgctggcctaagagacgccttggcatctgatagtgtgagatttcaaaggaaagccttaaacttgttgcaatatctactgcaagaggatgattcagaccgcagtattgccactggacttggattcccccgagtgatgatgcatcttgcctctagtgacgatgctgagatcagagaagccgctcttcgtggattacttgagctttcaagagagaaaaacgatggaagtagcagcatagataaaagcgatgagaaactgaggcagctactagaagaacggatcaaaggaatcaccttgatgtcacaagaggatcttgaaacggttaaagaagagagacagctcgtggatttactgtggagcatttgctacaatgaaccttcttctctgagagaaaaaggacttgtcgttcttcccggtgaagacgcattgcctcctgatgtcgctagcaagctctttgagcctcctcttagagcttctgcagcaaaccgtaatgctactgagaagaaagatgaacctatgaaactacttggaccatagacgagaaatcaaagctaaaactttttattacttttccttgttttttatgttttgtaacttttcaaattgtcagaaaagtttcatagatatatgtattatgtcaatgatcaagggctatgttatgttaatttttgttttcatcattcgagatctttagtcttgttattgttgagattaagaatattcagcttcaatgcttttcc

SEQ ID NO: 229 - protein, 363 aa, Arabidopsis thaliana
MAKDGPNWDGLLKWSLSHADGTRPTRQLSEEDRKWFMEAMQSQTVDVVKRMKEITLVMQTPEQVLVEHGVTPEDIQDLLDELQEHVESIDMANDLHSIGGLVPLLSFLKNSHANIRAKAADVVSTIVQNNPRSQELVMETNALESLLSNFTSDTDIHARTQALGAISSLIRHNKPGVTAFKLANGYAGLRDALASDSVRFQRKALNLLQYLLQEDDSDRSIATGLGFPRVMMHLASSDDAEIREAALRGLLELSREKNDGSSSIDKSDEKLRQLLEERIKGITLMSQEDLETVKEERQLVDLLWSICYNEPSSLREKGLVVLPGEDALPPDVASKLFEPPLRASAANRNATEKKDEPMKLLGP

SEQ ID NO: 230 - protein, 327 aa, Arabidopsis thaliana
MEAMQSQTVDVVKRMKEITLVMQTPEQVLVEHGVTPEDIQDLLDELQEHVESIDMANDLHSIGGLVPLLSFLKNSHANIRAKAADVVSTIVQNNPRSQELVMETNALESLLSNFTSDTDIHARTQALGAISSLIRHNKPGVTAFKLANGYAGLRDALASDSVRFQRKALNLLQYLLQEDDSDRSIATGLGFPRVMMHLASSDDAEIREAALRGLLELSREKNDGSSSIDKSDEKLRQLLEERIKGITLMSQEDLETVKEERQLVDLLWSICYNEPSSLREKGLVVLPGEDALPPDVASKLFEPPLRASAANRNATEKKDEPMKLLGP

SEQ ID NO: 231 - protein, 324 aa, Arabidopsis thaliana
MQSQTVDVVKRMKEITLVMQTPEQVLVEHGVTPEDIQDLLDELQEHVESIDMANDLHSIGGLVPLLSFLKNSHANIRAKAADVVSTIVQNNPRSQELVMETNALESLLSNFTSDTDIHARTQALGAISSLIRHNKPGVTAFKLANGYAGLRDALASDSVRFQRKALNLLQYLLQEDDSDRSIATGLGFPRVMMHLASSDDAEIREAALRGLLELSREKNDGSSSIDKSDEKLRQLLEERIKGITLMSQEDLETVKEERQLVDLLWSICYNEPSSLREKGLVVLPGEDALPPDVASKLFEPPLRASAANRNATEKKDEPMKLLGP

SEQ ID NO: 232 - DNA, 1155 bp, Arabidopsis thaliana
gtgcaaccatctctctaaagcttcttctctcataacaatggcaagacaaatcaacatagagagtagtgtttctcaagttacctttatctcctccgccatccccgccgtatcttcctcctcctccatcaccgcttccgcctcattgtcctcttcacctactacatcttcctcttcttcgtcatcaacaaattctaacttcattgaggaagacaactctaaaagaaaagcatctcgaagatcattgtcatcgttagtctccgttgaagacgatgatgatcaaaacggtggaggtgggaaacggcgaaagaccaacggtggagataaacatccgacgtatagaggagtgaggatgaggagttggggaaaatgggtgtcggagattagagagccgagaaagaaatcaagaatctggctcgggacttatccaacggctgagatggcagctcgagctcatgacgtagcggctttagccattaaaggtacaacggcttacctcaattttcccaagttagccggcgagcttcctcgtccagtcacaaattctcctaaagacattcaagccgccgcctctttagcggccgttaactggcaagattcggtcaacgatgtgagtaattctgaagtggctgaaatagttgaagccgagccgagtcgagccgtggtggctcagttgttttcttcggacacaagcacgacgacgacgactcagagtcaagagtattcggaagcttcgtgtgcttcgacttcggcgtgtacggacaaagacagtgaggaagagaagctgtttgatttgccggatttgtttaccgatgagaatgagatgatgatacgaaacgatgcgttttgctactactcgtccacgtggcagctttgtggagccgatgctgggtttcggcttgaagagccgttttttctatctgaatgactaaagtacccctctcgagagagctctcactaacactttattagtttgccatttacttcttcttcattttctctatttacgtttgatatttttttttctttccaacttgagtgatattgattttttgtaaagaaacaatttcttttttttttcctagcaaaatcgtgtttgtgtaatataaatgtggtgataacatgttgaaatattgcagaataatataatgtagcctt

SEQ ID NO: 233 - protein, 307 aa, Arabidopsis thaliana
CNHLSKASSLITMARQINIESSVSQVTFISSAIPAVSSSSSITASASLSSSPTTSSSSSSSTNSNFIEEDNSKRKASRRSLSSLVSVEDDDDQNGGGGKRRKTNGGDKHPTYRGVRMRSWGKWVSEIREPRKKSRIWLGTYPTAEMAARAHDVAALAIKGTTAYLNFPKLAGELPRPVTNSPKDIQAAASLAAVNWQDSVNDVSNSEVAEIVEAEPSRAVVAQLFSSDTSTTTTTQSQEYSEASCASTSACTDKDSEEEKLFDLPDLFTDENEMMIRNDAFCYYSSTWQLCGADAGFRLEEPFFLSE

SEQ ID NO: 234 - protein, 295 aa, Arabidopsis thaliana
MARQINIESSVSQVTFISSAIPAVSSSSSITASASLSSSPTTSSSSSSSTNSNFIEEDNSKRKASRRSLSSLVSVEDDDDQNGGGGKRRKTNGGDKHPTYRGVRMRSWGKWVSEIREPRKKSRIWLGTYPTAEMAARAHDVAALAIKGTTAYLNFPKLAGELPRPVTNSPKDIQAAASLAAVNWQDSVNDVSNSEVAEIVEAEPSRAVVAQLFSSDTSTTTTTQSQEYSEASCASTSACTDKDSEEEKLFDLPDLFTDENEMMIRNDAFCYYSSTWQLCGADAGFRLEEPFFLSE

SEQ ID NO: 235 - protein, 191 aa, Arabidopsis thaliana
MRSWGKWVSEIREPRKKSRIWLGTYPTAEMAARAHDVAALAIKGTTAYLNFPKLAGELPRPVTNSPKDIQAAASLAAVNWQDSVNDVSNSEVAEIVEAEPSRAVVAQLFSSDTSTTTTTQSQEYSEASCASTSACTDKDSEEEKLFDLPDLFTDENEMMIRNDAFCYYSSTWQLCGADAGFRLEEPFFLSE

SEQ ID NO: 236 - DNA, 1156 bp, Arabidopsis thaliana
ggagaccaagagtgcgaagtagctctctgtctttcgaagcagaagtgagactttgacgacaacagtgggaggaactatgagttcttgtgttgtgacgacaagctgtttctatacaatttcagattctagtatacgtttgaaatcccccaagctcctcaatctgagtaaccagcagagaagacgctctcttaggtctcgaggtggtttaaaggttgaagcttactacggtctaaagacacctccttatccacttgatgctttggagccgtatatgagtagaagaacactagaagtgcattggggaaaacaccatcgaggttatgtagataatctgaataaacagttagggaaagatgatagactctatggatacaccatggaagagcttatcaaggctacatacaacaacgggaatcctttacccgagttcaacaacgctgcacaggtctataaccatgatttcttctgggagtcgatgcaacctggtggtggagacacgcctcaaaagggtgttcttgagcagattgataaggattttggttctttcacaaattttagagaaaagttcactaatgcagctcttactcagtttggttctggatgggtctggcttgtcttaaagagggaagagagaaggcttgaggtggtcaaaacctcaaacgccattaacccactcgtgtgggacgatattccaatcatctgcgtggatgtgtgggagcactcttattatctggactacaagaacgacagggctaagtatataaacacatttctgaaccacttggtgtcgtggaacgctgccatgagtcggatggcccgtgcagaagcgtttgtgaatcttggtgaacccaacatcccaatcgcttaagctaaacacaactccttggaaacttgggcagtctcatttttgcaaacagaggtctcaagtcccaagtcccaaccaacaaaacaagagttgctttctgaatgtgacccatctttttgttctgtgtaatttagcgacagttttctcttcttttgccttttgagagactctctagctttaagatcatcagtgagccctgtatggtgacagtaatgttagtgacgcaattaacccttattaagttataataaaacgaaggctggctcacgtgacccgcacgtgactgagagt

SEQ ID NO: 237 - protein, 263 aa, Arabidopsis thaliana
MSSCVVTTSCFYTISDSSIRLKSPKLLNLSNQQRRRSLRSRGGLKVEAYYGLKTPPYPLDALEPYMSRRTLEVHWGKHHRGYVDNLNKQLGKDDRLYGYTMEELIKATYNNGNPLPEFNNAAQVYNHDFFWESMQPGGGDTPQKGVLEQIDKDFGSFTNFREKFTNAALTQFGSGWVWLVLKREERRLEVVKTSNAINPLVWDDIPIICVDVWEHSYYLDYKNDRAKYINTFLNHLVSWNAAMSRMARAEAFVNLGEPNIPIA

SEQ ID NO: 238 - protein, 198 aa, Arabidopsis thaliana
MSRRTLEVHWGKHHRGYVDNLNKQLGKDDRLYGYTMEELIKATYNNGNPLPEFNNAAQVYNHDFFWESMQPGGGDTPQKGVLEQIDKDFGSFTNFREKFTNAALTQFGSGWVWLVLKREERRLEVVKTSNAINPLVWDDIPIICVDVWEHSYYLDYKNDRAKYINTFLNHLVSWNAAMSRMARAEAFVNLGEPNIPIA

SEQ ID NO: 239 - protein, 163 aa, Arabidopsis thaliana
MEELIKATYNNGNPLPEFNNAAQVYNHDFFWESMQPGGGDTPQKGVLEQIDKDFGSFTNFREKFTNAALTQFGSGWVWLVLKREERRLEVVKTSNAINPLVWDDIPIICVDVWEHSYYLDYKNDRAKYINTFLNHLVSWNAAMSRMARAEAFVNLGEPNIPIA

SEQ ID NO: 240 - DNA, 1290 bp, Arabidopsis thaliana
aaaaactcagtgagtgagtcaccgaaaacctcttgtagtagattcgtgacgggtttgatcatctcttcgaggtcggttctagggtttcactacgagaatggacggagatgagctcaccgagcaggaaactgctctttatgaccgtcaaattagggtatggggagctggtgctcaaagaagattgagtaaatctcatgttttggtatctggaattaagggcactgttgctgagttttgtaagaacattgtgttggcaggagtaggtagtgtgactctgttggatgatcgattggttacaacggaagtcttcaacgcaaacttcttgattcttcctgatgaaaatgcttatgtaggcaaaaccgtagctgagatttgttgtgattcacttaaggattttaaccctatggttcatgtttcaatagagaaaggtgatttgtcaacacttggtgttgattttttcgagaagtttgatgttgtggttatcggctacagttctcgtgctactaagaaagcagttaatgaaaagtgtaggaacctagcaaaagatgtagcgttctatacagttgattgtagaggctcatgtggcgaaatatttgtcgaccttcagaattataagtacacaaagaaaaagcttgatgaaacagtggaatgtgaactaacatttccaagttttgaggaggcagtttcagtaccgtggaaaccgatgccaaggagaacagcaaagctctactttgcaatgagagtgatagaactatttgaggaaactgaaggacgtaaacctggggaatgttcgctgtctgatctcccaagagttttgaaactcaaaaaggaactatgtgaaggaaattcggtcagcgagaatcatattccagatatcctcttggagagactcgtatctaataacacagaattcccaccggcttgtgccatcattggagggattctaggacaggaggtgataaaagttatatcaggcaaaggagagccgttgaagaacttcttctactttgatgcagaggatgggaaaggtgtaatcgaggacctatcccacaagctttaacttccaaacatgaaaggtgctgtgaaacgctgctcttagtaattagttccttgttgaagattgtattggaaattagactttagagtacttagaacttggctccttgtcttttgtatctactaacttggttcgctcctaaagacaatctgtaacccactatttactttaatccatcaatttacacactcctatctaaaaaaaaaaaaaaaaaactccaccgggggcccggt

SEQ ID NO: 241 - protein, 320 aa, Arabidopsis thaliana
MDGDELTEQETALYDRQIRVWGAGAQRRLSKSHVLVSGIKGTVAEFCKNIVLAGVGSVTLLDDRLVTTEVFNANFLILPDENAYVGKTVAEICCDSLKDFNPMVHVSIEKGDLSTLGVDFFEKFDVVVIGYSSRATKKAVNEKCRNLAKDVAFYTVDCRGSCGEIFVDLQNYKYTKKKLDETVECELTFPSFEEAVSVPWKPMPRRTAKLYFAMRVIELFEETEGRKPGECSLSDLPRVLKLKKELCEGNSVSENHIPDILLERLVSNNTEFPPACAIIGGILGQEVIKVISGKGEPLKNFFYFDAEDGKGVIEDLSHKL

SEQ ID NO: 242 - protein, 218 aa, Arabidopsis thaliana
MVHVSIEKGDLSTLGVDFFEKFDVVVIGYSSRATKKAVNEKCRNLAKDVAFYTVDCRGSCGEIFVDLQNYKYTKKKLDETVECELTFPSFEEAVSVPWKPMPRRTAKLYFAMRVIELFEETEGRKPGECSLSDLPRVLKLKKELCEGNSVSENHIPDILLERLVSNNTEFPPACAIIGGILGQEVIKVISGKGEPLKNFFYFDAEDGKGVIEDLSHKL

SEQ ID NO: 243 - DNA, 1256 bp, Arabidopsis thaliana
acactcgtcttaccaaactctctcctacacaaccaaaaccatctctttgcaacaaaacttgttgtaactcatcttcttcttcttcttctccatcacagactcataacaaatgggagaagtttcagtggtggagaacaagaaagtgatactaaagaattatgtagatggtattcctacagaaacagacatggaagtgaaactcggagaaacaattgagctaaaagcaccaaaaggatcttcttgtttcctcgtcaaaaatctatacttgtcttgtgatccttacatgagaggtcgtatgcgtgattttcacggttcctatctcccgccttttgttcctggccaacgtatcgaagggtttggtttagcaagagtgatagattctgatgatactaattataagcccggcgatatagtctctggtatcattggttgggaagaatacagtttgctacgtagttcagataacctacagttgagaaatattcaattagacgacgacattccgctttcttatcatctcggacttctcgggatggctggatttacagcatatgcagggtttaatgagatatgttgtcctaagaaaggggacagtgtttttgtctctgcagcatgtggagcagttggacaacttgttggtcagctagctaagttgcacggctgctatgttgttggtagcgccggtagtaagcaaaaggttgagatccttaaaaacgagcttggatatgatgaagcctttaactacaaggaagaggctgatcttgatactgctttgaagaggtacttcccagaggggatcgatatctacttcgataacgtgggtggatccatgcttgatgcagcactcctcaacatgaaggttcgtggaagaatcgcgctctgtggaatggtgtctttacaaagcctctcaacttcatcacaaggaatcaagaacctatacagcgctatctacaaacgtttaaggctagaagggttcttgcagagtgattaccttcatatcttcccacagtttcttgaaaatgtcaagagatattacaaagaaggcaagattgtctacatcgaagatatatctgaaggcctcgaccatcgctcccgctgcacttgttgggctgttttccgggaaaaatatcggtaaacaggttgttcgggttgctaaagagtgattgtttctaaaaagtatattgtaagtgacttaaaacagacattatatgaaataaagccgccataagtctcttatggaaaaacgttagttaatc

SEQ ID NO: 244 - protein, 341 aa, Arabidopsis thaliana
MGEVSVVENKKVILKNYVDGIPTETDMEVKLGETIELKAPKGSSCFLVKNLYLSCDPYMRGRMRDFHGSYLPPFVPGQRIEGFGLARVIDSDDTNYKPGDIVSGIIGWEEYSLLRSSDNLQLRNIQLDDDIPLSYHLGLLGMAGFTAYAGFNEICCPKKGDSVFVSAACGAVGQLVGQLAKLHGCYVVGSAGSKQKVEILKNELGYDEAFNYKEEADLDTALKRYFPEGIDIYFDNVGGSMLDAALLNMKVRGRIALCGMVSLQSLSTSSQGIKNLYSAIYKRLRLEGFLQSDYLHIFPQFLENVKRYYKEGKIVYIEDISEGLDHRSRCTCWAVFREKYR

SEQ ID NO: 245 - protein, 315 aa, Arabidopsis thaliana
MEVKLGETIELKAPKGSSCFLVKNLYLSCDPYMRGRMRDFHGSYLPPFVPGQRIEGFGLARVIDSDDTNYKPGDIVSGIIGWEEYSLLRSSDNLQLRNIQLDDDIPLSYHLGLLGMAGFTAYAGFNEICCPKKGDSVFVSAACGAVGQLVGQLAKLHGCYVVGSAGSKQKVEILKNELGYDEAFNYKEEADLDTALKRYFPEGIDIYFDNVGGSMLDAALLNMKVRGRIALCGMVSLQSLSTSSQGIKNLYSAIYKRLRLEGFLQSDYLHIFPQFLENVKRYYKEGKIVYIEDISEGLDHRSRCTCWAVFREKYR

SEQ ID NO: 246 - protein, 283 aa, Arabidopsis thaliana
MRGRMRDFHGSYLPPFVPGQRIEGFGLARVIDSDDTNYKPGDIVSGIIGWEEYSLLRSSDNLQLRNIQLDDDIPLSYHLGLLGMAGFTAYAGFNEICCPKKGDSVFVSAACGAVGQLVGQLAKLHGCYVVGSAGSKQKVEILKNELGYDEAFNYKEEADLDTALKRYFPEGIDIYFDNVGGSMLDAALLNMKVRGRIALCGMVSLQSLSTSSQGIKNLYSAIYKRLRLEGFLQSDYLHIFPQFLENVKRYYKEGKIVYIEDISEGLDHRSRCTCWAVFREKYR

SEQ ID NO: 247 - DNA, 1464 bp, Arabidopsis thaliana
aagatttatattcaaattataaatatatactaaaacgctaaaaaattaagtacatgctataatcttttccattatttttctaacaaaagaaagttatatatgggctaaacttagaaggaaagcccaagaggccaagactatataaagattcatgacccgagtttaagatccgatttcagaatttgggactaaaggaggacaacgacaagcgccgggaaaaaatcgagagcgacaacaatggcgccttcttcgtcgagcggtctcacgttcaagctacatcctctggtgatgcttaacatatccgatcacttcactagggttaaaactcagcttaatcctcccgccgcttcttgcgccaccgggaatggctccaacaacgccgacgcgatgttactgcaaaaccctagggtttatggctgcgtcatcggtctccagagaggtcgtacggttgagatcttcaacagtttcgagctgatattcgatcctgctcttgatactctcgacagatccttcctcgagaagaagcaagaactctataagaaggtgttccctgacttctacgtattgggatggtattctacgggaagtgacgctaccgaatctgatatgcatatccacaaagctctgatggacattaatgaatctcctgtgtatgttcttttaaatcctgctatcaatcatgcacagaaggatcttcctgtgactatctacgaaagcgaatttcatgtcattgatggaattcctcagtcgattttcgtgcataccagctacacaattgagacagttgaagctgaaagaatatctgttgatcatgttgcacatcttaagccatctgatggaggctcagctgcgactcagttggctgctcatcttactggaatacatagtgccatcaagatgcttaatagcagaatcagagtgctataccagcatattgtcgctatgcagaaaggtgataaaccttgtgagaactcagttctgagacaagtatctagtctgctcagaagtttgcctgccgcagaatcagagaagttcaatgaaaatttcttgatggagtacaacgacaaattgctgatgtcttacctagcaatgatcacgaattgtaccagcaacatgaacgaggtggttgacaaattcaacactgcatacgacaaacacagccgaagaggtggtaggactgcgttcatgtaaagattagtttcaatgtaaaaaaaccttttctttcttttggtggtctggtccctaagtgaaaatttagaactcttttaaggcatttcacttttcggaaccaaacaaacagctaggaagcttttcttctgtttaagctttgtctagacagaagctaagtttaggcctaactaaattttgcgacaagactgtaaaaacaaaacagcttttaccttctctcaatttttcatttattcaaaaatttgagcaatcagtgaacaaagagatttgtttcat

SEQ ID NO: 248 - protein, 317 aa, Arabidopsis thaliana
MAPSSSSGLTFKLHPLVMLNISDHFTRVKTQLNPPAASCATGNGSNNADAMLLQNPRVYGCVIGLQRGRTVEIFNSFELIFDPALDTLDRSFLEKKQELYKKVFPDFYVLGWYSTGSDATESDMHIHKALMDINESPVYVLLNPAINHAQKDLPVTIYESEFHVIDGIPQSIFVHTSYTIETVEAERISVDHVAHLKPSDGGSAATQLAAHLTGIHSAIKMLNSRIRVLYQHIVAMQKGDKPCENSVLRQVSSLLRSLPAAESEKFNENFLMEYNDKLLMSYLAMITNCTSNMNEVVDKFNTAYDKHSRRGGRTAFM

SEQ ID NO: 249 - protein, 300 aa, Arabidopsis thaliana
MLNISDHFTRVKTQLNPPAASCATGNGSNNADAMLLQNPRVYGCVIGLQRGRTVEIFNSFELIFDPALDTLDRSFLEKKQELYKKVFPDFYVLGWYSTGSDATESDMHIHKALMDINESPVYVLLNPAINHAQKDLPVTIYESEFHVIDGIPQSIFVHTSYTIETVEAERISVDHVAHLKPSDGGSAATQLAAHLTGIHSAIKMLNSRIRVLYQHIVAMQKGDKPCENSVLRQVSSLLRSLPAAESEKFNENFLMEYNDKLLMSYLAMITNCTSNMNEVVDKFNTAYDKHSRRGGRTAFM

SEQ ID NO: 250 - protein, 267 aa, Arabidopsis thaliana
MLLQNPRVYGCVIGLQRGRTVEIFNSFELIFDPALDTLDRSFLEKKQELYKKVFPDFYVLGWYSTGSDATESDMHIHKALMDINESPVYVLLNPAINHAQKDLPVTIYESEFHVIDGIPQSIFVHTSYTIETVEAERISVDHVAHLKPSDGGSAATQLAAHLTGIHSAIKMLNSRIRVLYQHIVAMQKGDKPCENSVLRQVSSLLRSLPAAESEKFNENFLMEYNDKLLMSYLAMITNCTSNMNEVVDKFNTAYDKHSRRGGRTAFM

SEQ ID NO: 251 - DNA, 1691 bp, Arabidopsis thaliana
aaaagatcgacgaacataaaaacaaaaacatataatttgggtttttagagttcgaaacttgaaatctttttttttttggttgctgaggaatcgaagtagaagagtataaatgggtgttagagagaaagatccgttagcccagttgagtttgccaccaggttttagattttatccgacagatgaagagcttcttgttcagtatctatgtcggaaagttgcaggctatcatttctctctccaggtcatcggagacatcgatctctacaagttcgatccttgggatttgccaagtaaggctttgtttggagagaaggaatggtatttctttagcccaagagatcggaaatatccgaacgggtcaagacccaatagagtagccgggtcgggttattggaaagcaacgggtactgacaaaattatcacggcggatggtcgtcgtgtcgggattaaaaaagctctggtcttttacgccggaaaagctcccaaaggcactaaaaccaactggattatgcacgagtatcgcttaatagaacattctcgtagccatggaagctccaagttggatgattgggtgttgtgtcgaatttacaagaaaacatctggatctcagagacaagctgttactcctgttcaagcttgtcgtgaagagcatagcacgaatgggtcgtcatcgtcttcttcatcacagcttgacgacgttcttgattcgttcccggagataaaagaccagtcttttaatcttcctcggatgaattcgctcaggacgattcttaacgggaactttgattgggctagcttggcaggtcttaatccaattccagagctagctccgaccaatggattaccgagttacggtggttacgatgcgtttcgagcggcggaaggtgaggcggagagtgggcatgtgaatcggcagcagaactcgagcgggttgactcagagtttcgggtacagctcgagtgggtttggtgtttcgggtcaaacattcgagtttaggcaatgagagagatgtgaagttactgatgggtgaaaaaagtaaaaaaaaaacttggagatagtagagtggcaattgatgtaaataatagggatttatatggggcttttaccgattcggtgaggcttaggattccacaaaggaaaaaggctcgactggggactagtttgatccaacttgacggcccacaaatgtgtaatgtttctcaacggagagaaaaataaatggttaccaatatttttacaccggttatgtgttgataccatttgcacaaaacggtttaagttctgaattgaataacttaacacccaaaatttggtaaaaagcttaatacaaaaagttcaaaggcattttcgcttactgcgacactcggagttgcagagtactctacgtaacagactctgttcatagagtttgcggcaccggtggtgggacattcttgcggacacagtatgtacttttggaagcatcgttcctaagggttgctgcagtaaactccttgtgacttggctcgcaagaaacataacatggccgcaagaaaaaacagcattaacgaagaggtgtttgagatcttcatgtctagtttattcttcctgttttattatgtgtcgactggtgtcaaaagaaacgtgttgattgtgaatttgtagacgccactctgtaaatttatttaaaataaactattttacttcacgtc

SEQ ID NO: 252 - protein, 297 aa, Arabidopsis thaliana
MGVREKDPLAQLSLPPGFRFYPTDEELLVQYLCRKVAGYHFSLQVIGDIDLYKFDPWDLPSKALFGEKEWYFFSPRDRKYPNGSRPNRVAGSGYWKATGTDKIITADGRRVGIKKALVFYAGKAPKGTKTNWIMHEYRLIEHSRSHGSSKLDDWVLCRIYKKTSGSQRQAVTPVQACREEHSTNGSSSSSSSQLDDVLDSFPEIKDQSFNLPRMNSLRTILNGNFDWASLAGLNPIPELAPTNGLPSYGGYDAFRAAEGEAESGHVNRQQNSSGLTQSFGYSSSGFGVSGQTFEFRQ

SEQ ID NO: 253 - protein, 164 aa, Arabidopsis thaliana
MHEYRLIEHSRSHGSSKLDDWVLCRIYKKTSGSQRQAVTPVQACREEHSTNGSSSSSSSQLDDVLDSFPEIKDQSFNLPRMNSLRTILNGNFDWASLAGLNPIPELAPTNGLPSYGGYDAFRAAEGEAESGHVNRQQNSSGLTQSFGYSSSGFGVSGQTFEFRQ

SEQ ID NO: 254 - DNA, 780 bp, Arabidopsis thaliana
tgagagagatctgttacgacagttatgtctccgtcgacgacgacgattttcatcggtcccatcttagcggtggacgccgccgtatctcacgcgattcacacggcggcgaaaccattcctcccaccatttgtcctcctcctcctcgaaatctcagctgatttccgattctccttccccgtatccctttccttcctcctctcccctccattacgctctttcctcgtccctttcctcctcggcctcctcttcgatctaatcttcgtcggaatcgtaaaattaatcttccgtcgtgctcgtcccgcttacaatcacccttcaatgtccgccgctgtatcagctgatcactactcgttcccctcaggtcacgcttctcgcgttttcttcgttgctgcatctgttcacttcttctctgctgctgctgaagcttccatgactggtccaagctactccttcttagatggatggatcagagatcataacgatggcgatgtgaaggtagaagttgtggtcgttgtatggatctgggcaacagtgactgcaatttcaaggattcttttaggaagacattacgttctcgatgtagctgctggtgcttttttagggattgtagaagctctctttgctcttcgatttctgagatttgatgaaatgatctttgggaggtaacaaatgtatccaaattgttgttgtttttaacaaattgttctgtaatttttgtttcgattacattgagaagaagaattgtattgttcatgaatcaaagattgttccttttgtttc

SEQ ID NO: 255 - protein, 213 aa, Arabidopsis thaliana
MSPSTTTIFIGPILAVDAAVSHAIHTAAKPFLPPFVLLLLEISADFRFSFPVSLSFLLSPPLRSFLVPFLLGLLFDLIFVGIVKLIFRRARPAYNHPSMSAAVSADHYSFPSGHASRVFFVAASVHFFSAAAEASMTGPSYSFLDGWIRDHNDGDVKVEVVVVVWIWATVTAISRILLGRHYVLDVAAGAFLGIVEALFALRFLRFDEMIFGR

SEQ ID NO: 256 - protein, 115 aa, Arabidopsis thaliana
MSAAVSADHYSFPSGHASRVFFVAASVHFFSAAAEASMTGPSYSFLDGWIRDHNDGDVKVEVVVVVWIWATVTAISRILLGRHYVLDVAAGAFLGIVEALFALRFLRFDEMIFGR

SEQ ID NO: 257 - DNA, 1213 bp, Arabidopsis thaliana
agagctaagacttaagagcgtcacaacaatatcacactcagataaatatcaagagatagagagagtaacagtgatatagtcgagaaaatggcgtcgtggatgaaagcggtgctaatctctactggcgtcgtagccacggctatgcatctaaaggttattgttcctgtggctatggatttctcacaaaatccgattattttgagctctttcctcacgtggctgaaaccgccgtatctttacgtcatcactaacgtcatcatcatcgttgtcggagtttcctaccggattactactgtctccagccacgtcgacggcaaagactatgaggcttcttacagtggcgacaataagtttcagactgatcatcagcagatcgtccaagaagctcctctaaggcgacgaacggagacgaaagatgcggattttggtttcatcggcaaagttttgcagatcgttaaggagccggaggttgtgtatgaagagaaggagaggccggcgacggtagaggaggaggagaagaagtgtataattgtggtgagcaaatcggaaaatcaacctccggtggagaagcctcttgttacggctaggatcggccaaaagaaaccggtggttaagactacaccagcagaaaggaattctatgagagcgttgagagttgcgaaaccgaaacgtaacgagacgttagagaatacgtggaagatgattatggaaggcaacaagtcaacgcttccgttgaccagttattacaagagacccgacacgttcggacttggcgaagagacaaaacaatcaggtgttttgaagaaatcggagacgtttagtgacagaactaactgttaccagtctctgccgccgccacctccgccgctagtgaaggtgaagaaggtgaaagtgtcacggagtagggatgagcttaaccggaaagtagaagcgtttataaaaaaatgcaacgacgagaggttcgcgtcgatgaaactggacaacgaagtggctcgtcatggtctttcttattaaaatcattttcttcataatttttttggttgtctttcaatacacgacaataacaagttaacaaaagtagaaagtcacggataaacaaaatctctgctttgtattattgattggataagggtggaattggttggtgcacctagtgatatttcttcttcgttaacaatgtaattaaaagtcattgaatagatattttctcctc

SEQ ID NO: 258 - protein, 308 aa, Arabidopsis thaliana
MASWMKAVLISTGVVATAMHLKVIVPVAMDFSQNPIILSSFLTWLKPPYLYVITNVIIIVVGVSYRITTVSSHVDGKDYEASYSGDNKFQTDHQQIVQEAPLRRRTETKDADFGFIGKVLQIVKEPEVVYEEKERPATVEEEEKKCIIVVSKSENQPPVEKPLVTARIGQKKPVVKTTPAERNSMRALRVAKPKRNETLENTWKMIMEGNKSTLPLTSYYKRPDTFGLGEETKQSGVLKKSETFSDRTNCYQSLPPPPPPLVKVKKVKVSRSRDELNRKVEAFIKKCNDERFASMKLDNEVARHGLSY

SEQ ID NO: 259 - protein, 304 aa, Arabidopsis thaliana
MKAVLISTGVVATAMHLKVIVPVAMDFSQNPIILSSFLTWLKPPYLYVITNVIIIVVGVSYRITTVSSHVDGKDYEASYSGDNKFQTDHQQIVQEAPLRRRTETKDADFGFIGKVLQIVKEPEVVYEEKERPATVEEEEKKCIIVVSKSENQPPVEKPLVTARIGQKKPVVKTTPAERNSMRALRVAKPKRNETLENTWKMIMEGNKSTLPLTSYYKRPDTFGLGEETKQSGVLKKSETFSDRTNCYQSLPPPPPPLVKVKKVKVSRSRDELNRKVEAFIKKCNDERFASMKLDNEVARHGLSY

SEQ ID NO: 260 - protein, 290 aa, Arabidopsis thaliana
MHLKVIVPVAMDFSQNPIILSSFLTWLKPPYLYVITNVIIIVVGVSYRITTVSSHVDGKDYEASYSGDNKFQTDHQQIVQEAPLRRRTETKDADFGFIGKVLQIVKEPEVVYEEKERPATVEEEEKKCIIVVSKSENQPPVEKPLVTARIGQKKPVVKTTPAERNSMRALRVAKPKRNETLENTWKMIMEGNKSTLPLTSYYKRPDTFGLGEETKQSGVLKKSETFSDRTNCYQSLPPPPPPLVKVKKVKVSRSRDELNRKVEAFIKKCNDERFASMKLDNEVARHGLSY

SEQ ID NO: 261 - DNA, 1510 bp, Arabidopsis thaliana
actctgtttttcaaattcaatggacctttttcttcaaatctccagctttctgcatagatccatgaccatgagagtctgtttcttagaacgaaaatgaaaaaaatatcttcacattattcggtagtcatagcgatactcgttgtggtgacgatgacctcgatgtgtcaagctgtgggtagcaacgtgtaccctttgattctggttccaggaaacggaggtaaccagctagaggtacggctggacagagaatacaagccaagtagtgtctggtgtagcagctggttatatccgattcataagaagagtggtggatggtttaggctatggttcgatgcagcagtgttattgtctcccttcaccaggtgcttcagcgatcgaatgatgttgtactatgaccctgatttggatgattaccaaaatgctcctggtgtccaaacccgggttcctcatttcggttcgaccaaatcacttctatacctcgaccctcgtctccgagatgccacatcttacatggaacatttggtgaaagctctagagaaaaaatgcgggtatgttaacgaccaaaccatcctaggagctccatatgatttcaggtacggcctggctgcttcgggccacccgtcccgtgtagcctcacagttcctacaagacctcaaacaattggtggaaaaaactagcagcgagaacgaaggaaagccagtgatactcctctcccatagcctaggaggacttttcgtcctccatttcctcaaccgtaccaccccttcatggcgccgcaagtacatcaaacactttgttgcactcgctgcgccatggggtgggacgatctctcagatgaagacatttgcttctggcaacacactcggtgtccctttagttaaccctttgctggtcagacggcatcagaggacctccgagagtaaccaatggctacttccatctaccaaagtgtttcacgacagaactaaaccgcttgtcgtaactccccaggttaactacacagcttacgagatggatcggttttttgcagacattggattctcacaaggagttgtgccttacaagacaagagtgttgcctttaacagaggagctgatgactccgggagtgccagtcacttgcatatatgggagaggagttgatacaccggaggttttgatgtatggaaaaggaggattcgataagcaaccagagattaagtatggagatggagatgggacggttaatttggcgagcttagcagctttgaaagtcgatagcttgaacaccgtagagattgatggagtttcgcatacatctatacttaaagacgagatcgcacttaaagagattatgaagcagatttcaattattaattatgaattagccaatgttaatgccgtcaatgaatgagagcagtcaactatttcaccatttttagttgtacattttaagataaagagataatttacatatatttcacggtttgttttaggcactccttatagaagaaaaaaagaattaaaaaccg

SEQ ID NO: 262 - protein, 432 aa, Arabidopsis thaliana
MKKISSHYSVVIAILVVVTMTSMCQAVGSNVYPLILVPGNGGNQLEVRLDREYKPSSVWCSSWLYPIHKKSGGWFRLWFDAAVLLSPFTRCFSDRMMLYYDPDLDDYQNAPGVQTRVPHFGSTKSLLYLDPRLRDATSYMEHLVKALEKKCGYVNDQTILGAPYDFRYGLAASGHPSRVASQFLQDLKQLVEKTSSENEGKPVILLSHSLGGLFVLHFLNRTTPSWRRKYIKHFVALAAPWGGTISQMKTFASGNTLGVPLVNPLLVRRHQRTSESNQWLLPSTKVFHDRTKPLVVTPQVNYTAYEMDRFFADIGFSQGVVPYKTRVLPLTEELMTPGVPVTCIYGRGVDTPEVLMYGKGGFDKQPEIKYGDGDGTVNLASLAALKVDSLNTVEIDGVSHTSILKDEIALKEIMKQISIINYELANVNAVNE

SEQ ID NO: 263 - protein, 413 aa, Arabidopsis thaliana
MTSMCQAVGSNVYPLILVPGNGGNQLEVRLDREYKPSSVWCSSWLYPIHKKSGGWFRLWFDAAVLLSPFTRCFSDRMMLYYDPDLDDYQNAPGVQTRVPHFGSTKSLLYLDPRLRDATSYMEHLVKALEKKCGYVNDQTILGAPYDFRYGLAASGHPSRVASQFLQDLKQLVEKTSSENEGKPVILLSHSLGGLFVLHFLNRTTPSWRRKYIKHFVALAAPWGGTISQMKTFASGNTLGVPLVNPLLVRRHQRTSESNQWLLPSTKVFHDRTKPLVVTPQVNYTAYEMDRFFADIGFSQGVVPYKTRVLPLTEELMTPGVPVTCIYGRGVDTPEVLMYGKGGFDKQPEIKYGDGDGTVNLASLAALKVDSLNTVEIDGVSHTSILKDEIALKEIMKQISIINYELANVNAVNE

SEQ ID NO: 264 - protein, 410 aa, Arabidopsis thaliana
MCQAVGSNVYPLILVPGNGGNQLEVRLDREYKPSSVWCSSWLYPIHKKSGGWFRLWFDAAVLLSPFTRCFSDRMMLYYDPDLDDYQNAPGVQTRVPHFGSTKSLLYLDPRLRDATSYMEHLVKALEKKCGYVNDQTILGAPYDFRYGLAASGHPSRVASQFLQDLKQLVEKTSSENEGKPVILLSHSLGGLFVLHFLNRTTPSWRRKYIKHFVALAAPWGGTISQMKTFASGNTLGVPLVNPLLVRRHQRTSESNQWLLPSTKVFHDRTKPLVVTPQVNYTAYEMDRFFADIGFSQGVVPYKTRVLPLTEELMTPGVPVTCIYGRGVDTPEVLMYGKGGFDKQPEIKYGDGDGTVNLASLAALKVDSLNTVEIDGVSHTSILKDEIALKEIMKQISIINYELANVNAVNE

SEQ ID NO: 265 - DNA, 1387 bp, Arabidopsis thaliana
attgtttcagaaaagctttaacctaatttcacttcgtctctctctcgcgctcccaatttctccgccggcgggaaaaccatgtcgcacttcggaaggtcaggtccaccggatatcagcgacacctactcacttctcgtccttaacatcaccttccgtacgactgctgatgatctctatcctctattcgcaaagtatggaaaggtcgttgatgtgtttattcccagagatcgaaggactggtgattcgcgtggttttgcgtttgttcggtataagtataaagacgaagctcacaaagcagtggaaaggcttgatggaagagttgttgatggcagagaaataactgttcagtttgcgaaatatgggccaaatgctgaaaaaatttccaaaggaagagttgtggaaccaccgccgaagtcacgaagatctagaagccgtagtcctaggcggagtcgtagtcctaggaggagccgtagcccgcctagacgtcgtagtcccagaagaagccgcagtcctcgtaggaggtcccgagatgactatagggaaaaagactaccggaagcagagcaggagcagaagctatgacaggcgtgaaaggcatgaggagaaggatagagatcatcgtcgtcgcactaggtctcgtagtgccagcccagatgaaaaacgcagagtcagaggccgttatgataatgagagccgcagtcacagtcgttccttgagtgcatctcctgctcgccgcagccctagaagttcctccccacagaaaacctctcctgctagagaagtttctcctgataagcgtagcaatgagaggtctccatctcctcgtcgcagcctcagcccaagaagccctgctttgcaaaaggcctctccttctaaggagatgtctcctgaaaggcgtagcaatgagaggtccccatctcctggtagccctgctcctctgcgcaaagttgatgctgcttctcgaagtcaatctccttatgctgcggaatgactgcagccacttgtgaaagtgatacggtgtatgatgaaaaacacgtttgcttgtactgatgatgtttcatcattaagcactggaacgtctaccctctgtagtattacttgctttccgtaggtgccctcaaactactgagtactgactgtatctttgtttcctgttatcgttctggtttagtgttcatgtgcaagaattattactgtttgaacagcctttttagtctctgttttatttgaatcttctctggtttggaattcatagcattctaactccattcccctggcttgtcttggatttttctagtctggttcgagaaaagaattgactgggaagatggcacaaccatgttgagattgtagctgttgatggctgtttatgaaactgtagatgatct

SEQ ID NO: 266 - protein, 303 aa, Arabidopsis thaliana
MSHFGRSGPPDISDTYSLLVLNITFRTTADDLYPLFAKYGKVVDVFIPRDRRTGDSRGFAFVRYKYKDEAHKAVERLDGRVVDGREITVQFAKYGPNAEKISKGRVVEPPPKSRRSRSRSPRRSRSPRRSRSPPRRRSPRRSRSPRRRSRDDYREKDYRKQSRSRSYDRRERHEEKDRDHRRRTRSRSASPDEKRRVRGRYDNESRSHSRSLSASPARRSPRSSSPQKTSPAREVSPDKRSNERSPSPRRSLSPRSPALQKASPSKEMSPERRSNERSPSPGSPAPLRKVDAASRSQSPYAAE

SEQ ID NO: 267 - DNA, 1193 bp, Arabidopsis thaliana
aaaaattcactgccaaaaaaaacacatcaaaacgatgccgtcggaagcggagagctcagcgaattcagctccggcaactccgccaccaccaccgaatttctggggaaccatgccggaggaagagtactacacttcacaaggagtacgtaacagcaaatcatacttcgaaacaccaaacggcaagctcttcactcagagcttcttaccattagatggtgaaatcaaaggcactgtgtacatgtctcatggatacggatccgatacaagctggatgtttcagaagatctgtatgagtttctctagttggggttacgctgttttcgccgccgatcttctcggtcacggccgttccgatggtatccgctgctacatgggtgatatggagaaagttgcagcaacatcattggctttcttcaagcatgttcgttgtagtgatccatataaggatcttccggcttttctgtttggtgaatcgatgggaggtcttgtgacgcttttgatgtattttcaatcggaacctgagacttggaccggtttgatgttttcggctcctctctttgttatccctgaggatatgaaaccaagcaaggctcatctttttgcttatggtctcctctttggtttggctgatacgtgggctgcaatgccggataataagatggttgggaaggctatcaaggaccctgaaaagcttaagatcatcgcttctaacccgcaaagatatacagggaagcctagagtgggaacaatgagagagttactgaggaagactcaatacgttcaggagaatttcgggaaagttactattccggtgtttacggcgcacgggacagcggatggagtaacatgtcctacatcttcgaagctactatacgaaaaagcgtcaagcgctgataaaacgttgaagatctatgaagggatgtatcactcgctgattcaaggagagcctgacgagaacgctgagatagtcttgaaggatatgagagagtggatcgatgagaaggttaagaagtatggatctaaaaccgcttgaacaaagctacatttgtgttacaagaacttgaagagaaatgtatattgatgttatgatccgtatcgtcgatttgacttgttttgttgtctgttgtaatccaagaacatgaattttctgatgtaagaacttataatatcatggattacagaaatccttttat

SEQ ID NO: 268 - protein, 343 aa, Arabidopsis thaliana
KIHCQKKHIKTMPSEAESSANSAPATPPPPPNFWGTMPEEEYYTSQGVRNSKSYFETPNGKLFTQSFLPLDGEIKGTVYMSHGYGSDTSWMFQKICMSFSSWGYAVFAADLLGHGRSDGIRCYMGDMEKVAATSLAFFKHVRCSDPYKDLPAFLFGESMGGLVTLLMYFQSEPETWTGLMFSAPLFVIPEDMKPSKAHLFAYGLLFGLADTWAAMPDNKMVGKAIKDPEKLKIIASNPQRYTGKPRVGTMRELLRKTQYVQENFGKVTIPVFTAHGTADGVTCPTSSKLLYEKASSADKTLKIYEGMYHSLIQGEPDENAEIVLKDMREWIDEKVKKYGSKTA

SEQ ID NO: 269 - protein, 332 aa, Arabidopsis thaliana
MPSEAESSANSAPATPPPPPNFWGTMPEEEYYTSQGVRNSKSYFETPNGKLFTQSFLPLDGEIKGTVYMSHGYGSDTSWMFQKICMSFSSWGYAVFAADLLGHGRSDGIRCYMGDMEKVAATSLAFFKHVRCSDPYKDLPAFLFGESMGGLVTLLMYFQSEPETWTGLMFSAPLFVIPEDMKPSKAHLFAYGLLFGLADTWAAMPDNKMVGKAIKDPEKLKIIASNPQRYTGKPRVGTMRELLRKTQYVQENFGKVTIPVFTAHGTADGVTCPTSSKLLYEKASSADKTLKIYEGMYHSLIQGEPDENAEIVLKDMREWIDEKVKKYGSKTA

SEQ ID NO: 270 - protein, 307 aa, Arabidopsis thaliana
MPEEEYYTSQGVRNSKSYFETPNGKLFTQSFLPLDGEIKGTVYMSHGYGSDTSWMFQKICMSFSSWGYAVFAADLLGHGRSDGIRCYMGDMEKVAATSLAFFKHVRCSDPYKDLPAFLFGESMGGLVTLLMYFQSEPETWTGLMFSAPLFVIPEDMKPSKAHLFAYGLLFGLADTWAAMPDNKMVGKAIKDPEKLKIIASNPQRYTGKPRVGTMRELLRKTQYVQENFGKVTIPVFTAHGTADGVTCPTSSKLLYEKASSADKTLKIYEGMYHSLIQGEPDENAEIVLKDMREWIDEKVKKYGSKTA

SEQ ID NO: 271 - DNA, 1063 bp, Arabidopsis thaliana
aaatcacttgctagtactcttcacactctctacaatgttgtctatgctctggttccttctatctcttctctctcttcttctacttccttgtctccgaccttgctttcctgctaaaggatctctgaaaaacaaaaagaagattgacaagggaacttatgtggtcggagaggaggagacacctaaagagcttcagagagagctgatgccgagacacgtggcagtgataatggacggaaaccggagatgggctaaacagaccggattgttgacgtcacaaggctacgaggctggagctaaacggcttctcgagttcgctgacctctgcttcaaactagggataaatactgtctcagcttttgctttctccactgagaattggggaagacacaagattgaagtcaaatgcttgatgtatttgttccaacgttacctcaagtcaaagatccaatttttccagagcaaggaaatccgagtttctgttatcgggaatcttgcgaagatccctgagtctctcctccgaacagttcacgagttagaggaagctacaaagagttacaagaagaagcatctcatcttggccatagattacagcgggagattcgacatcttgggtgcttgcaagaacattgtgaagaaatcagaacaaggtttgatccgagaggaagacgtggacgagacgttgttcgagagagagcttcagactcggtgtaccgagttcccaagtcctgatctcttgattaggactagtggggaacagaggattagtaacttcttcttgtggcagctcgcttataccgagtttttcttttcgcctgtactttggcctgatttcgataagcagaagtttatagaggccctggtttcgtatcagcgcagggatagacgatttggctcccggctttgatccacatttgatcctatggtctgtcatgtttcctctgttttgttctgtttctctctgtgtctttatgttcatctgacttttgcagaaataattatactgtctagtctctcgtagatcaatgtggtatttccaatgaagtaacatattttatgtgttgcg

SEQ ID NO: 272 - protein, 300 aa, Arabidopsis thaliana
NHLLVLFTLSTMLSMLWFLLSLLSLLLLPCLRPCFPAKGSLKNKKKIDKGTYVVGEEETPKELQRELMPRHVAVIMDGNRRWAKQTGLLTSQGYEAGAKRLLEFADLCFKLGINTVSAFAFSTENWGRHKIEVKCLMYLFQRYLKSKIQFFQSKEIRVSVIGNLAKIPESLLRTVHELEEATKSYKKKHLILAIDYSGRFDILGACKNIVKKSEQGLIREEDVDETLFERELQTRCTEFPSPDLLIRTSGEQRISNFFLWQLAYTEFFFSPVLWPDFDKQKFIEALVSYQRRDRRFGSRL

SEQ ID NO: 273 - protein, 289 aa, Arabidopsis thaliana
MLSMLWFLLSLLSLLLLPCLRPCFPAKGSLKNKKKIDKGTYVVGEEETPKELQRELMPRHVAVIMDGNRRWAKQTGLLTSQGYEAGAKRLLEFADLCFKLGINTVSAFAFSTENWGRHKIEVKCLMYLFQRYLKSKIQFFQSKEIRVSVIGNLAKIPESLLRTVHELEEATKSYKKKHLILAIDYSGRFDILGACKNIVKKSEQGLIREEDVDETLFERELQTRCTEFPSPDLLIRTSGEQRISNFFLWQLAYTEFFFSPVLWPDFDKQKFIEALVSYQRRDRRFGSRL

SEQ ID NO: 274 - protein, 286 aa, Arabidopsis thaliana
MLWFLLSLLSLLLLPCLRPCFPAKGSLKNKKKIDKGTYVVGEEETPKELQRELMPRHVAVIMDGNRRWAKQTGLLTSQGYEAGAKRLLEFADLCFKLGINTVSAFAFSTENWGRHKIEVKCLMYLFQRYLKSKIQFFQSKEIRVSVIGNLAKIPESLLRTVHELEEATKSYKKKHLILAIDYSGRFDILGACKNIVKKSEQGLIREEDVDETLFERELQTRCTEFPSPDLLIRTSGEQRISNFFLWQLAYTEFFFSPVLWPDFDKQKFIEALVSYQRRDRRFGSRL

SEQ ID NO: 275 - DNA, 1337 bp, Arabidopsis thaliana
atgttgtcgagcaaaaacgttgtcgtagtagaggcttggaacaccaccaccacaacgcaaacgcaaacgccacatagaccgtcactgttacacccaacattctattggggttacaactgccaagtgctcttctcaggctggcctggttctgaccgtgggatgtatgcactcgcacttatcttcgtcttctttctggcgttcttagctgagtggcttgctcggtgctctgacgcgtcatccatcaaacagggtgccgataagcttgctaaagttgcatttcgcacggctatgtataccgtcaagtccggctttagctacctagtgattctggctgttgtttccttcaacggtggtgttttcctagccgcgattttcgggcatgctcttgggttcgctgttttccgtgggcgggcaacaataaaaaaaaaatctggaacggataaaataatttgctcggcttcctcagctccaatggcggcgacgatgatcggaattaacctctcctgcttcaaatcaacatcgttcttctcaccggacctcaattctctccaatcaaagctctctctcctatctctcaaaccctctccaacacagccacggaaatcaacagtcatccgtatgggcggtggtccgagaactttccccggcggtgtatcaaaatggcaatggaaaaggatgcaagcgaagaaacagaaacagcttctcaaagcaaggttatgcagagaacgtcagatctacgagatgcgaaaacgcgccgagctaaaagcggcggtggctgagctagaacgaccatgggaaccgattcataaaccaccgaatctattctcagtttgtgctgatgagcaagttaaagtactcgcggatcggtttcagaaacctggtggatttgatttatggactgatagagatggtcctcaattgtttgagagtgttgatgatttgccttctgctaggttttttcctaaaggtgttgttcatagtgttaaaccttatggtagattatcatctagctctgttgttgatgatggtgatgagagtgaggttaaagatgaagaaattgggaagaagttacgtggtcgtagggtgaggaagagaggtgatgatggaggtaagaggaggactgaaaatcgtggtaatggtgggagattgagaaatggagggtcttcttcttctcaggtgtatgatatgactttgcagaatgatgggagatatgaaattggatcttaggtatgagttcttctttgttgtgtttggatcattgatgtctctgaacataatgtgtatgtaatctggaatagtttgattgtgattatgcaaagttttcagttttagggaag

SEQ ID NO: 276 - protein, 408 aa, Arabidopsis thaliana
MLSSKNVVVVEAWNTTTTTQTQTPHRPSLLHPTFYWGYNCQVLFSGWPGSDRGMYALALIFVFFLAFLAEWLARCSDASSIKQGADKLAKVAFRTAMYTVKSGFSYLVILAVVSFNGGVFLAAIFGHALGFAVFRGRATIKKKSGTDKIICSASSAPMAATMIGINLSCFKSTSFFSPDLNSLQSKLSLLSLKPSPTQPRKSTVIRMGGGPRTFPGGVSKWQWKRMQAKKQKQLLKARLCRERQIYEMRKRAELKAAVAELERPWEPIHKPPNLFSVCADEQVKVLADRFQKPGGFDLWTDRDGPQLFESVDDLPSARFFPKGVVHSVKPYGRLSSSSVVDDGDESEVKDEEIGKKLRGRRVRKRGDDGGKRRTENRGNGGRLRNGGSSSSQVYDMTLQNDGRYEIGS

SEQ ID NO: 277 - protein, 355 aa, Arabidopsis thaliana
MYALALIFVFFLAFLAEWLARCSDASSIKQGADKLAKVAFRTAMYTVKSGFSYLVILAVVSFNGGVFLAAIFGHALGFAVFRGRATIKKKSGTDKIICSASSAPMAATMIGINLSCFKSTSFFSPDLNSLQSKLSLLSLKPSPTQPRKSTVIRMGGGPRTFPGGVSKWQWKRMQAKKQKQLLKARLCRERQIYEMRKRAELKAAVAELERPWEPIHKPPNLFSVCADEQVKVLADRFQKPGGFDLWTDRDGPQLFESVDDLPSARFFPKGVVHSVKPYGRLSSSSVVDDGDESEVKDEEIGKKLRGRRVRKRGDDGGKRRTENRGNGGRLRNGGSSSSQVYDMTLQNDGRYEIGS

SEQ ID NO: 278 - protein, 312 aa, Arabidopsis thaliana
MYTVKSGFSYLVILAVVSFNGGVFLAAIFGHALGFAVFRGRATIKKKSGTDKIICSASSAPMAATMIGINLSCFKSTSFFSPDLNSLQSKLSLLSLKPSPTQPRKSTVIRMGGGPRTFPGGVSKWQWKRMQAKKQKQLLKARLCRERQIYEMRKRAELKAAVAELERPWEPIHKPPNLFSVCADEQVKVLADRFQKPGGFDLWTDRDGPQLFESVDDLPSARFFPKGVVHSVKPYGRLSSSSVVDDGDESEVKDEEIGKKLRGRRVRKRGDDGGKRRTENRGNGGRLRNGGSSSSQVYDMTLQNDGRYEIGS

SEQ ID NO: 279 - DNA, 952 bp, Arabidopsis thaliana
gatttcagaagacggaggaggagcgaggacggccgccatggatccagcaggagcatcggtggccagcgcaatcggaggagaaggagagaaattcgcggtggggaatatttattcagtgaaggtgatcaccggagatgagttcagagggatcgtcatggcttacgaccccatccccaacttcgtcttttttgaagagggtacaaaacctagacctgggcatttgaagaacactcggatggtgaatgcgagttttattacagggctttcgtatttaggcaaaactgaagatccacttgattcagacaacttttctgttgatcttaatggtctccgagctaaagaggcacttgctatcaggcaagcggaagcagatgctgaaagaatgggagttggtgttaccgctgaggctcagagcatcttcgacgcgttgtctaagacgcttcctgtgcaatgggaaaactcagacattctggtgatgaaagaggtacgcgttcgtagcccgtatctttcagattgtgtctttggaggaactgatgctgccaacaaccgagtcaagaaagtgcttgagctggaaagacgaaggttgcaactctttggcacatgaggctagtgaaaagagtcggtcagtgaaatagcgagaaagggttcgttgctactaacccgaaaggcgtctatagatctgatcgaccagcgaaaagcggatatgtttgcttttcgcatgttgttgtctttacttagaatctgcttgtccttgtaaaagcagattagagatttcttgagttacagccttacagggattgaaatttggactaatttcaccctggttattgacaagaacagtgaggtcttgtcttgtccactttttaccagggcttggtttatttatcgcctggaactgtaaactattctgaaatgttgaactactttttagtgacttctccggtagattttc

SEQ ID NO: 280 - protein, 200 aa, Arabidopsis thaliana
ISEDGGGARTAAMDPAGASVASAIGGEGEKFAVGNIYSVKVITGDEFRGIVMAYDPIPNFVFFEEGTKPRPGHLKNTRMVNASFITGLSYLGKTEDPLDSDNFSVDLNGLRAKEALAIRQAEADAERMGVGVTAEAQSIFDALSKTLPVQWENSDILVMKEVRVRSPYLSDCVFGGTDAANNRVKKVLELERRRLQLFGT

SEQ ID NO: 281 - protein, 188 aa, Arabidopsis thaliana
MDPAGASVASAIGGEGEKFAVGNIYSVKVITGDEFRGIVMAYDPIPNFVFFEEGTKPRPGHLKNTRMVNASFITGLSYLGKTEDPLDSDNFSVDLNGLRAKEALAIRQAEADAERMGVGVTAEAQSIFDALSKTLPVQWENSDILVMKEVRVRSPYLSDCVFGGTDAANNRVKKVLELERRRLQLFGT

SEQ ID NO: 282 - protein, 149 aa, Arabidopsis thaliana
MAYDPIPNFVFFEEGTKPRPGHLKNTRMVNASFITGLSYLGKTEDPLDSDNFSVDLNGLRAKEALAIRQAEADAERMGVGVTAEAQSIFDALSKTLPVQWENSDILVMKEVRVRSPYLSDCVFGGTDAANNRVKKVLELERRRLQLFGT

SEQ ID NO: 283 - DNA, 656 bp, Arabidopsis thaliana
tcatcgctgtctggaacagcttgagtgcttcctagagcaaaggagaaaaaaaatggtgaactatgtgctcaaaatcaccgctgatctcgagaatctcactaatctccagccttccggtggctgcgacgattccaacttcccttacctcttcaagttgaaatgtgaaagatgtggagaggtgactccgaaagaaacatgtgtgactttgaatgagacttttactcctccgggaggtaggggtacttgtcatcttgttcagaagtgtaagttctgtggaagggaagggaatgtgactatgattccgggcaaaggtcgacctttaactctggaagattctgaggctggagaacatgcccctcttatggtgtttgactgtcgtggctatgaacccattgatttcggatttggtggatattggaaagctcaagctgaatctggaaccaaatttgatgagattgatttgtcgagcggggaggaattcacagagtacgatgagaagggagaatgcccagtaatgatatcgaatttccgtgcaagcttcagcgtcaccaagtgaagttggtctctgttgtctattttctgattccctacacacttggtgtatgtaaaaaccatggggattatcatttctcaagttctaataaaattctcttttt

SEQ ID NO: 284 - protein, 184 aa, Arabidopsis thaliana
HRCLEQLECFLEQRRKKMVNYVLKITADLENLTNLQPSGGCDDSNFPYLFKLKCERCGEVTPKETCVTLNETFTPPGGRGTCHLVQKCKFCGREGNVTMIPGKGRPLTLEDSEAGEHAPLMVFDCRGYEPIDFGFGGYWKAQAESGTKFDEIDLSSGEEFTEYDEKGECPVMISNFRASFSVTK

SEQ ID NO: 285 - protein, 167 aa, Arabidopsis thaliana
MVNYVLKITADLENLTNLQPSGGCDDSNFPYLFKLKCERCGEVTPKETCVTLNETFTPPGGRGTCHLVQKCKFCGREGNVTMIPGKGRPLTLEDSEAGEHAPLMVFDCRGYEPIDFGFGGYWKAQAESGTKFDEIDLSSGEEFTEYDEKGECPVMISNFRASFSVTK

SEQ ID NO: 286 - DNA, 1363 bp, Arabidopsis thaliana
aaaattgaatcttcctcttcttcttgagtcttcagaacaacaacaaaaaacagaatcttgaaagaaagaaaaaaagaaaaaaacatgacagagaattctgaaaaaatcgatcgtttaaacgatctcacgacttttatctcgacgaagacaggagtgaaaggactcgtcgatgccgaaataaccgaagttcctagcatgtttcatgtcccttcttctattttatcaaacaacagaccttctgatatctccggcttaaacctcaccgtcccaatcatcgacctaggagatcgtaacacatcttcaagaaacgttgtcatttcgaagatcaaagacgcagctgagaattggggatttttccaagtgatcaatcatgatgttcctttaactgttcttgaagagatcaaagagagtgttcgaaggtttcatgaacaagatccagttgtcaagaaccaatatcttcctaccgataacaacaagagatttgtttataacaatgatttcgatctctatcattcttctcctttgaattggagagactctttcacttgttatattgctccagatcctccgaatccagaggaaatcccactagcttgcaggagtgcggcgatcgaatacacgaagcatgtaatggaattaggagctgtgctcttccaacttctctcagaagctttaggtttagactctgaggcacttaagaggattgattgtcttaagggtttgtttatgctctgccattactatccaccttgcccacaacctgacctaactttaggtataagtaaacacaccgacaactctttcctcacgcttcttcttcaagaccaaatcggtggtcttcaagttcttcatgaagattattgggtcgatgtccctcctgtacctggagctcttgttgtcaacattggtgatttcatgcagctgataacgaacgataagttcttgagcgtggagcatagggtacgaccgaacaaagatagaccgcggatttcagttgcgtgcttctttagctcgagtctttctccaaattccacggtttatggaccgattaaagatcttttgtctgatgaaaaccctgctaagtacaaagatatcaccataccagagtacactgcaggatttcttgcgagcatttttgatgaaaagtcgtatttgactaattacatgatatgaagaaaatacttgtccgagtgcaaaatatatatttgtgcgttttgcatatgttacgctacattttctttgtacccgctatagagttcctcaaccattgtaccaataagaaaaaatgttttctacttcatgcttaaaacagcattctaggcttgtagctaacaagtcaaactataagttatctttttcaaac

SEQ ID NO: 287 - protein, 362 aa, Arabidopsis thaliana
MTENSEKIDRLNDLTTFISTKTGVKGLVDAEITEVPSMFHVPSSILSNNRPSDISGLNLTVPIIDLGDRNTSSRNVVISKIKDAAENWGFFQVINHDVPLTVLEEIKESVRRFHEQDPVVKNQYLPTDNNKRFVYNNDFDLYHSSPLNWRDSFTCYIAPDPPNPEEIPLACRSAAIEYTKHVMELGAVLFQLLSEALGLDSEALKRIDCLKGLFMLCHYYPPCPQPDLTLGISKHTDNSFLTLLLQDQIGGLQVLHEDYWVDVPPVPGALVVNIGDFMQLITNDKFLSVEHRVRPNKDRPRISVACFFSSSLSPNSTVYGPIKDLLSDENPAKYKDITIPEYTAGFLASIFDEKSYLTNYMI

SEQ ID NO: 288 - protein, 325 aa, Arabidopsis thaliana
MFHVPSSILSNNRPSDISGLNLTVPIIDLGDRNTSSRNVVISKIKDAAENWGFFQVINHDVPLTVLEEIKESVRRFHEQDPVVKNQYLPTDNNKRFVYNNDFDLYHSSPLNWRDSFTCYIAPDPPNPEEIPLACRSAAIEYTKHVMELGAVLFQLLSEALGLDSEALKRIDCLKGLFMLCHYYPPCPQPDLTLGISKHTDNSFLTLLLQDQIGGLQVLHEDYWVDVPPVPGALVVNIGDFMQLITNDKFLSVEHRVRPNKDRPRISVACFFSSSLSPNSTVYGPIKDLLSDENPAKYKDITIPEYTAGFLASIFDEKSYLTNYMI

SEQ ID NO: 289 - DNA, 1444 bp, Arabidopsis thaliana
actgaattaggatactgtgtggtgttttgcaaaactgctcttgtgctatgactctggctaatgatttcggatattcgaccgctatgtcttcatcttattcagctcttcatactagtgtagaagacagataccacaagttgcctaactctttttgggtttcatcaggtcaggaactgatgaataaccctgtaccgtgtcagtcggtctctggtggcaattctggtggttatttgtttccttcttcctctggatactgcaatgtttcagctgtcttgcctcatggaaggaatttgcaaaaccagccacctgtttccaccgtgcctagagacagattggctatgcaggattgtcctttgatagctcaatcctcgttgattaatcatcaccctcaagagttcatagatccacttcatgagttctttgatttctctgatcatgttcctgttcagaatctacaagcagagagtagtggagtaagggtggactcatccgtggaacttcataagaaaagtgaatggcaagattgggcagatcagctgatttctgttgacgatggttctgagccaaattggtctgaacttcttggagattcaagttcccacaatccaaattcagagatacctacaccatttttggatgtaccaaggctagatataacagctaaccagcagcaacagatggtttcatcagaggaccagctcagcggcagaaactcatcatctagtgtagcaacatctaaacaacgtatgcgttggacaccagaacttcacgaggcattcgttgaagctgttaatcagcttggtggtagtgaacgagccacccctaaggctgttttgaagctcttgaataaccctggcttgaccatttatcatgtaaaaagccatttgcagaaatatagaacggcaaggtataaaccggagacttcggaagttacaggagaacctcaagagaagaagatgacatctattgaagatatcaaatctcttgacatgaaaacgagcgttgagatcacacaagctctacggttacaaatggaagtgcagaaacgtctccacgagcagctcgagatccaacggtcactgcagttacagattgaaaaacagggccggtacctacagatgatgttcgagaaacaacaaaagatacaagacaacaagagctcttcttcagaagcatcaccaaagcaatgcaatggttcatttgcagaagttgaagttggtcttgagacactaacaggggaccaaaatgaatctgcttcagcatcaaggaaacgtgtcagagaagattaaagcatgtttaatttgatctcgtttgacgaaacatgtttattgggaattaattgtggaaaccaactccagttttgttaaaagaatctgtttctttcttagctctgtattgttctagtttagaagcagttgatttggccttgcatggctgcaacacc

SEQ ID NO: 290 - protein, 413 aa, Arabidopsis thaliana
MTLANDFGYSTAMSSSYSALHTSVEDRYHKLPNSFWVSSGQELMNNPVPCQSVSGGNSGGYLFPSSSGYCNVSAVLPHGRNLQNQPPVSTVPRDRLAMQDCPLIAQSSLINHHPQEFIDPLHEFFDFSDHVPVQNLQAESSGVRVDSSVELHKKSEWQDWADQLISVDDGSEPNWSELLGDSSSHNPNSEIPTPFLDVPRLDITANQQQQMVSSEDQLSGRNSSSSVATSKQRMRWTPELHEAFVEAVNQLGGSERATPKAVLKLLNNPGLTIYHVKSHLQKYRTARYKPETSEVTGEPQEKKMTSIEDIKSLDMKTSVEITQALRLQMEVQKRLHEQLEIQRSLQLQIEKQGRYLQMMFEKQQKIQDNKSSSSEASPKQCNGSFAEVEVGLETLTGDQNESASASRKRVRED

SEQ ID NO: 291 - protein, 401 aa, Arabidopsis thaliana
MSSSYSALHTSVEDRYHKLPNSFWVSSGQELMNNPVPCQSVSGGNSGGYLFPSSSGYCNVSAVLPHGRNLQNQPPVSTVPRDRLAMQDCPLIAQSSLINHHPQEFIDPLHEFFDFSDHVPVQNLQAESSGVRVDSSVELHKKSEWQDWADQLISVDDGSEPNWSELLGDSSSHNPNSEIPTPFLDVPRLDITANQQQQMVSSEDQLSGRNSSSSVATSKQRMRWTPELHEAFVEAVNQLGGSERATPKAVLKLLNNPGLTIYHVKSHLQKYRTARYKPETSEVTGEPQEKKMTSIEDIKSLDMKTSVEITQALRLQMEVQKRLHEQLEIQRSLQLQIEKQGRYLQMMFEKQQKIQDNKSSSSEASPKQCNGSFAEVEVGLETLTGDQNESASASRKRVRED

SEQ ID NO: 292 - protein, 370 aa, Arabidopsis thaliana
MNNPVPCQSVSGGNSGGYLFPSSSGYCNVSAVLPHGRNLQNQPPVSTVPRDRLAMQDCPLIAQSSLINHHPQEFIDPLHEFFDFSDHVPVQNLQAESSGVRVDSSVELHKKSEWQDWADQLISVDDGSEPNWSELLGDSSSHNPNSEIPTPFLDVPRLDITANQQQQMVSSEDQLSGRNSSSSVATSKQRMRWTPELHEAFVEAVNQLGGSERATPKAVLKLLNNPGLTIYHVKSHLQKYRTARYKPETSEVTGEPQEKKMTSIEDIKSLDMKTSVEITQALRLQMEVQKRLHEQLEIQRSLQLQIEKQGRYLQMMFEKQQKIQDNKSSSSEASPKQCNGSFAEVEVGLETLTGDQNESASASRKRVRED

SEQ ID NO: 293 - DNA, 1173 bp, Arabidopsis thaliana
gaactctagtgttaagatttagcagagagtatccgaatgggaaattgtctctcagcttcgacacttcccaccgaaccaaatgctcccaaatcagtggaggagggtgtgaaagtcttcacggtggcagatctgaagaaagcgactaatgatttcggaaaccagatggaactaggagagagcttaggatacatcaatcccaaaacgttatctccggccaagaaaggtgttggcatggccgtcgcggtcaagaaaatttacttagccaatgaacaagcttttcaagattggcttgttgacgtagagtttctacgacataactctcatccaagcttggtgaagctaattggctactgttatgatcgtgatatgttgtttattgtttctgaatactttccaaatggaagcttaggaagttacatcagtagagatagtcgtccaaagtcattgccgtgggagacacgacttaagatatccataggagcggctcagtgtcttgccttcttgcactctaggaagcaagccggtctataccgcagatatctcactgcttcgaaaatcctgctcgactcggacttcaacgcaagagtttcctattttggaaagccaaaagtttctctcgatgaattggtatacaccatcgggttttcaaatgtagcacctagatatcaatacccacctcccgaatacatactctcagggatgtcgaacatggcgggcgatgtgtatagctttggtgttatactacttaaaatgttaactggtttaggaaaagacctcacaatctcagcaaagcgagaaataaaaaataaaaagtacaacattgtggagatgatcgatccagatttgaagaatagctatccacttgaagcgggaagacttatgtgcgagcttattaaacaatgcctagaggtagacccgaagatgcgaccaaccatgcaagaagtgctagataatctgaatgctatagctcagatttgaggagaaactatataagggttactaatgctgaaaacattgtttcactataagacagttataacatagtcaatgtatgcatttgtatacaataactcgtatatgacgagaagtattaagaaacaagacctaattctccattcttatccaccactcaagaacagagctatatgctaatcaactttgaacctttacact

SEQ ID NO: 294 - protein, 313 aa, Arabidopsis thaliana
MGNCLSASTLPTEPNAPKSVEEGVKVFTVADLKKATNDFGNQMELGESLGYINPKTLSPAKKGVGMAVAVKKIYLANEQAFQDWLVDVEFLRHNSHPSLVKLIGYCYDRDMLFIVSEYFPNGSLGSYISRDSRPKSLPWETRLKISIGAAQCLAFLHSRKQAGLYRRYLTASKILLDSDFNARVSYFGKPKVSLDELVYTIGFSNVAPRYQYPPPEYILSGMSNMAGDVYSFGVILLKMLTGLGKDLTISAKREIKNKKYNIVEMIDPDLKNSYPLEAGRLMCELIKQCLEVDPKMRPTMQEVLDNLNAIAQI

SEQ ID NO: 295 - protein, 271 aa, Arabidopsis thaliana
MELGESLGYINPKTLSPAKKGVGMAVAVKKIYLANEQAFQDWLVDVEFLRHNSHPSLVKLIGYCYDRDMLFIVSEYFPNGSLGSYISRDSRPKSLPWETRLKISIGAAQCLAFLHSRKQAGLYRRYLTASKILLDSDFNARVSYFGKPKVSLDELVYTIGFSNVAPRYQYPPPEYILSGMSNMAGDVYSFGVILLKMLTGLGKDLTISAKREIKNKKYNIVEMIDPDLKNSYPLEAGRLMCELIKQCLEVDPKMRPTMQEVLDNLNAIAQI

SEQ ID NO: 296 - protein, 248 aa, Arabidopsis thaliana
MAVAVKKIYLANEQAFQDWLVDVEFLRHNSHPSLVKLIGYCYDRDMLFIVSEYFPNGSLGSYISRDSRPKSLPWETRLKISIGAAQCLAFLHSRKQAGLYRRYLTASKILLDSDFNARVSYFGKPKVSLDELVYTIGFSNVAPRYQYPPPEYILSGMSNMAGDVYSFGVILLKMLTGLGKDLTISAKREIKNKKYNIVEMIDPDLKNSYPLEAGRLMCELIKQCLEVDPKMRPTMQEVLDNLNAIAQI

SEQ ID NO: 297 - DNA, 884 bp, Arabidopsis thaliana
aagcccatctctttgttacatatcttatatatctccctctctccctcttctccttctctcttttcagctctcttcggaagtgaagatggatatgtacaaagatgatagctcaccatactgttatttccatccaaaagaagagtatgttggagtttgtcctctctgtttgaacgagaggcttcttgttttagcttcaaaacagagatcatcaagaaccaaacactcttcctcttcaccaatcatcagcctccctaagatattcgccttgagctctctcctcagtcgcctcgatctccgtcaccggaaattccatccctcctccgatcttgacgtctccacaagccaagaagattcctttatatcgataaaattcgaaaacgacggaaacgcgtcgtgggaaaagaaagcagtagtgacaaaggtttgtgtagacaacaacaacaacaacacaacaaactcaacatgcaagaagcagcaatctcctataacgagcaataccagtatcgtagagcacaatagtgccaagtcatcgcttagatggcgcaagcgtattggtcatctattccacgtcatcaaactcaaatcaggatcgtccacgtcttcttgccatgtggcaccatctaaggtcgaaggaaccaaagtgaggaaacagggttggatggtgaggaccttaaccagaaaaaaatccaggaaaagtaaaagttgaatttttcattactttgattacccttttaaaaatatttttctacatatttttttttttagtttaatatttggtttggtcgttttttcaatgattgatgcttctgtttgaagaagaattatgtggaaggtttttttgtaagtaatgacgagacatggatttaaaagcgattgaactatcc

SEQ ID NO: 298 - protein, 234 aa, Arabidopsis thaliana
SPSLCYISYISPSLPLLLLSFQLSSEVKMDMYKDDSSPYCYFHPKEEYVGVCPLCLNERLLVLASKQRSSRTKHSSSSPIISLPKIFALSSLLSRLDLRHRKFHPSSDLDVSTSQEDSFISIKFENDGNASWEKKAVVTKVCVDNNNNNTTNSTCKKQQSPITSNTSIVEHNSAKSSLRWRKRIGHLFHVIKLKSGSSTSSCHVAPSKVEGTKVRKQGWMVRTLTRKKSRKSKS

SEQ ID NO: 299 - protein, 206 aa, Arabidopsis thaliana
MDMYKDDSSPYCYFHPKEEYVGVCPLCLNERLLVLASKQRSSRTKHSSSSPIISLPKIFALSSLLSRLDLRHRKFHPSSDLDVSTSQEDSFISIKFENDGNASWEKKAVVTKVCVDNNNNNTTNSTCKKQQSPITSNTSIVEHNSAKSSLRWRKRIGHLFHVIKLKSGSSTSSCHVAPSKVEGTKVRKQGWMVRTLTRKKSRKSKS

SEQ ID NO: 300 - protein, 204 aa, Arabidopsis thaliana
MYKDDSSPYCYFHPKEEYVGVCPLCLNERLLVLASKQRSSRTKHSSSSPIISLPKIFALSSLLSRLDLRHRKFHPSSDLDVSTSQEDSFISIKFENDGNASWEKKAVVTKVCVDNNNNNTTNSTCKKQQSPITSNTSIVEHNSAKSSLRWRKRIGHLFHVIKLKSGSSTSSCHVAPSKVEGTKVRKQGWMVRTLTRKKSRKSKS

SEQ ID NO: 301 - DNA, 1563 bp, Arabidopsis thaliana
atggttctgttttggaacattgccctccttttttcgtactttcaattgcttaaaaagagtatctttgcccccaaatcaagttcctcttcttcttgctccaaattcaatcattcacacacacctgtttgtgttataactggtgctacttcgggacttggtaaggccactgcgtttgctctttcaaggaaaggtttctacgttgttcttgttggacggtcctcgcacttactatcaaagaccttgagtgatattaagaggcagaacgaggatgccaaactcaaagcttttgaagttgacatgtcgtcttttcaattagttttaaagttcagaagctctctagagcaatggctttttgagtcagatttgcattcttcagtccagcttttggtgaacaatgctggaatactggcaacatctagtcgtccaactgttgaaggctttgacaggatgattgctacaaattatgtcggcgctttctctttgaccaaacttctcttaccgctcctgagaaacagccctgtgccttcaagagtagtgaatgttacatcttttacacatcgttctgcttttactgggaggtttgacatggattctgttactggagtgaacttttcaagatcaaagcaatatccttgtgctaggatctatgagtattctaaattatgccttctacttttctcgtacgagctgcatagacagcttcacctcatggatgattcacatcacatctctgttgtagcggtagatccaggagcagtaaaaacaaacataatgcatgagcttccttcatatatacaagtcattgcgttttgtggtctcaagattcttggactgatgcagtctccagaggatgcagctgaatctgtcattgatgctgctttagctccacctgaaatatcaggcaaatatttctttggcgggaggaccattgaatcttcaacactttccagtgacccgaaaatggctaaggaactttgggacacatcatgtctcatatttaacgaattgcaagaagcatccacaccacaatgtgtaatctcatcgctaaccaaaccaagaatcatattcccaaatcacaatccgcttttgtgtctttccacttgcataagtgaaagagccaagacaaagaaaggagcttcttctgtttttgtccatacttttgagaagatgcaggacatgagagatcaaaatcctccacaaggatatccagctgcagaacaagtatctgaacagcctggacaagacaagaagaagaagaaaccacggtttttcgagacaaagcagaaaggagacagaggcttcattgaaggatgtctctttgcactatgctgctgctggatttgtgaaatgtgtttctaaggaaacgaagggacacgtgacgcttctttcttctgtatctaagaatggctttccttatctatagttttacctgagagagattgaagtttcaggttgctcagtttcaatctccctaatctatttatgtggtgtgtttattgaaagaagataattatactaataatgtaaagggtcatactattttatgggtcttacaagttttag

SEQ ID NO: 302 - protein, 452 aa, Arabidopsis thaliana
MVLFWNIALLFSYFQLLKKSIFAPKSSSSSSCSKFNHSHTPVCVITGATSGLGKATAFALSRKGFYVVLVGRSSHLLSKTLSDIKRQNEDAKLKAFEVDMSSFQLVLKFRSSLEQWLFESDLHSSVQLLVNNAGILATSSRPTVEGFDRMIATNYVGAFSLTKLLLPLLRNSPVPSRVVNVTSFTHRSAFTGRFDMDSVTGVNFSRSKQYPCARIYEYSKLCLLLFSYELHRQLHLMDDSHHISVVAVDPGAVKTNIMHELPSYIQVIAFCGLKILGLMQSPEDAAESVIDAALAPPEISGKYFFGGRTIESSTLSSDPKMAKELWDTSCLIFNELQEASTPQCVISSLTKPRIIFPNHNPLLCLSTCISERAKTKKGASSVFVHTFEKMQDMRDQNPPQGYPAAEQVSEQPGQDKKKKKPRFFETKQKGDRGFIEGCLFALCCCWICEMCF

SEQ ID NO: 303 - protein, 353 aa, Arabidopsis thaliana
MSSFQLVLKFRSSLEQWLFESDLHSSVQLLVNNAGILATSSRPTVEGFDRMIATNYVGAFSLTKLLLPLLRNSPVPSRVVNVTSFTHRSAFTGRFDMDSVTGVNFSRSKQYPCARIYEYSKLCLLLFSYELHRQLHLMDDSHHISVVAVDPGAVKTNIMHELPSYIQVIAFCGLKILGLMQSPEDAAESVIDAALAPPEISGKYFFGGRTIESSTLSSDPKMAKELWDTSCLIFNELQEASTPQCVISSLTKPRIIFPNHNPLLCLSTCISERAKTKKGASSVFVHTFEKMQDMRDQNPPQGYPAAEQVSEQPGQDKKKKKPRFFETKQKGDRGFIEGCLFALCCCWICEMCF

SEQ ID NO: 304 - protein, 303 aa, Arabidopsis thaliana
MIATNYVGAFSLTKLLLPLLRNSPVPSRVVNVTSFTHRSAFTGRFDMDSVTGVNFSRSKQYPCARIYEYSKLCLLLFSYELHRQLHLMDDSHHISVVAVDPGAVKTNIMHELPSYIQVIAFCGLKILGLMQSPEDAAESVIDAALAPPEISGKYFFGGRTIESSTLSSDPKMAKELWDTSCLIFNELQEASTPQCVISSLTKPRIIFPNHNPLLCLSTCISERAKTKKGASSVFVHTFEKMQDMRDQNPPQGYPAAEQVSEQPGQDKKKKKPRFFETKQKGDRGFIEGCLFALCCCWICEMCF

SEQ ID NO: 305 - DNA, 1338 bp, Arabidopsis thaliana
tgaaaatactatgaacttgatccttgcatcgttctctttggccccttgcttctgtgttcgattctttccttcaaaccataacaatctcaatctcttattcccagggcaacgaaagattcaagttagttgcggtggtaagagtgaggtgttgaagagtgatacaatggaacctcatgaagcagaaacgtttgtgaacaagagaaccctttatgctcccattgagccatatagcagtggaaatttaaaggtttcagatgttcacactctctactgggagcaatcaggcaaacccgatggacacccggttgtttttcttcacggcgggccgggaggagggacggctcctagtaataggagattcttcgatccggagttttatcggattgttctgtttgatcagagaggtgcggggaagagtacaccgcatgcttgtttggaggaaaacaccacatgggaccttgtgaatgatattgaaaaactaagagaacatttgaaaatacctgaatggctggtttttggaggatcatggggaagcactctagctcttgcatacagtcagtctcaccctgacaaggttactggtttggtccttagagggatctttttgttgcgtaaaaaggagattgactggttttacgagggcggtgctgctgctatttaccctgatgcttgggaggagttcagagatcttattccagaaaacgagagaggtagtagccttgtggacgcgtatcacaaaagattgaattctgatgatctggaaattcaatacgcagctgcaagagcttggactaaatgggaaatgatgactgcttatcttcgtccaaatcttgaaaacgttcaaaaggcagaggatgataaattttcattggcgtttgcaaggattgaaaatcactactttgttaacaaaggtttcttcccgtcggactcacacttgctagacaatgttgataaaatacgacatatcaagaccaccattgttcagggaaggtatgacgtatgctgtcctatgatgtctgcttgggatctgcacaaagcatggccagaggcagaactcaagattgtttatgatgctgggcactcggcaaatgagccaggaatatcagcggaactcgtggttgccaatgaaaagatgaaagcacttatgggatgaagtatttgatggaatgaaagctgctcattttgttcatttctttgggacctttgttcatattttcaagtttgttgctgcaaagtaaatatcacattcagagttagttgttaacgcgaaaccgaatgttatttccatggacgtttatacccaaatgaaaaagacaatgacataggtgcagtgttttg

SEQ ID NO: 306 - protein, 383 aa, Arabidopsis thaliana
ENTMNLILASFSLAPCFCVRFFPSNHNNLNLLFPGQRKIQVSCGGKSEVLKSDTMEPHEAETFVNKRTLYAPIEPYSSGNLKVSDVHTLYWEQSGKPDGHPVVFLHGGPGGGTAPSNRRFFDPEFYRIVLFDQRGAGKSTPHACLEENTTWDLVNDIEKLREHLKIPEWLVFGGSWGSTLALAYSQSHPDKVTGLVLRGIFLLRKKEIDWFYEGGAAAIYPDAWEEFRDLIPENERGSSLVDAYHKRLNSDDLEIQYAAARAWTKWEMMTAYLRPNLENVQKAEDDKFSLAFARIENHYFVNKGFFPSDSHLLDNVDKIRHIKTTIVQGRYDVCCPMMSAWDLHKAWPEAELKIVYDAGHSANEPGISAELVVANEKMKALMG

SEQ ID NO: 307 - protein, 380 aa, Arabidopsis thaliana
MNLILASFSLAPCFCVRFFPSNHNNLNLLFPGQRKIQVSCGGKSEVLKSDTMEPHEAETFVNKRTLYAPIEPYSSGNLKVSDVHTLYWEQSGKPDGHPVVFLHGGPGGGTAPSNRRFFDPEFYRIVLFDQRGAGKSTPHACLEENTTWDLVNDIEKLREHLKIPEWLVFGGSWGSTLALAYSQSHPDKVTGLVLRGIFLLRKKEIDWFYEGGAAAIYPDAWEEFRDLIPENERGSSLVDAYHKRLNSDDLEIQYAAARAWTKWEMMTAYLRPNLENVQKAEDDKFSLAFARIENHYFVNKGFFPSDSHLLDNVDKIRHIKTTIVQGRYDVCCPMMSAWDLHKAWPEAELKIVYDAGHSANEPGISAELVVANEKMKALMG

SEQ ID NO: 308 - protein, 329 aa, Arabidopsis thaliana
MEPHEAETFVNKRTLYAPIEPYSSGNLKVSDVHTLYWEQSGKPDGHPVVFLHGGPGGGTAPSNRRFFDPEFYRIVLFDQRGAGKSTPHACLEENTTWDLVNDIEKLREHLKIPEWLVFGGSWGSTLALAYSQSHPDKVTGLVLRGIFLLRKKEIDWFYEGGAAAIYPDAWEEFRDLIPENERGSSLVDAYHKRLNSDDLEIQYAAARAWTKWEMMTAYLRPNLENVQKAEDDKFSLAFARIENHYFVNKGFFPSDSHLLDNVDKIRHIKTTIVQGRYDVCCPMMSAWDLHKAWPEAELKIVYDAGHSANEPGISAELVVANEKMKALMG

SEQ ID NO: 309 - DNA, 659 bp, Arabidopsis thaliana
attattattcttcgtctacttcacacggaatagagatagagagagagagagatccagaaaaagacgaacaacaatggcgttgcaatggctgattctatcgtatgtggtggccgtcgaagtagtaatcaccctcgtgttgactctcccttaccctatgcttcttaagaaacgtgtagttcagcttgtctcattgattctccaacctgctgcttccatcgtcgccttcgccggatttcagctcctcgatatttactggaaggctgagcatagactatcttgttcatctgaggtttgcactgctacagaacgtgatcgctacgagaaatctatctacaaggctcagaggaacgtggttctatgcgctgcaggaattctactctactggtgcatctaccgcatctgcaaatacaacaaagacctggagcgcttggaggcaacggagaagagattcaaggaagagtaataatcttcacgagtatagggagttggttcctcaaaaccattatataagtaaagcttttttttattgcatttttacgttctaatattattggacctgaatgaaactaagagtatcgtgaacagcctttgcacactatatgtgtatatcatcagtgtccatttctttgatcatatttcaagaacaaccttaatttttc

SEQ ID NO: 310 - protein, 153 aa, Arabidopsis thaliana
LLFFVYFTRNRDRERERSRKRRTTMALQWLILSYVVAVEVVITLVLTLPYPMLLKKRVVQLVSLILQPAASIVAFAGFQLLDIYWKAEHRLSCSSEVCTATERDRYEKSIYKAQRNVVLCAAGILLYWCIYRICKYNKDLERLEATEKRFKEE

SEQ ID NO: 311 - protein, 129 aa, Arabidopsis thaliana
MALQWLILSYVVAVEVVITLVLTLPYPMLLKKRVVQLVSLILQPAASIVAFAGFQLLDIYWKAEHRLSCSSEVCTATERDRYEKSIYKAQRNVVLCAAGILLYWCIYRICKYNKDLERLEATEKRFKEE

SEQ ID NO: 312 - protein, 102 aa, Arabidopsis thaliana
MLLKKRVVQLVSLILQPAASIVAFAGFQLLDIYWKAEHRLSCSSEVCTATERDRYEKSIYKAQRNVVLCAAGILLYWCIYRICKYNKDLERLEATEKRFKEE

SEQ ID NO: 313 - DNA, 1169 bp, Arabidopsis thaliana
tcgtttgtgtttttgattggcggagaattggtgatagataagcttcttcttccctcttctcaacttggtggatctgtcatcgatggcctctttgatgctcaacggggccattaccttccccaaaggtttaggttcccctggttccaatttgcatgccagatcgattcctcggccgaccttactctcagttacccgaacctccacacctagactctcggtggctactagatgcagcagcagcagcgtgtcgtcttcccggccatcggcgcaacctaggttcattcagcacaagaaggaggcttactggttctacaggttcttatccatcgtatacgaccatgtcatcaatcctgggcattggaccgaggatatgagagacgacgctcttgagccagcggatctcagccatccggacatgcgagtggtcgatgtcggcggcggaactggtttcactactctgggcatagtcaagacagtgaaggccaagaatgtgaccattctggaccagtcgccacatcagctggccaaagcaaagcaaaaggagccgttgaaagaatgcaagatcgtcgagggagatgctgaggatcttccttttccaaccgattatgctgacagatacgtttctgctggaagcattgagtactggccggacccgcagaggggaataagggaagcgtacagggttctcaagatcggtggcaaagcgtgtctcatcggccctgtctacccaaccttctggctctctcgcttcttttctgatgtctggatgctcttccccaaggaggaagaatacattgagtggttcaagaatgccggtttcaaggacgttcagctcaagaggattggccccaagtggtaccgtggtgttcgcaggcacggccttatcatgggatattctgtcactggtgttaaacctgcctccggtgactctcctctccagcttggtccaaaggaagaggacgtagagaagcctgtcaacaaccccttctccttcttgggacgcttcctcctgggaactctagcagctgcctggtttgtgttaatccctatctacatgtggatcaaggatcagatcgttcccaaagaccaacccatctgatccttctcttctaggacatgatcattgtatcattgtaaacccctcttgtggtaaagaaagattcgagtcc

SEQ ID NO: 314 - protein, 338 aa, Arabidopsis thaliana
MASLMLNGAITFPKGLGSPGSNLHARSIPRPTLLSVTRTSTPRLSVATRCSSSSVSSSRPSAQPRFIQHKKEAYWFYRFLSIVYDHVINPGHWTEDMRDDALEPADLSHPDMRVVDVGGGTGFTTLGIVKTVKAKNVTILDQSPHQLAKAKQKEPLKECKIVEGDAEDLPFPTDYADRYVSAGSIEYWPDPQRGIREAYRVLKIGGKACLIGPVYPTFWLSRFFSDVWMLFPKEEEYIEWFKNAGFKDVQLKRIGPKWYRGVRRHGLIMGYSVTGVKPASGDSPLQLGPKEEDVEKPVNNPFSFLGRFLLGTLAAAWFVLIPIYMWIKDQIVPKDQPI

SEQ ID NO: 315 - protein, 334 aa, Arabidopsis thaliana
MLNGAITFPKGLGSPGSNLHARSIPRPTLLSVTRTSTPRLSVATRCSSSSVSSSRPSAQPRFIQHKKEAYWFYRFLSIVYDHVINPGHWTEDMRDDALEPADLSHPDMRVVDVGGGTGFTTLGIVKTVKAKNVTILDQSPHQLAKAKQKEPLKECKIVEGDAEDLPFPTDYADRYVSAGSIEYWPDPQRGIREAYRVLKIGGKACLIGPVYPTFWLSRFFSDVWMLFPKEEEYIEWFKNAGFKDVQLKRIGPKWYRGVRRHGLIMGYSVTGVKPASGDSPLQLGPKEEDVEKPVNNPFSFLGRFLLGTLAAAWFVLIPIYMWIKDQIVPKDQPI

SEQ ID NO: 316 - protein, 242 aa, Arabidopsis thaliana
MRDDALEPADLSHPDMRVVDVGGGTGFTTLGIVKTVKAKNVTILDQSPHQLAKAKQKEPLKECKIVEGDAEDLPFPTDYADRYVSAGSIEYWPDPQRGIREAYRVLKIGGKACLIGPVYPTFWLSRFFSDVWMLFPKEEEYIEWFKNAGFKDVQLKRIGPKWYRGVRRHGLIMGYSVTGVKPASGDSPLQLGPKEEDVEKPVNNPFSFLGRFLLGTLAAAWFVLIPIYMWIKDQIVPKDQPI

SEQ ID NO: 317 - DNA, 1354 bp, Arabidopsis thaliana
tgggacaagaactgatagagtgggataagagacaaataaggagaatcaaacaagcaatccgatcgatctaccagatcgccatgattcttacaagatgcttacccttgatatggctatctctacttactgtgtgtgctgctgggaggacattgcaccctctccctgttaaaggacccaaaactgtcaagcttcaacttcagacttcacgtccttataacatcgcacacagaggttccaatggagagatcccagaagaaactacagctgcatacttgaaagcaattgaagaaggcacagacttcatagaaacagatatcttatcatccaaagatggtgtgctcatatgtttccatgattgtattctcgacgaaacaaccaatgttgcgagccacaaggagtttgcagatcgtaaaaggacatatgatgtccaaggattcaacattactggctttttcacttttgattttacacttaaagaactaaagcaactacgtataaagcagcgatatgcttttcgggatcagcaatacaacggaatgtaccctatcattacatttgaggaatttcttaccattgctcgggatgctccaagagttgttggaatatatcctgagattaaaaatccagttttaatgaaccagcatgtcaaatggcctggtggtaagaaatttgaggataaagttgtggagacacttaagaagtatgggtatggaggctcgtatttgtccaagaagtggttgaaaaaaccactatttattcagtcatttgccccaacttcactcgtgtacatatcaaacttgacagactcgccgaaagtccttctaatagacgatgttaccatgccaacgcaagacactaaccagacatatgcagagatcacatcagatgcgtatttcgaatacatcaagcaatatgttgtgggtatcggaccatggaaggatacaattgttccggtaaacaacaactatgtgctagcccccacagatttggtcaaaagagctcacgcacacaatctgcaggtgcatccctatacgtacaggaatgaacacgaattcttacactataactttagccaagacccgtataaggagtacgactactggatcaatgagattggagttgatggactcttcactgatttcacaggcagcctccataactttcaagaatggacatctccattacctgatacctccaagtctccacgacagcttcttagtcaaattgcctcattggtcctcccttatgcaaaggcttgaagttccacataaacacctatcagtaatcctattgtttgcaattaattgtattgaataaagttacaatgattattctgaagaagaacacagttgtc

SEQ ID NO: 318 - protein, 418 aa, Arabidopsis thaliana
GQELIEWDKRQIRRIKQAIRSIYQIAMILTRCLPLIWLSLLTVCAAGRTLHPLPVKGPKTVKLQLQTSRPYNIAHRGSNGEIPEETTAAYLKAIEEGTDFIETDILSSKDGVLICFHDCILDETTNVASHKEFADRKRTYDVQGFNITGFFTFDFTLKELKQLRIKQRYAFRDQQYNGMYPIITFEEFLTIARDAPRVVGIYPEIKNPVLMNQHVKWPGGKKFEDKVVETLKKYGYGGSYLSKKWLKKPLFIQSFAPTSLVYISNLTDSPKVLLIDDVTMPTQDTNQTYAEITSDAYFEYIKQYVVGIGPWKDTIVPVNNNYVLAPTDLVKRAHAHNLQVHPYTYRNEHEFLHYNFSQDPYKEYDYWINEIGVDGLFTDFTGSLHNFQEWTSPLPDTSKSPRQLLSQIASLVLPYAKA

SEQ ID NO: 319 - protein, 392 aa, Arabidopsis thaliana
MILTRCLPLIWLSLLTVCAAGRTLHPLPVKGPKTVKLQLQTSRPYNIAHRGSNGEIPEETTAAYLKAIEEGTDFIETDILSSKDGVLICFHDCILDETTNVASHKEFADRKRTYDVQGFNITGFFTFDFTLKELKQLRIKQRYAFRDQQYNGMYPIITFEEFLTIARDAPRVVGIYPEIKNPVLMNQHVKWPGGKKFEDKVVETLKKYGYGGSYLSKKWLKKPLFIQSFAPTSLVYISNLTDSPKVLLIDDVTMPTQDTNQTYAEITSDAYFEYIKQYVVGIGPWKDTIVPVNNNYVLAPTDLVKRAHAHNLQVHPYTYRNEHEFLHYNFSQDPYKEYDYWINEIGVDGLFTDFTGSLHNFQEWTSPLPDTSKSPRQLLSQIASLVLPYAKA

SEQ ID NO: 320 - protein, 240 aa, Arabidopsis thaliana
MYPIITFEEFLTIARDAPRVVGIYPEIKNPVLMNQHVKWPGGKKFEDKVVETLKKYGYGGSYLSKKWLKKPLFIQSFAPTSLVYISNLTDSPKVLLIDDVTMPTQDTNQTYAEITSDAYFEYIKQYVVGIGPWKDTIVPVNNNYVLAPTDLVKRAHAHNLQVHPYTYRNEHEFLHYNFSQDPYKEYDYWINEIGVDGLFTDFTGSLHNFQEWTSPLPDTSKSPRQLLSQIASLVLPYAKA

SEQ ID NO: 321 - DNA, 709 bp, Arabidopsis thaliana
tggatcgaatcataaaccaaacaaatctttcttttaaaagaagcggacacaaaccctaaccaccaaccctctccgtcgtcaaatttcccggcgaaagatgaaacgaattgttcgaatttcattcacagacatggaagcaaccgattcttcaagcagcgaagacgagtcaccaccgtcatcacgccgtcgaggtaagaagctagtcaaggaaatcgtaatcgatcattctgatcccccggaggtcggaaaaactcggttcaaaatcaggattccggcgagtttacttgctgcgaggaatacgacggcgaataagaagaagttccgtggcgtgaggcagagaccatgggggaagtgggcggctgagattagatgtggtagagttaaaggaagacctgaacgaatttggcttggaacttttgaaacagctgaagaagctgctcttgcttatgataacgctgcgattcagttgattggacctgatgcgccgactaattttggccgtcctgatgttgattctgcggtggtgaaaaagcaagattctgatgctagtggtggtgcttctgaagaagttgtttgattttcttgtttataactaactttgcaaggttacttttgtttatcatcatcttttgtaaatttgatcatcttgctctttgctttttaacttctcttgtacatgtttgaattataaaagttctaatttttcaac

SEQ ID NO: 322 - protein, 159 aa, Arabidopsis thaliana
MKRIVRISFTDMEATDSSSSEDESPPSSRRRGKKLVKEIVIDHSDPPEVGKTRFKIRIPASLLAARNTTANKKKFRGVRQRPWGKWAAEIRCGRVKGRPERIWLGTFETAEEAALAYDNAAIQLIGPDAPTNFGRPDVDSAVVKKQDSDASGGASEEVV

SEQ ID NO: 323 - protein, 148 aa, Arabidopsis thaliana
MEATDSSSSEDESPPSSRRRGKKLVKEIVIDHSDPPEVGKTRFKIRIPASLLAARNTTANKKKFRGVRQRPWGKWAAEIRCGRVKGRPERIWLGTFETAEEAALAYDNAAIQLIGPDAPTNFGRPDVDSAVVKKQDSDASGGASEEVV

SEQ ID NO: 324 - DNA, 2347 bp, Arabidopsis thaliana
gacgaacgagaagactcttttttgaattttgattcttcttcttctccgtttctttcgctacttcctcagcttcgtcaccgtcgaaaattcttcacgttttcctcggaattttccaattgtcttctccaattctcttgcgatcgttgaagatctgaaaaattcgaagcgtttgatcatggcttcgtacactcccaagaacattctcatcaccggagctgctggtttcattgcgtctcatgtcgccaacagactcatacgaagctatcctgattacaaaatcgttgtgcttgacaagcttgattactgttcaaatctcaagaatctcaatccttctaagcactctccgaacttcaagtttgtcaaaggtgatatcgctagtgctgacttggtgaatcatcttctcatcactgaaggtattgacaccatcatgcatttcgctgctcagactcacgtcgacaattccttcggtaacagtttcgagtttactaagaataatatctatggaactcatgtccttcttgaggcttgtaaagttactggtcagattaggaggtttattcatgttagtactgatgaagtttatggtgaaactgatgaggatgctcttgttggtaaccatgaggcttctcagctgcttccgacgaatccttactctgccacgaaagctggtgctgagatgcttgttatggcttatggtagatcttatggtttgcctgttattaccactcgtgggaataacgtctatggaccgaatcagtttcctgagaagttgattcctaagttcattttgctggcaatgagagggcaggttcttcccattcatggagatggatcaaatgtcaggagctacctctactgtgaagacgttgctgaggcttttgaagttgttcttcacaagggagaagttggccatgtttacaatattgggacgaagaaggagaggagagtgaatgatgttgccaaagacatctgcaaactcttcaacatggaccctgaggcgaacatcaagtttgtcgacaacagaccttttaacgatcagaggtacttccttgacgatcagaagctcaaaaagttgggatggtcagagagaaccacgtgggaagaagggttgaagaaaactatggattggtacacacagaacccggagtggtggggtgatgtttctggagcattgcttcctcatccaaggatgctgatgatgcctggtgggcgacactttgatggctccgaggacaattcgctggcagctactttatctgaaaaaccaagtcaaacccatatggttgttccaagccaaaggagcaacggcacacctcaaaagccttcgctgaagttcctgatatatggaaagaccggatggatcggtggtctgcttggaaagatatgtgataagcaaggaattgcttacgagtatgggaaaggtcggttggaggatcgatcttctcttctgcaggatattcagagtgttaagccaacccatgttttcaattccgctggtgtgactgggagacccaatgttgactggtgtgagtctcacaagaccgagactatccgtgccaatgtagctggcacattgactctagctgatgtctgcagagagcacggactcctaatgatgaatttcgctactggttgtatattcgaatatgacgacaagcatccggaaggttcaggaattggcttcaaggaggaagacacacccaacttcactggctctttctactcgaaaaccaaagccatggtcgaggagctgctaaaggagtatgacaacgtatgcacattgagggtaaggatgccgatctcctcggatctaaacaacccgcgcaacttcatcaccaagatctccaggtacaacaaagtagtgaacatcccaaacagcatgactgtgttggacgagttattaccaatctccatcgagatggcgaaaagaaacttgaaaggaatctggaacttcacaaacccaggtgtggtgagccacaacgagatcctagagatgtacagagactacatcaaccctgaattcaaatgggcaaacttcacattagaggagcaagctaaagtcattgtggctccaagaagcaacaacgagatggatgcttccaagctcaagaaagagttccctgagctactctctatcaaggagtctctgattaagtatgcatacgggccaaacaagaaaacctgaagagaatgattgtgattcgtcattagataatcacctttaatatcagtttcgtgtattttgttttgttattgtttaattaccccttctttcattagatttgcttaaggggtgtatttgtagttcgaatattatatgtaataagagcttgttctcatttgtgtc

SEQ ID NO: 325 - protein, 669 aa, Arabidopsis thaliana
MASYTPKNILITGAAGFIASHVANRLIRSYPDYKIVVLDKLDYCSNLKNLNPSKHSPNFKFVKGDIASADLVNHLLITEGIDTIMHFAAQTHVDNSFGNSFEFTKNNIYGTHVLLEACKVTGQIRRFIHVSTDEVYGETDEDALVGNHEASQLLPTNPYSATKAGAEMLVMAYGRSYGLPVITTRGNNVYGPNQFPEKLIPKFILLAMRGQVLPIHGDGSNVRSYLYCEDVAEAFEVVLHKGEVGHVYNIGTKKERRVNDVAKDICKLFNMDPEANIKFVDNRPFNDQRYFLDDQKLKKLGWSERTTWEEGLKKTMDWYTQNPEWWGDVSGALLPHPRMLMMPGGRHFDGSEDNSLAATLSEKPSQTHMVVPSQRSNGTPQKPSLKFLIYGKTGWIGGLLGKICDKQGIAYEYGKGRLEDRSSLLQDIQSVKPTHVFNSAGVTGRPNVDWCESHKTETIRANVAGTLTLADVCREHGLLMMNFATGCIFEYDDKHPEGSGIGFKEEDTPNFTGSFYSKTKAMVEELLKEYDNVCTLRVRMPISSDLNNPRNFITKISRYNKVVNIPNSMTVLDELLPISIEMAKRNLKGIWNFTNPGVVSHNEILEMYRDYINPEFKWANFTLEEQAKVIVAPRSNNEMDASKLKKEFPELLSIKESLIKYAYGPNKKT

SEQ ID NO: 326 - protein, 585 aa, Arabidopsis thaliana
MHFAAQTHVDNSFGNSFEFTKNNIYGTHVLLEACKVTGQIRRFIHVSTDEVYGETDEDALVGNHEASQLLPTNPYSATKAGAEMLVMAYGRSYGLPVITTRGNNVYGPNQFPEKLIPKFILLAMRGQVLPIHGDGSNVRSYLYCEDVAEAFEVVLHKGEVGHVYNIGTKKERRVNDVAKDICKLFNMDPEANIKFVDNRPFNDQRYFLDDQKLKKLGWSERTTWEEGLKKTMDWYTQNPEWWGDVSGALLPHPRMLMMPGGRHFDGSEDNSLAATLSEKPSQTHMVVPSQRSNGTPQKPSLKFLIYGKTGWIGGLLGKICDKQGIAYEYGKGRLEDRSSLLQDIQSVKPTHVFNSAGVTGRPNVDWCESHKTETIRANVAGTLTLADVCREHGLLMMNFATGCIFEYDDKHPEGSGIGFKEEDTPNFTGSFYSKTKAMVEELLKEYDNVCTLRVRMPISSDLNNPRNFITKISRYNKVVNIPNSMTVLDELLPISIEMAKRNLKGIWNFTNPGVVSHNEILEMYRDYINPEFKWANFTLEEQAKVIVAPRSNNEMDASKLKKEFPELLSIKESLIKYAYGPNKKT

SEQ ID NO: 327 - protein, 502 aa, Arabidopsis thaliana
MLVMAYGRSYGLPVITTRGNNVYGPNQFPEKLIPKFILLAMRGQVLPIHGDGSNVRSYLYCEDVAEAFEVVLHKGEVGHVYNIGTKKERRVNDVAKDICKLFNMDPEANIKFVDNRPFNDQRYFLDDQKLKKLGWSERTTWEEGLKKTMDWYTQNPEWWGDVSGALLPHPRMLMMPGGRHFDGSEDNSLAATLSEKPSQTHMVVPSQRSNGTPQKPSLKFLIYGKTGWIGGLLGKICDKQGIAYEYGKGRLEDRSSLLQDIQSVKPTHVFNSAGVTGRPNVDWCESHKTETIRANVAGTLTLADVCREHGLLMMNFATGCIFEYDDKHPEGSGIGFKEEDTPNFTGSFYSKTKAMVEELLKEYDNVCTLRVRMPISSDLNNPRNFITKISRYNKVVNIPNSMTVLDELLPISIEMAKRNLKGIWNFTNPGVVSHNEILEMYRDYINPEFKWANFTLEEQAKVIVAPRSNNEMDASKLKKEFPELLSIKESLIKYAYGPNKKT

SEQ ID NO: 328 - DNA, 1379 bp, Arabidopsis thaliana
gactttcttcttctcctatctaagttcaattcatttgatattccttctaaaaatggggcaacaacaatcacagtccaaggatgagatgctgtttcaagaagtgagtaacaacaacgtcgaaggtatcaaatcacttcaccatgaaggagcaggactcgagggggtggataaattagggagaacaccattaatcttagcttgtacgaacgacgatctatatgatgtagcaaaaactctgcttgagttgggctccaatgtcaatgcttatcgttctggttgcaatggtgggactcctctgcaccatgctgcaaaaagaggtctcgtacacacggttaagttacttctgtctcacggtgcaaatccattggttcttgatgatgatgttaagacagctctcgaggttgctagagatgaaggttacagtaatgtcgtacgcgcaatcgagagtcatatctgcttgttctctggttgtatgcgtgagtattctggctccagcttgcttaatttatttgctcctcagcttctttcaagaaaagtatgggtagttgtcgtaccaactggttcaagaaaccctacaaagcctttaaagttggagttggttctgtatgatagtattcaggatgcacaaccaagaatggtgatacctttgtggaaagcaaacttagaggaaccaaaatcatttcggtgtgatgattcagtgatgattattgatgactccagaagtccaaagtccatgaggcagagaagagaaagcggattcatttctcaggcgaggcgttgggctcaagtcgatagacaaatacgtcttaagctagcagctgagatcaaaggcgacatgaaacagatgaattggttttctgaggcatgtaaaggagttccacagccaatgaatcctccaaggtttatgaaaacatctcaagcaacaacaacaacaaccaatgttcctgcactaagtgatgatgctttgactcgtgtcgccatgtcacttccttctccaaaaactgcgaataaagaagatggactgtgtgtgatttgtgtggatgcaccatctgaagcagtgtgtgtgccgtgtggacatgtcgccggatgcatttcttgcttgaaagagattgaaaacaagaaaatgggatgtcctgtttgtcgcgccaacattgatcaggtcattaagctatatcatgtttgaagcatatctcctctatggctggaagatattgaaactatctcctattttttactttgtctttaaaagataactacaaatttttttattgtgtgtatgttatgtggtgaagtcaaagaagtcgaaatatagaatcacgacaagtttagtttgtctttttatctttgttacatgatcaatgttaatttttccttcaatc

SEQ ID NO: 329 - protein, 393 aa, Arabidopsis thaliana
TFFFSYLSSIHLIFLLKMGQQQSQSKDEMLFQEVSNNNVEGIKSLHHEGAGLEGVDKLGRTPLILACTNDDLYDVAKTLLELGSNVNAYRSGCNGGTPLHHAAKRGLVHTVKLLLSHGANPLVLDDDVKTALEVARDEGYSNVVRAIESHICLFSGCMREYSGSSLLNLFAPQLLSRKVWVVVVPTGSRNPTKPLKLELVLYDSIQDAQPRMVIPLWKANLEEPKSFRCDDSVMIIDDSRSPKSMRQRRESGFISQARRWAQVDRQIRLKLAAEIKGDMKQMNWFSEACKGVPQPMNPPRFMKTSQATTTTTNVPALSDDALTRVAMSLPSPKTANKEDGLCVICVDAPSEAVCVPCGHVAGCISCLKEIENKKMGCPVCRANIDQVIKLYHV

SEQ ID NO: 330 - protein, 376 aa, Arabidopsis thaliana
MGQQQSQSKDEMLFQEVSNNNVEGIKSLHHEGAGLEGVDKLGRTPLILACTNDDLYDVAKTLLELGSNVNAYRSGCNGGTPLHHAAKRGLVHTVKLLLSHGANPLVLDDDVKTALEVARDEGYSNVVRAIESHICLFSGCMREYSGSSLLNLFAPQLLSRKVWVVVVPTGSRNPTKPLKLELVLYDSIQDAQPRMVIPLWKANLEEPKSFRCDDSVMIIDDSRSPKSMRQRRESGFISQARRWAQVDRQIRLKLAAEIKGDMKQMNWFSEACKGVPQPMNPPRFMKTSQATTTTTNVPALSDDALTRVAMSLPSPKTANKEDGLCVICVDAPSEAVCVPCGHVAGCISCLKEIENKKMGCPVCRANIDQVIKLYHV

SEQ ID NO: 331 - protein, 365 aa, Arabidopsis thaliana
MLFQEVSNNNVEGIKSLHHEGAGLEGVDKLGRTPLILACTNDDLYDVAKTLLELGSNVNAYRSGCNGGTPLHHAAKRGLVHTVKLLLSHGANPLVLDDDVKTALEVARDEGYSNVVRAIESHICLFSGCMREYSGSSLLNLFAPQLLSRKVWVVVVPTGSRNPTKPLKLELVLYDSIQDAQPRMVIPLWKANLEEPKSFRCDDSVMIIDDSRSPKSMRQRRESGFISQARRWAQVDRQIRLKLAAEIKGDMKQMNWFSEACKGVPQPMNPPRFMKTSQATTTTTNVPALSDDALTRVAMSLPSPKTANKEDGLCVICVDAPSEAVCVPCGHVAGCISCLKEIENKKMGCPVCRANIDQVIKLYHV

SEQ ID NO: 332 - DNA, 1166 bp, Arabidopsis thaliana
attttcatttcgcgtctcgaccttcgaattcgacaaatccctaattccaaaatcctctcggatctaaaagagtgtgtgataacataagatgtcgtcttctcgggaagagaatgtgtacttagccaagttagctgagcaagctgaacgttatgaggaaatggttgagttcatggagaaagttgcaaagactgttgacaccgatgagcttactgtcgaagagagaaacctcttgtctgttgcttacaagaacgtcattggtgctaggagagcttcctggaggatcatatcttccattgaacagaaggaagaaagcagaggaaacgatgatcatgtttccattatcaaggactacagaggaaagatcgaaactgaactcagcaaaatctgtgatggaatactcaatcttctggattctcaccttgttcccactgcatctttggccgagtccaaagtcttttacctcaaaatgaaaggagattaccacaggtaccttgctgagtttaagactggagctgagaggaaagaagctgctgagagcactctggttgcttacaagtcagctcaggatattgcacttgctgatttagctcctactcatccgattagactgggacttgctcttaacttctctgtcttctactacgagattctcaactcacctgatcgtgcctgcagtctcgcaaaacaggcttttgatgaggccatttctgagctggatacattaggagaagaatcatacaaagacagtacgttgataatgcaacttctccgtgacaatctgaccctttggaactctgacatcaatgatgaggcgggcggtgatgagatcaaggaggcgtcaaaacatgagccggaagaggggaaaccagctgagacagggcagtgaccagagagagagggagagacatttctaagtatgtatggtatggattttccaaaaacatatgatatgattaggggatttgtagaagcagagagaaagatctttatttgattttctccaaaaatctctgttcccttttttttttttattgggttattaaagctgtttgagtctttggttcctgcttcgttgcttgttagtatttaggaagtgaagaaacaaaactttgaattattgctttccattcaactcgtcataaattatcataatcagtgtattattt

SEQ ID NO: 333 - protein, 265 aa, Arabidopsis thaliana
MSSSREENVYLAKLAEQAERYEEMVEFMEKVAKTVDTDELTVEERNLLSVAYKNVIGARRASWRIISSIEQKEESRGNDDHVSIIKDYRGKIETELSKICDGILNLLDSHLVPTASLAESKVFYLKMKGDYHRYLAEFKTGAERKEAAESTLVAYKSAQDIALADLAPTHPIRLGLALNFSVFYYEILNSPDRACSLAKQAFDEAISELDTLGEESYKDSTLIMQLLRDNLTLWNSDINDEAGGDEIKEASKHEPEEGKPAETGQ

SEQ ID NO: 334 - protein, 242 aa, Arabidopsis thaliana
MVEFMEKVAKTVDTDELTVEERNLLSVAYKNVIGARRASWRIISSIEQKEESRGNDDHVSIIKDYRGKIETELSKICDGILNLLDSHLVPTASLAESKVFYLKMKGDYHRYLAEFKTGAERKEAAESTLVAYKSAQDIALADLAPTHPIRLGLALNFSVFYYEILNSPDRACSLAKQAFDEAISELDTLGEESYKDSTLIMQLLRDNLTLWNSDINDEAGGDEIKEASKHEPEEGKPAETGQ

SEQ ID NO: 335 - protein, 238 aa, Arabidopsis thaliana
MEKVAKTVDTDELTVEERNLLSVAYKNVIGARRASWRIISSIEQKEESRGNDDHVSIIKDYRGKIETELSKICDGILNLLDSHLVPTASLAESKVFYLKMKGDYHRYLAEFKTGAERKEAAESTLVAYKSAQDIALADLAPTHPIRLGLALNFSVFYYEILNSPDRACSLAKQAFDEAISELDTLGEESYKDSTLIMQLLRDNLTLWNSDINDEAGGDEIKEASKHEPEEGKPAETGQ

SEQ ID NO: 336 - DNA, 1542 bp, Arabidopsis thaliana
agtaatccatttgctgctctgtagtggaagtagttgttgttgttgttgcagaagaatccgaatccaattcaatgagtcttcttcgtcttctcctcgttgttgttgttcttcatctttctgcggtggccggcgacgacgccatcgtctccagattccaggagtacctccgaatcaacacggttcagcccaacccggaatactacaaagccgttgactttataatatctcaggcgaaaccactgtccctcgaatctcagacgatcgaatttgtaaaaggaaagccgcttctcctcctcaaatgggttggctccgacccaaccctacctgcctttctcctcaactcccacaccgatgtcgttcccttcgaggactccaagtggactcaccatccgctccaagctcacatggaccaccatggcgacatctatgccaggggttcccaggacatgaagtgcgtcgggatgcagtacctcgaggccatacgcaagctccaggcttctggcttcaagccactccgatccgtctatctctccttcgtccccgatgaagagattggcggccacgatggcgcagagaagtttgctgaatcccaattattcaagagcttgaacatcgcaatcgtgctcgacgaaggcctgccatcgcctactgagagttacagagtattctatggagagaggagtccctggtggctggtgattaaggctaaaggtccacctggccacggtgccaagctctatgacaactctgccatggagaatctgctcaaaagcattgagagtattcgcagattcagagcttctcagttcgatcttctcaaagctggtgggatagctgaaggcgatgttgtctctgtgaacatggccttcctcaaggctggcacaccttctccaactggtttcgtaatgaatctgcaaccatctgaggcagaagctggtttcgacattcgtgttccacccagcgttgatgctgaagcactcgaaagacgtttagtggaggaatgggctccagcagcacgaaacatgtcctttgagttcaagcagaagcttacggggaagcaattccttacagcagcagatgattcaaatccttggtgggggctcttggaaaatgctgttaaggaagccggaggtaggaccagtaagcctgagattttccctgcatcaacggatgctcgctactttcgcaaggctggcgtgcctgcctttgggttctctcccatatcaaacaccccgagtctgcttcatgaccacaatgagtatttgggtaaagctgagtacttgaaaggcattgaggtgtatgtttcaatcatcaaagcttatgcatcatatgaaagcaaaagtggttcacgagatgagttatgagggtctcaacacagcccattcaagtcttcctttcgcaaatttgtacaatcaataagatctgaatccatcctgtgtttgttgtggtaaatcagagacatcttgttcttgttgtgagacagttggcattggcaaattgtattattcattcctgctttttcaatgcttcttcttttttctc

SEQ ID NO: 337 - protein, 430 aa, Arabidopsis thaliana
MSLLRLLLVVVVLHLSAVAGDDAIVSRFQEYLRINTVQPNPEYYKAVDFIISQAKPLSLESQTIEFVKGKPLLLLKWVGSDPTLPAFLLNSHTDVVPFEDSKWTHHPLQAHMDHHGDIYARGSQDMKCVGMQYLEAIRKLQASGFKPLRSVYLSFVPDEEIGGHDGAEKFAESQLFKSLNIAIVLDEGLPSPTESYRVFYGERSPWWLVIKAKGPPGHGAKLYDNSAMENLLKSIESIRRFRASQFDLLKAGGIAEGDVVSVNMAFLKAGTPSPTGFVMNLQPSEAEAGFDIRVPPSVDAEALERRLVEEWAPAARNMSFEFKQKLTGKQFLTAADDSNPWWGLLENAVKEAGGRTSKPEIFPASTDARYFRKAGVPAFGFSPISNTPSLLHDHNEYLGKAEYLKGIEVYVSIIKAYASYESKSGSRDEL

SEQ ID NO: 338 - protein, 319 aa, Arabidopsis thaliana
MDHHGDIYARGSQDMKCVGMQYLEAIRKLQASGFKPLRSVYLSFVPDEEIGGHDGAEKFAESQLFKSLNIAIVLDEGLPSPTESYRVFYGERSPWWLVIKAKGPPGHGAKLYDNSAMENLLKSIESIRRFRASQFDLLKAGGIAEGDVVSVNMAFLKAGTPSPTGFVMNLQPSEAEAGFDIRVPPSVDAEALERRLVEEWAPAARNMSFEFKQKLTGKQFLTAADDSNPWWGLLENAVKEAGGRTSKPEIFPASTDARYFRKAGVPAFGFSPISNTPSLLHDHNEYLGKAEYLKGIEVYVSIIKAYASYESKSGSRDEL

SEQ ID NO: 339 - protein, 305 aa, Arabidopsis thaliana
MKCVGMQYLEAIRKLQASGFKPLRSVYLSFVPDEEIGGHDGAEKFAESQLFKSLNIAIVLDEGLPSPTESYRVFYGERSPWWLVIKAKGPPGHGAKLYDNSAMENLLKSIESIRRFRASQFDLLKAGGIAEGDVVSVNMAFLKAGTPSPTGFVMNLQPSEAEAGFDIRVPPSVDAEALERRLVEEWAPAARNMSFEFKQKLTGKQFLTAADDSNPWWGLLENAVKEAGGRTSKPEIFPASTDARYFRKAGVPAFGFSPISNTPSLLHDHNEYLGKAEYLKGIEVYVSIIKAYASYESKSGSRDEL

SEQ ID NO: 340 - DNA, 994 bp, Arabidopsis thaliana
tgactgctctatttctcaatctctctcctaaatcaatcaatctttgtattttcatttagccagaacaaaaaaaatggtggagcaaaagagatacgctctgtttctagcgactttggactcagagttcgtgaagaaaacttacggaggataccacaacgtgttcgtgacgacgttcggagacgaaggagagcattgggactcctttagagtcgtcagcggagagtttcctgacgagaaagatctggagaaatacgatggcttcgttatcagcggaagctctcacgatgcctttgagaatgatgattggatccttaagctctgtgatattgtcaagaaaattgatgagatgaagaagaaaattcttggcatctgctttggtcatcagatcatagccagggtaaggggaggaacagtcggaagagcaaagaagggaccagaacttaaacttggagacataaccatcgtcaaggatgcgattacgcctggaagttacttcggaaacgagattcctgatagcatagcgatcatcaaatgtcaccaggacgaagtgttggtgctgcccgaaactgctaaagtgcttgcgtattccaagaactacgaggtggagatgtattcgattgaggatcatttgttctgtatccaaggacatcctgagtataacaaagagattctcttcgagattgttgatcgtgttcttgctctaggctacgtcaagcaagaatttgctgatgcggctaaggcaacgatggagaataggggagcagacaggaagctttgggagacgatttgcaagaacttcctcaaaggcagagttccaactaactagtttcactcccaaattatctatttggctcttgtcatattgaaacaatttgtggatttatgatcttgctttatttttattcaatgtataacgacatattaatctcggcgtgacttatttgtgttataccagttgataaatgaataagaagaacctaagctatttaaagcc

SEQ ID NO: 341 - protein, 250 aa, Arabidopsis thaliana
MVEQKRYALFLATLDSEFVKKTYGGYHNVFVTTFGDEGEHWDSFRVVSGEFPDEKDLEKYDGFVISGSSHDAFENDDWILKLCDIVKKIDEMKKKILGICFGHQIIARVRGGTVGRAKKGPELKLGDITIVKDAITPGSYFGNEIPDSIAIIKCHQDEVLVLPETAKVLAYSKNYEVEMYSIEDHLFCIQGHPEYNKEILFEIVDRVLALGYVKQEFADAAKATMENRGADRKLWETICKNFLKGRVPTN

SEQ ID NO: 342 - protein, 159 aa, Arabidopsis thaliana
MKKKILGICFGHQIIARVRGGTVGRAKKGPELKLGDITIVKDAITPGSYFGNEIPDSIAIIKCHQDEVLVLPETAKVLAYSKNYEVEMYSIEDHLFCIQGHPEYNKEILFEIVDRVLALGYVKQEFADAAKATMENRGADRKLWETICKNFLKGRVPTN

SEQ ID NO: 343 - DNA, 1257 bp, Arabidopsis thaliana
agattcacgcatcacacaatcgagtttttagggttttagcggttgctctctcggaagccagagagaagagggaagaggaagtctaattcctctgcgttttttgcaattagggttttctcaattggaatcgaaaatggtgacagacaagagcaagaaggcgaaaaccgaagaagaaaacgtcgagcaaatcgatgcagagcttgtcctctcaatcgaaaagcttcaagagatccaagacgacctcgagaagataaatgaaaaggctagtgatgaagtgttggaagtggagcagaaatataatgtgataaggaaacctgtttatgacaagcgtaacgagatcatcaaaaccatccctgatttctggttaactgctttcttgagtcaccctgctttaggtgaacttttgactgaagaagaccaaaagattttcaaatatcttagctctcttgatgttgaggatgccaaagatgtgaaatctggatactctatcactttttccttcaatcccaatccattttttgaagatggaaaactgacaaagacttttacctttctcgaagaagggacaaccaaaatcacagccacgcctatcaaatggaaagagggcaaaggcctggcgaatggagtgaatcatgagaagaatggaaacaaacgtgcactacctgaagagagcttctttacctggtttagtgatgctcaacacaaggaggatgttgaggatgagatgcaagacgagcaggttgcagatatcatcaaggaagatttgtggcccaaccctctcacctacttcaacaatgacgctgatgaagaggactttgatggagacgatgatggagatgaagaggagaaagaaggtgactctgatgaagatgatgacgaagaagacgaagttggtgaggaatgatggcagggatacccagaaaccacatttgcttacatgtcttctctataacagagtgtgtaaagttttgtgtgttgaaaggtttttaattttaagcaaaagtggattatgacgacaacagacaagcttttaattttattttaccgtaatagttatatcttgttgtaagaaaccattttcagccttttgttggaaaatcctgcttaaatggtttttgagtcttacataatagcttcttcatcttttgtcttcttaaagagaattatatttgtaatttcatgtctgttgtgtttctttgactttactgaatagagaatttgtgtgtttatggtgaaaatatagccgatctgcttgac

SEQ ID NO: 344 - protein, 256 aa, Arabidopsis thaliana
MVTDKSKKAKTEEENVEQIDAELVLSIEKLQEIQDDLEKINEKASDEVLEVEQKYNVIRKPVYDKRNEIIKTIPDFWLTAFLSHPALGELLTEEDQKIFKYLSSLDVEDAKDVKSGYSITFSFNPNPFFEDGKLTKTFTFLEEGTTKITATPIKWKEGKGLANGVNHEKNGNKRALPEESFFTWFSDAQHKEDVEDEMQDEQVADIIKEDLWPNPLTYFNNDADEEDFDGDDDGDEEEKEGDSDEDDDEEDEVGEE

SEQ ID NO: 345 - DNA, 1081 bp, Arabidopsis thaliana
aaaaggctccggctttatcattctcagaccatcatcactaagcagtaagtaagcactataatcgcagaagatagataaaatggaagtagggtttctgggtttgggaatcatgggaaaagccatgtcaatgaatctattgaagaatggattcaaagtcactgtatggaacagaacactctccaagtgtgatgagcttgtggagcatggtgcatcagtatgtgagagtccagctgaagtaatcaagaaatgcaaatacactattgctatgctctctgatccttgtgctgctctttcggttgttttcgataaaggcggtgttttggagcagatatgtgaaggaaaaggttatatcgatatgtcgactgttgatgcagagacttctttgaagatcaatgaggcaatcaccgggaagggtggtcggttcgtagaaggtccggtttcaggtagcaaaaagccagctgaagatggccaactcattatccttgctgctggtgacaaggcactctttgaggaatcaatcccagcttttgatgtcttggggaagagatcgttttacttgggacaagttggaaacggagctaaaatgaagctaatagtgaacatgataatgggaagcatgatgaatgcattctctgaggggcttgtattggctgacaagagtggacttagctctgacactcttttggatattctggatctgggagcaatgactaacccgatgttcaaggggaaaggaccttcaatgaacaagagtagtttacccaccagcatttccattgaaacatcagcagaaagacatgaggctagctcttgctcttggcgatgaaaacgcggtttccatgcctgtagccgcggctgcaaacgaggcttttaagaaggcgagaagcttgggactaggagatctcgacttctctgctgtgattgaagctgtgaaattctcccgcgaatagcaaactgtttcaaaacatccactcatttggattggctgagatactgaaatcattgttatcttcccaaatagagatttactcatttggccaaacacacattttactccttcaccaaataaaaagtcttaacc

SEQ ID NO: 346 - protein, 248 aa, Arabidopsis thaliana
MEVGFLGLGIMGKAMSMNLLKNGFKVTVWNRTLSKCDELVEHGASVCESPAEVIKKCKYTIAMLSDPCAALSVVFDKGGVLEQICEGKGYIDMSTVDAETSLKINEAITGKGGRFVEGPVSGSKKPAEDGQLIILAAGDKALFEESIPAFDVLGKRSFYLGQVGNGAKMKLIVNMIMGSMMNAFSEGLVLADKSGLSSDTLLDILDLGAMTNPMFKGKGPSMNKSSLPTSISIETSAERHEASSCSWR

SEQ ID NO: 347 - protein, 238 aa, Arabidopsis thaliana
MGKAMSMNLLKNGFKVTVWNRTLSKCDELVEHGASVCESPAEVIKKCKYTIAMLSDPCAALSVVFDKGGVLEQICEGKGYIDMSTVDAETSLKINEAITGKGGRFVEGPVSGSKKPAEDGQLIILAAGDKALFEESIPAFDVLGKRSFYLGQVGNGAKMKLIVNMIMGSMMNAFSEGLVLADKSGLSSDTLLDILDLGAMTNPMFKGKGPSMNKSSLPTSISIETSAERHEASSCSWR

SEQ ID NO: 348 - protein, 234 aa, Arabidopsis thaliana
MSMNLLKNGFKVTVWNRTLSKCDELVEHGASVCESPAEVIKKCKYTIAMLSDPCAALSVVFDKGGVLEQICEGKGYIDMSTVDAETSLKINEAITGKGGRFVEGPVSGSKKPAEDGQLIILAAGDKALFEESIPAFDVLGKRSFYLGQVGNGAKMKLIVNMIMGSMMNAFSEGLVLADKSGLSSDTLLDILDLGAMTNPMFKGKGPSMNKSSLPTSISIETSAERHEASSCSWR

SEQ ID NO: 349 - DNA, 1195 bp, Arabidopsis thaliana
tgactgcaatttctctctttcgcttctaaaaaaaaacctaacaacctctcttctctcttcctcgttcaacaacaatggagttctggggagttgcggtgacaccaaaaaacgctactaaggtgactcctgaagaagacagccttgtccacatttctcaggcttcacttgactgcacagtgaaatctggagaatctgtggttttgagtgtgactgttggtggggctaaacttgttattggaacactttcacaagacaagttccctcagattagctttgatttggtttttgataaagagtttgagctttcacacagcggtaccaaagcaaatgttcatttcattggctacaaatcccccaacatcgagcaggatgacttcactagttcggatgatgaggatgttcctgaagctgttcctgctcctgcccctactgctgttactgccaacggaaatgctggagcagctgttgtcaaggctgacacaaagccaaaggccaaacctgccgaagtgaagcctgcagaagagaagcctgaatcagacgaggaagatgagtctgatgatgaagatgagtctgaagaggatgatgactctgagaaaggaatggatgttgatgaagatgactcagatgatgacgaggaggaggattctgaggatgaagaagaggaggagactcctaagaagcctgagccaatcaacaagaagaggccaaatgaatctgtatccaaaacacccgtctctggaaagaaggcaaaaccagcagcagcaccagcttctactcctcagaagacagaagagaagaagaaaggaggacacaccgccacaccacacccagctaagaagggtggaaagtctcctgtgaatgctaaccagagccccaagtctggaggtcaatcatccggtggtaacaacaacaagaagccattcaactcaggcaaacaatttggtggttccaacaacaagggttctaacaagggcaagggaaagggtagagcttaaggacgtggatcaaggagaggttttgggttttcgagtagatgatgaaaacacttggaagtgtggttttggatttttatcttattttattagtataacttgttatcggatgagctattttgagtatttgcaatttctactttcctatgtaattcagtatatgaatatttgctgaaatgagaaagaagactcgaattgcaaac

SEQ ID NO: 350 - protein, 306 aa, Arabidopsis thaliana
MEFWGVAVTPKNATKVTPEEDSLVHISQASLDCTVKSGESVVLSVTVGGAKLVIGTLSQDKFPQISFDLVFDKEFELSHSGTKANVHFIGYKSPNIEQDDFTSSDDEDVPEAVPAPAPTAVTANGNAGAAVVKADTKPKAKPAEVKPAEEKPESDEEDESDDEDESEEDDDSEKGMDVDEDDSDDDEEEDSEDEEEEETPKKPEPINKKRPNESVSKTPVSGKKAKPAAAPASTPQKTEEKKKGGHTATPHPAKKGGKSPVNANQSPKSGGQSSGGNNNKKPFNSGKQFGGSNNKGSNKGKGKGRA

SEQ ID NO: 351 - DNA, 1186 bp, Arabidopsis thaliana
gatattgttcgccggtaatattttctccgatttgcttacctctcttgatttctggaatggaatctgaatgtttgacaccagaatgggcatctcaaccttgtctaatgggtatcgatgaagccggaaggggtcctgttctaggtcctatggtttatggatgtatgtattgtcccatttcctatcagtcgtctcttgcttctctccattttgcagattcgaagactctaaaagaggagaaaagagaagagttatatgaaagcttaaagcttgacaagtcacttggatgggctgttgatgtcattgatcctagggaactctcagccaagatgctcgcaaaaaacaagactaatttaaatgagatttcacataactctgcaatggggcttatcaaaagggtactagacatgggagttcttctgacagaggcttatctggataccgtgggagatcccgacaagtacagaataaaattgtctgagaggtttccttcgatcaagttcgtcgtttcaaagaaagctgacagtctatttccgattgttagtggggcaagtattgtggctaaggtgacaagagacagagcgttgaaagaatggttggtagaggaaaccggagaagatataaatagaaactttggttctggatatcctggagatcctgagacaaaggcgtggttagtgcaacacaaacattctgtgtttggattcccatcactggtccgcttcagttggggaacttgcactacacatttgaagggcgaggttgaagttgcatgggaagcagatgaaaatgaagagagtggtaatggaagtagcagcaaacgacaagcgaaactaagcagttttgggttcaaaacatgcgagaaaagaagcgaagaaatcgagtcgagtggaaaaggacgctgcaaatttctccaagctcgcaaaatccaacaactcactcagttttagacttagagtacaagactgaatccagcttctaggagatgcctttagcttatcgtttatagcctttgttttacacttttactaatgtcaagaccgtcctgtttttctttccggagttcgacttcaaataatgtgttactactgtacacattaaaaattaagttatagattggattttgcctaatcaaaaatgttaaacaaaaagagaagtatataaataaaaatattatatagagaaaacc

SEQ ID NO: 352 - protein, 314 aa, Arabidopsis thaliana
YCSPVIFSPICLPLLISGMESECLTPEWASQPCLMGIDEAGRGPVLGPMVYGCMYCPISYQSSLASLHFADSKTLKEEKREELYESLKLDKSLGWAVDVIDPRELSAKMLAKNKTNLNEISHNSAMGLIKRVLDMGVLLTEAYLDTVGDPDKYRIKLSERFPSIKFVVSKKADSLFPIVSGASIVAKVTRDRALKEWLVEETGEDINRNFGSGYPGDPETKAWLVQHKHSVFGFPSLVRFSWGTCTTHLKGEVEVAWEADENEESGNGSSSKRQAKLSSFGFKTCEKRSEEIESSGKGRCKFLQARKIQQLTQF

SEQ ID NO: 353 - protein, 296 aa, Arabidopsis thaliana
MESECLTPEWASQPCLMGIDEAGRGPVLGPMVYGCMYCPISYQSSLASLHFADSKTLKEEKREELYESLKLDKSLGWAVDVIDPRELSAKMLAKNKTNLNEISHNSAMGLIKRVLDMGVLLTEAYLDTVGDPDKYRIKLSERFPSIKFVVSKKADSLFPIVSGASIVAKVTRDRALKEWLVEETGEDINRNFGSGYPGDPETKAWLVQHKHSVFGFPSLVRFSWGTCTTHLKGEVEVAWEADENEESGNGSSSKRQAKLSSFGFKTCEKRSEEIESSGKGRCKFLQARKIQQLTQF

SEQ ID NO: 354 - protein, 280 aa, Arabidopsis thaliana
MGIDEAGRGPVLGPMVYGCMYCPISYQSSLASLHFADSKTLKEEKREELYESLKLDKSLGWAVDVIDPRELSAKMLAKNKTNLNEISHNSAMGLIKRVLDMGVLLTEAYLDTVGDPDKYRIKLSERFPSIKFVVSKKADSLFPIVSGASIVAKVTRDRALKEWLVEETGEDINRNFGSGYPGDPETKAWLVQHKHSVFGFPSLVRFSWGTCTTHLKGEVEVAWEADENEESGNGSSSKRQAKLSSFGFKTCEKRSEEIESSGKGRCKFLQARKIQQLTQF

SEQ ID NO: 355 - DNA, 778 bp, Arabidopsis thaliana
aattctggattactcatttgccttataacaatggcttcttcttccgaagagattgtgtccgccggcgaatcatcagagatcgaggaagcggttgcgagtctaaccatgtcttctaacaagattttgttgacgagttccgatggcgagtctttcgagatcgacgaagcggtggcgcgtaagtttctgatcatagtgcacatgatggaggataactgcgccggtgaagcaattccgcttgaaaatgtcaccggggatatcctctccaagataatcgagtacgcgaagatgcacgtcaatgaacctagtgaagaagacgaagacgaggaggcgaagaagaatctagactcgtgggacgctaagttcatggaaaagctagatctggagaccatcttcaaaatcattctcgctgccaactacctaaacttcgaaggacttctcggtttcgctagccagacggttgctgattacatcaaggacaaaacaccagaggaagtacgagagattttcaacatcgagaacgatttcacgcctgaagaagaggaagagattcgcaaggagaatgcttggacttttaatgagtaatccaactttagggtttgcagaatttcgtttcgaattgcacaatttagggtttctcttctcccccctcttagatttcgtgaatgggttcatcttttcgttatcgacttggtctcaagtaatattctttgtagattgaccaatgttgttcttgctctattagcgttctaattcgattctcgatcttgttcaaaagccc

SEQ ID NO: 356 - protein, 193 aa, Arabidopsis thaliana
NSGLLICLITMASSSEEIVSAGESSEIEEAVASLTMSSNKILLTSSDGESFEIDEAVARKFLIIVHMMEDNCAGEAIPLENVTGDILSKIIEYAKMHVNEPSEEDEDEEAKKNLDSWDAKFMEKLDLETIFKIILAANYLNFEGLLGFASQTVADYIKDKTPEEVREIFNIENDFTPEEEEEIRKENAWTFNE

SEQ ID NO: 357 - protein, 183 aa, Arabidopsis thaliana
MASSSEEIVSAGESSEIEEAVASLTMSSNKILLTSSDGESFEIDEAVARKFLIIVHMMEDNCAGEAIPLENVTGDILSKIIEYAKMHVNEPSEEDEDEEAKKNLDSWDAKFMEKLDLETIFKIILAANYLNFEGLLGFASQTVADYIKDKTPEEVREIFNIENDFTPEEEEEIRKENAWTFNE

SEQ ID NO: 358 - protein, 158 aa, Arabidopsis thaliana
MSSNKILLTSSDGESFEIDEAVARKFLIIVHMMEDNCAGEAIPLENVTGDILSKIIEYAKMHVNEPSEEDEDEEAKKNLDSWDAKFMEKLDLETIFKIILAANYLNFEGLLGFASQTVADYIKDKTPEEVREIFNIENDFTPEEEEEIRKENAWTFNE

SEQ ID NO: 359 - DNA, 1347 bp, Arabidopsis thaliana
agcatctcgagatcgtcttcctctcacaatctcaaattcttcggaccttttctctctcccctgaagctcccctcactcactcttctccgaggaagaacaacagagacaatggcggttcccaaagccattattctacctatcttgctactcatctgtggtgctgctctcggagctcctgcttctgaaggttatcttcgtaatggaaacttcgaagagtcaccaaagaaaaccgacatgaagaaaacagttctactaggcaaaaacgccttgcccgaatgggaaaccaccggtttcgtcgagtacatcgccggcggtcctcagccaggaggcatgtacttcccagtggctcatggagtccacgccgtgaggctcggaaacgaagctacaatctctcagaagttagaagtgaagccaggttctctctacgcactcacgtttggtgcgtcgagaacttgtgcacaagacgaagttcttagagtctctgtaccttctcagtccggtgacttgccacttcaaacactttacaacagtttcggaggtgacgtgtacgcttgggccttcgtcgccaagacttctcaagttactgtgactttccacaatcctggagttcaagaagatcctgcttgtggtcctttgttggacgctgtcgccattaaagagcttgttcatccaatctacaccagagggaacttggtgaagaatggagggttcgaagaaggtcctcaccgtctagtgaactccacacaaggagtcctactcccacctaaacaagaagatctcacatcacctttacctggttggatcatagagtcactcaaggcagtgaaattcatagactctaagtactttaatgtcccctttggacatgctgcgatcgagctagttgcaggcaaagaaagtgccattgcacaagtcattagaacctctcctggtcaaacttacaccctctccttcgtcgttggagatgctaagaatgactgccatggttccatgatggttgaagcttttgcagccagagatacactcaaagtaccacacacttccgttggtggaggtcatgtcaagaccgcgagtttcaagttcaaggcggttgaggcaagaactagaattactttcttcagtggtttttaccataccaagaagactgatactgtatctttatgtggtcctgtcattgacgagattgtggtttctcatgtcgcttagattaagtttactctttatgacaactgcacttgtgttcttagactggtcatggacttggtgccttgctttgtatgtcttggctccttttggaattgagttattgtcatcaagttaaaatgaatgatatattattgtaatatg

SEQ ID NO: 360 - protein, 401 aa, Arabidopsis thaliana
SISRSSSSHNLKFFGPFLSPLKLPSLTLLRGRTTETMAVPKAIILPILLLICGAALGAPASEGYLRNGNFEESPKKTDMKKTVLLGKNALPEWETTGFVEYIAGGPQPGGMYFPVAHGVHAVRLGNEATISQKLEVKPGSLYALTFGASRTCAQDEVLRVSVPSQSGDLPLQTLYNSFGGDVYAWAFVAKTSQVTVTFHNPGVQEDPACGPLLDAVAIKELVHPIYTRGNLVKNGGFEEGPHRLVNSTQGVLLPPKQEDLTSPLPGWIIESLKAVKFIDSKYFNVPFGHAAIELVAGKESAIAQVIRTSPGQTYTLSFVVGDAKNDCHGSMMVEAFAARDTLKVPHTSVGGGHVKTASFKFKAVEARTRITFFSGFYHTKKTDTVSLCGPVIDEIVVSHVA

SEQ ID NO: 361 - protein, 365 aa, Arabidopsis thaliana
MAVPKAIILPILLLICGAALGAPASEGYLRNGNFEESPKKTDMKKTVLLGKNALPEWETTGFVEYIAGGPQPGGMYFPVAHGVHAVRLGNEATISQKLEVKPGSLYALTFGASRTCAQDEVLRVSVPSQSGDLPLQTLYNSFGGDVYAWAFVAKTSQVTVTFHNPGVQEDPACGPLLDAVAIKELVHPIYTRGNLVKNGGFEEGPHRLVNSTQGVLLPPKQEDLTSPLPGWIIESLKAVKFIDSKYFNVPFGHAAIELVAGKESAIAQVIRTSPGQTYTLSFVVGDAKNDCHGSMMVEAFAARDTLKVPHTSVGGGHVKTASFKFKAVEARTRITFFSGFYHTKKTDTVSLCGPVIDEIVVSHVA

SEQ ID NO: 362 - protein, 323 aa, Arabidopsis thaliana
MKKTVLLGKNALPEWETTGFVEYIAGGPQPGGMYFPVAHGVHAVRLGNEATISQKLEVKPGSLYALTFGASRTCAQDEVLRVSVPSQSGDLPLQTLYNSFGGDVYAWAFVAKTSQVTVTFHNPGVQEDPACGPLLDAVAIKELVHPIYTRGNLVKNGGFEEGPHRLVNSTQGVLLPPKQEDLTSPLPGWIIESLKAVKFIDSKYFNVPFGHAAIELVAGKESAIAQVIRTSPGQTYTLSFVVGDAKNDCHGSMMVEAFAARDTLKVPHTSVGGGHVKTASFKFKAVEARTRITFFSGFYHTKKTDTVSLCGPVIDEIVVSHVA

SEQ ID NO: 363 - DNA, 1256 bp, Arabidopsis thaliana
acgtataacgcctgaataaatctttcagacctgcgtcgacggttcgctgccgccgaaatttccgatcaaccttaataaggaatatgacgtctctgtcggtaaatgatcggaaggattttgtagatgggcagatgaagtactggcgtcaaatagccgaatccgatggtttcgatatcgatgatgttccagtaccaagaggaaccagagctggactgtggtctgtcgactgtaaacacccacgttttaggcttagggcttgtttacccaagatttatgctatggttggtcttcaccgttacaatttgctcagggggacaaacttcgagcaccttgagttactaaaatacaacgagtcaatgaactgtgtgtgctcttactatataacttcggttgcagtagatctttctagccagttgcagaaaacttttcagattcgagttgatgaaaaaagttttggagatttggatttgacggtctctgttgctagacctaatgatgaagagaaagtgaccaccgagaagcgtttcatacatcactttcattgtgaagcagctgcggatgatttctacaaaggtgcattgcctgattggccgtcagttggtgatctgaataatcaaaaacgattttacatggtgaagaaatgcgagttgcaatccaatgattggatccgtctatatttggaacttgcagttggtgtacgttatcagcagacttcagagagtgatctgtccaagttgcaggttctgaaagtggcaatagaaactaaggaagaagatgtgcagccaccgaataggagactcaagtccaaaagtctacatgtctacataacgtttaagggcttggccaaggctcctattggtgatgagattggtgagcatgttgaacgcaaagctatagttcgaagagtcattgatgagcgttcaggacacttgacgcttctcggtgggttttccaatgcgaaaaatgatttgaatcagtcctctgacgatgagcagccttttggaaagcgacgtcgcatatagctgagatgataaactaaagttatcgtgttaagtgcatttgtttctgtggggtgtttttgtaagtctactgtttctgaatacaatgaagttaatttatcttatgaatatactgtgactgtgtgcgcaaattaatagggagctatttttaacttcgcttagaacatcaagggacttgtatgtcactaaatccttttgactttttcatttttgctttgaagttcccttaattgaacc

SEQ ID NO: 364 - protein, 312 aa, Arabidopsis thaliana
MTSLSVNDRKDFVDGQMKYWRQIAESDGFDIDDVPVPRGTRAGLWSVDCKHPRFRLRACLPKIYAMVGLHRYNLLRGTNFEHLELLKYNESMNCVCSYYITSVAVDLSSQLQKTFQIRVDEKSFGDLDLTVSVARPNDEEKVTTEKRFIHHFHCEAAADDFYKGALPDWPSVGDLNNQKRFYMVKKCELQSNDWIRLYLELAVGVRYQQTSESDLSKLQVLKVAIETKEEDVQPPNRRLKSKSLHVYITFKGLAKAPIGDEIGEHVERKAIVRRVIDERSGHLTLLGGFSNAKNDLNQSSDDEQPFGKRRRI

SEQ ID NO: 365 - protein, 296 aa, Arabidopsis thaliana
MKYWRQIAESDGFDIDDVPVPRGTRAGLWSVDCKHPRFRLRACLPKIYAMVGLHRYNLLRGTNFEHLELLKYNESMNCVCSYYITSVAVDLSSQLQKTFQIRVDEKSFGDLDLTVSVARPNDEEKVTTEKRFIHHFHCEAAADDFYKGALPDWPSVGDLNNQKRFYMVKKCELQSNDWIRLYLELAVGVRYQQTSESDLSKLQVLKVAIETKEEDVQPPNRRLKSKSLHVYITFKGLAKAPIGDEIGEHVERKAIVRRVIDERSGHLTLLGGFSNAKNDLNQSSDDEQPFGKRRRI

SEQ ID NO: 366 - protein, 247 aa, Arabidopsis thaliana
MVGLHRYNLLRGTNFEHLELLKYNESMNCVCSYYITSVAVDLSSQLQKTFQIRVDEKSFGDLDLTVSVARPNDEEKVTTEKRFIHHFHCEAAADDFYKGALPDWPSVGDLNNQKRFYMVKKCELQSNDWIRLYLELAVGVRYQQTSESDLSKLQVLKVAIETKEEDVQPPNRRLKSKSLHVYITFKGLAKAPIGDEIGEHVERKAIVRRVIDERSGHLTLLGGFSNAKNDLNQSSDDEQPFGKRRRI

SEQ ID NO: 367 - DNA, 1588 bp, Arabidopsis thaliana
tctctgacaacaaaccaaaaaagagagtccaccaactctacacgcaattcatccaattatcttgctgtcgccattcgccaatatccatccccatcttcttcgatttctgagattcggtcaaaaatcatcagatgggttttcagaacgaagctagctcctcctcttatacccttaaaatacctccaccggccagagaggactcgcctcttctcggcaagggacctcccctctccagccagtttaagaccttcgccaacgtcttcatcgctgtcgtcggcgctggtgttcttggtcttccttacgccttcaagcgaaccggatggctcatgggtgtcctcctcctcgtctccgtctctgttttgacccatcactgtatgatgcttcttgtctatacccgccgcaagctcgactctttcaatgctggcatctccaagatcggctcttttggtgaccttggattcgccgtctgcggctccttggggaggatcgtcgttgacttatttatcattctgtctcaagctggtttttgtgtcggatatcttatcttcatcggcactactttagctaatctatccgatcctgaatcgcccaccagtctgaggcatcagtttacaaggctgggttctgaattcctgggcgtgtcttctaagagtctctacatatggggatgctttccctttcagctcggtttgaattcgatcaagacgctcactcacttggctcctctcagcatcttcgccgatattgttgatcttggcgctatggctgtggtcattgttgaggattccatgattatactcaagcaaaggcctgacgtggttgcctttggtggtatgtccctcttcttgtatggtatgggcgtcgctgtctattccttcgaaggcgttggaatggtcttgcctcttgaatcggagatgaaggacaaggacaagtttggcaaagtcttggctctcggcatgggattcatctctctcatatacatcgcatttggtatcttaggttacttggcttttggtgaggacaccatggacattatcactgctaacttgggggcaggacttgtcagcactgttgtccagcttggactgtgcatcaacctcttcttcaccttccccttgatgatgaatccagtgtttgagatagtggagaggcgtttctcacgcgggatgtactctgcgtggctcagatgggtactcgtcttagcagtgactctggtggctctttttgtgccaaactttgcagattttttgtcattggttggcagcagcacttgctgtgtgttaggctttgtgttacctgcattgtttcatttattggtgttcaaggaagagatggggtggctgcaatggagttcagacacagcgattgtggtactaggtgtggttcttgctgtgtcgggaacttggagttccctgagtgagatcttctctgtcaaagtgtgagcgtccgtgaagtcagagattggagaggtttttctctccttgtgtgcaattatgtatatggaattggttgtggttttaagagtaactgtgattgtatttgtattttgatggtttggaataaaagagatcagctctgtcttctgttg

SEQ ID NO: 368 - protein, 436 aa, Arabidopsis thaliana
MGFQNEASSSSYTLKIPPPAREDSPLLGKGPPLSSQFKTFANVFIAVVGAGVLGLPYAFKRTGWLMGVLLLVSVSVLTHHCMMLLVYTRRKLDSFNAGISKIGSFGDLGFAVCGSLGRIVVDLFIILSQAGFCVGYLIFIGTTLANLSDPESPTSLRHQFTRLGSEFLGVSSKSLYIWGCFPFQLGLNSIKTLTHLAPLSIFADIVDLGAMAVVIVEDSMIILKQRPDVVAFGGMSLFLYGMGVAVYSFEGVGMVLPLESEMKDKDKFGKVLALGMGFISLIYIAFGILGYLAFGEDTMDIITANLGAGLVSTVVQLGLCINLFFTFPLMMNPVFEIVERRFSRGMYSAWLRWVLVLAVTLVALFVPNFADFLSLVGSSTCCVLGFVLPALFHLLVFKEEMGWLQWSSDTAIVVLGVVLAVSGTWSSLSEIFSVKV

SEQ ID NO: 369 - protein, 371 aa, Arabidopsis thaliana
MGVLLLVSVSVLTHHCMMLLVYTRRKLDSFNAGISKIGSFGDLGFAVCGSLGRIVVDLFIILSQAGFCVGYLIFIGTTLANLSDPESPTSLRHQFTRLGSEFLGVSSKSLYIWGCFPFQLGLNSIKTLTHLAPLSIFADIVDLGAMAVVIVEDSMIILKQRPDVVAFGGMSLFLYGMGVAVYSFEGVGMVLPLESEMKDKDKFGKVLALGMGFISLIYIAFGILGYLAFGEDTMDIITANLGAGLVSTVVQLGLCINLFFTFPLMMNPVFEIVERRFSRGMYSAWLRWVLVLAVTLVALFVPNFADFLSLVGSSTCCVLGFVLPALFHLLVFKEEMGWLQWSSDTAIVVLGVVLAVSGTWSSLSEIFSVKV

SEQ ID NO: 370 - protein, 355 aa, Arabidopsis thaliana
MMLLVYTRRKLDSFNAGISKIGSFGDLGFAVCGSLGRIVVDLFIILSQAGFCVGYLIFIGTTLANLSDPESPTSLRHQFTRLGSEFLGVSSKSLYIWGCFPFQLGLNSIKTLTHLAPLSIFADIVDLGAMAVVIVEDSMIILKQRPDVVAFGGMSLFLYGMGVAVYSFEGVGMVLPLESEMKDKDKFGKVLALGMGFISLIYIAFGILGYLAFGEDTMDIITANLGAGLVSTVVQLGLCINLFFTFPLMMNPVFEIVERRFSRGMYSAWLRWVLVLAVTLVALFVPNFADFLSLVGSSTCCVLGFVLPALFHLLVFKEEMGWLQWSSDTAIVVLGVVLAVSGTWSSLSEIFSVKV

SEQ ID NO: 371 - DNA, 629 bp, Arabidopsis thaliana
aaaagacgatgatggagaaaattatggagtatctgcaattgagcgatgaggtggttgacgacggtgaggcaccgcgagttgaagaatttttaggtgaagggaaaagcttctacgagaattttagtctcagaggaatccgagtcaaccgagtcgaaccgggtttcatttcctgctctttcaaggttcctcttcgtttgacggacagagacaagaatttagcaaatggtgcgattgcaaatcttgtggatgaagttggtggagcacttgtacatggcgaaggcttacctatgagtgtttcagtggacatgtctattgcattcctttcaaaagctaagcttggtgaggagttggagataacgtcgagattgttaggagagagaggaggttataaaggaacaatcgttgtagtcagaaacaagatgaccggggagattatagcggaaggtcgacattctatgtttggtagacaagctagtaagctctgagtccaacttttaagtcttgtatcactgtaatgtctgttttcaataataagattatggttaggtaaatttggttaggtcctttgttctttctggttgtgaatctaaaaccttggtacatagcttataaagatcaaaccattcagt

SEQ ID NO: 372 - protein, 160 aa, Arabidopsis thaliana
KTMMEKIMEYLQLSDEVVDDGEAPRVEEFLGEGKSFYENFSLRGIRVNRVEPGFISCSFKVPLRLTDRDKNLANGAIANLVDEVGGALVHGEGLPMSVSVDMSIAFLSKAKLGEELEITSRLLGERGGYKGTIVVVRNKMTGEIIAEGRHSMFGRQASKL

SEQ ID NO: 373 - protein, 158 aa, Arabidopsis thaliana
MMEKIMEYLQLSDEVVDDGEAPRVEEFLGEGKSFYENFSLRGIRVNRVEPGFISCSFKVPLRLTDRDKNLANGAIANLVDEVGGALVHGEGLPMSVSVDMSIAFLSKAKLGEELEITSRLLGERGGYKGTIVVVRNKMTGEIIAEGRHSMFGRQASKL

SEQ ID NO: 374 - protein, 157 aa, Arabidopsis thaliana
MEKIMEYLQLSDEVVDDGEAPRVEEFLGEGKSFYENFSLRGIRVNRVEPGFISCSFKVPLRLTDRDKNLANGAIANLVDEVGGALVHGEGLPMSVSVDMSIAFLSKAKLGEELEITSRLLGERGGYKGTIVVVRNKMTGEIIAEGRHSMFGRQASKL

SEQ ID NO: 375 - DNA, 1742 bp, Arabidopsis thaliana
aaagagaaaacctaaaggttgagtagagattaggcaaaaacaaaattctcgatccccaaatttcgaaaacttgttcttagggcgattcttctctttggtcatttggcgaatttgatttatatccatcggtgatcggatttttttcagtcttctccgtctcgtcgttaccggcgtttgatcggatcatcgttttgtttcaggcgaaatatggtggtgatctccctgaagattttgaattcaaaatttcttcggttgcttcctcttgactttatcgcgatttcgattacgtgtagactttcttcttggctttgtcttcgaatcaattaggattgtgaataatcgtgtctgtgtatataagactggtgattgattattagggcatcggttggcaggagaatagattgtttttttttttggtgtgtgttggatctttagatctttgactgaggaatatgtatatcaaagaactgacggaaacggatgaggagaagagggagagatcggttgaggataacgttgatgatggagataaggcggtattggtgagcagaggaaacgtgattgtgttgactacaaagagggcactcgttggtgttggtgctcgtgctttgttttatcctactctggtttacaacgttgttaggaataagctcgaatctgagtttcgctggtgggatcgcgtggctgagtttatattactgggagctgttccatttccatctgatgttccacagctgaaagagctcggtgtttgtggagtgatcactctgaatgagccatatgaaactttggttccatcgtctctctacaaatcttactgcattgaccacctggtgattgctacaagagattattgttttgctccttccatggaagcaatatgccaagctgtagaatttatccatagaaatgcttcgcttggaaagacgacttatgttcactgcaaagcgggtcggggtcgcagcacaactattgtcatatgctacttggttcaacacaaaaacatgacacctgaagcagcatattcctacgtgagatcaatcaggcccagggttcttttagcagcagcccaatggaaggccgttgttgagtactaccatgtcaaggtgctgaatactcagagttgcttaactgatgcaacttcagctttgatcccgagaaatgtgaagcaggtttgttctgggaatgtagtggtgtttgatgatgggtcaatggttgtagtcacccactcggatctagagggctataatgatgatgactcacggtcacggaggtcagtgaaagttaatgggaatgagctatgggcggcagctgcagatctgagcatggtgtacagggtgaaagtggtggggcaggctgcgatggcgaggatatcgtgtctgtggctgggcttgcgtgaggaccaaaagctttctgggaaaaatctttccatgggaggcataagcgtcgacatttctgtctactgatgatgatggcgaagaatgaatgcaggtgagtctgctggcgagtgagtgaatataccttattcactgtttctccccagtagaaaaaaaaagtctctaaataaaaaaatgggtcaaattaggtatagaagtaagcaagggtttgtaaatttgaaaaaaaaaaaacttggttttgtcgtctgggtattgtaattaaatactaccttgtccctcatttgcctttgatgaggataaacatgaattagtctctccttctcaagtattttaaatttcaagctc

SEQ ID NO: 376 - protein, 337 aa, Arabidopsis thaliana
MYIKELTETDEEKRERSVEDNVDDGDKAVLVSRGNVIVLTTKRALVGVGARALFYPTLVYNVVRNKLESEFRWWDRVAEFILLGAVPFPSDVPQLKELGVCGVITLNEPYETLVPSSLYKSYCIDHLVIATRDYCFAPSMEAICQAVEFIHRNASLGKTTYVHCKAGRGRSTTIVICYLVQHKNMTPEAAYSYVRSIRPRVLLAAAQWKAVVEYYHVKVLNTQSCLTDATSALIPRNVKQVCSGNVVVFDDGSMVVVTHSDLEGYNDDDSRSRRSVKVNGNELWAAAADLSMVYRVKVVGQAAMARISCLWLGLREDQKLSGKNLSMGGISVDISVY

SEQ ID NO: 377 - protein, 198 aa, Arabidopsis thaliana
MEAICQAVEFIHRNASLGKTTYVHCKAGRGRSTTIVICYLVQHKNMTPEAAYSYVRSIRPRVLLAAAQWKAVVEYYHVKVLNTQSCLTDATSALIPRNVKQVCSGNVVVFDDGSMVVVTHSDLEGYNDDDSRSRRSVKVNGNELWAAAADLSMVYRVKVVGQAAMARISCLWLGLREDQKLSGKNLSMGGISVDISVY

SEQ ID NO: 378 - DNA, 1851 bp, Arabidopsis thaliana
ctctcaatttgggattcgagacgaaaccctagctctgatttttttcaattccgatggaggcgggagagcggcgcaatggcgattcgatgagtcacaatcaccgcgcaccgaagaagccacgtctcgctgggttattaaccgagtcagatatcgactctgagttcgctcaccaccagaccggtgttgccagaatcaacaacggtagcttcgggtgctgtcctggctccgttctcgaggcgcaacgcgagtggcagcttcgttatctccgtcagcctgatgagttctacttcaacggtctccgtcgtggacttctcgcttctcgaactgtgatcagtgacctaatcaacgccgatgatgttgatgaggtctctctcgttgataacgccaccactgctgctgctattgttcttcagaaagttggaaggtgtttctcggaagggaagtataagaaggaagatactgtagtgatgtttcactgtgcgtttcagagtgtgaagaagtcgattcaggcttatgtctctcgtgtgggaggttctactgttgaggttaggttacctttccctgtaaattcgaacgaagagattatctccaagtttagagaaggactagagaaaggtagagcgaatggtagaacggttaggttagctatcattgatcatataacgtcgatgccgtgtgttttgatgccggtacgagaattggttaagatctgcagagaggaaggtgtggagcaggtttttgttgatgcagctcatgccattggtagtgttaaagttgatgtgaaagaaatcggagctgattactatgtgagtaatctgcataaatggttcttttgtccaccgtctatcgcgtttttctattgtaagaaacgtggttctgagtctgatgttcatcaccctgtggtgtctcatgagtttggaaatggtttgcctatagaaagtgcctggattgggactagggattacagttcacagcttgtggttccatctgtgatggagtttgtaaacaggttcgagggagggatggaagggataatgatgaagaaccatgatgaagctgttagaatgggtttaatgctggctgatgcttggggaacgaatctagggtcacctccagaaatgtgtgttgggatggttatgatcggtttaccttcaaaactctgtgttggaagtgatgaagatgctattaagttgcggtcatatctgcgggttcattactcagttgaggttccagttttttatctcggattgagggatggagaggaaggagtgaaagacaaagacagtggactaattactgcgtatgttcggatctctcatcaggtctataacaaaactgaggattatgagagattgagagacgcaataacagagttagtcaaggatcagatgacttgtcaaaaccttcctgcattgtagtaaccagatatactttgataatccacaagagcctcattgagactctttcatagatcaactgccggtgtaacaataaggcgatggaagagccacgggcaaagattccggaggtaacatgtattgatgagcttgtggaggagcggcttgcaatggaagaagaagctaaccttgagaggccctctctttttattagtcttttataacgtttaacggctttgtatgattattgcaaataaaatcatgtgcgtctaatcttatcttcctcaaacattctgcttgcgaatctcctgtcgcagttcaataatttttccttattgaaaactttttccctcacattgaaagcatattcatagatatgtaatgacacctaatttatcattgttttgtatgattctggttcgttttcacatctatgtctattatgtctatttac

SEQ ID NO: 379 - protein, 454 aa, Arabidopsis thaliana
MEAGERRNGDSMSHNHRAPKKPRLAGLLTESDIDSEFAHHQTGVARINNGSFGCCPGSVLEAQREWQLRYLRQPDEFYFNGLRRGLLASRTVISDLINADDVDEVSLVDNATTAAAIVLQKVGRCFSEGKYKKEDTVVMFHCAFQSVKKSIQAYVSRVGGSTVEVRLPFPVNSNEEIISKFREGLEKGRANGRTVRLAIIDHITSMPCVLMPVRELVKICREEGVEQVFVDAAHAIGSVKVDVKEIGADYYVSNLHKWFFCPPSIAFFYCKKRGSESDVHHPVVSHEFGNGLPIESAWIGTRDYSSQLVVPSVMEFVNRFEGGMEGIMMKNHDEAVRMGLMLADAWGTNLGSPPEMCVGMVMIGLPSKLCVGSDEDAIKLRSYLRVHYSVEVPVFYLGLRDGEEGVKDKDSGLITAYVRISHQVYNKTEDYERLRDAITELVKDQMTCQNLPAL

SEQ ID NO: 380 - protein, 443 aa, Arabidopsis thaliana
MSHNHRAPKKPRLAGLLTESDIDSEFAHHQTGVARINNGSFGCCPGSVLEAQREWQLRYLRQPDEFYFNGLRRGLLASRTVISDLINADDVDEVSLVDNATTAAAIVLQKVGRCFSEGKYKKEDTVVMFHCAFQSVKKSIQAYVSRVGGSTVEVRLPFPVNSNEEIISKFREGLEKGRANGRTVRLAIIDHITSMPCVLMPVRELVKICREEGVEQVFVDAAHAIGSVKVDVKEIGADYYVSNLHKWFFCPPSIAFFYCKKRGSESDVHHPVVSHEFGNGLPIESAWIGTRDYSSQLVVPSVMEFVNRFEGGMEGIMMKNHDEAVRMGLMLADAWGTNLGSPPEMCVGMVMIGLPSKLCVGSDEDAIKLRSYLRVHYSVEVPVFYLGLRDGEEGVKDKDSGLITAYVRISHQVYNKTEDYERLRDAITELVKDQMTCQNLPAL

SEQ ID NO: 381 - protein, 316 aa, Arabidopsis thaliana
MFHCAFQSVKKSIQAYVSRVGGSTVEVRLPFPVNSNEEIISKFREGLEKGRANGRTVRLAIIDHITSMPCVLMPVRELVKICREEGVEQVFVDAAHAIGSVKVDVKEIGADYYVSNLHKWFFCPPSIAFFYCKKRGSESDVHHPVVSHEFGNGLPIESAWIGTRDYSSQLVVPSVMEFVNRFEGGMEGIMMKNHDEAVRMGLMLADAWGTNLGSPPEMCVGMVMIGLPSKLCVGSDEDAIKLRSYLRVHYSVEVPVFYLGLRDGEEGVKDKDSGLITAYVRISHQVYNKTEDYERLRDAITELVKDQMTCQNLPAL

SEQ ID NO: 382 - DNA, 1389 bp, Arabidopsis thaliana
attacatgagctctctctctctctccttctccttctctcttctccttccttgttcttagagattgatcctaacttgtttttcctttcttggaattgaagagcttcttgttccataaacagtagagagagaaagcttcaaagagagaatcgtgctaatcagtgaagttaggcaaaaacccacttgccatttttgtataattaggtcaatctcatccaccaccatactcaattctcttccttctgaaattagggttttttttatctcctcctctctctttcttgtctaccaaaaaaggttttatcgaattactctcaaatcgtatggtgaggaagtcaaaatcttgagagatctgagattgtaagaagatgaatcaagaagataaagagaagcctattgaagaagcttcttcatcaatggagagagaacacatgttcgacaaagtagtaacaccaagcgacgttggcaaactaaaccgactcgtgatccctaagcaacacgcagagagatacttcccattagataactccacaacaaacgacagcaacaaaggtttgcttctaaacttcgaagatcgaagtggaaactcatggaggttccgttactcttactggaacagtagtcaaagctatgtcatgactaaaggttggagccgttttgtcaaagacaagaagcttgatgctggagacatcgtttcttttcagagagattcttgtaataaagacaagctttacatcgattggaggagacgacctaagattcccgatcatcatcatcagcaattcgccggagctatgttccctaggttttacacttttcctcatcctcagatgccgacaaattacgaaactcacaacctttatcatcgatttcatcaacgagatctaggaattggatactatgtgaggtcaatggagaggagtcatccaacggctgtgattgaatctgtgccggtgatgatgcaaaggagagcacaagtggcttcaatggcttcgagaggagagaagcggttaaggctgtttggtgtagatatggagtgcggaggaggaggagggagtgtgaatagtacggaggaagagtcgtcgtcttccggtggtagtataccacgtggcagagtttctatggttggtgctggttctctcctccagttgaggttagtgagcagtgatgataagtctttagtagcaatggaagctgcaagtcttgaggatcatcacttctttacaaagaaaggaaaaccttctttgtcttttgatttggataggtgatgattatcatgagattaatcactatttaaaaatgcatatatatgataatttataccatatattatatatgacacaaagatgtctttcaagatttaatgatattatcaagaaataacatgttct

SEQ ID NO: 383 - protein, 299 aa, Arabidopsis thaliana
MNQEDKEKPIEEASSSMEREHMFDKVVTPSDVGKLNRLVIPKQHAERYFPLDNSTTNDSNKGLLLNFEDRSGNSWRFRYSYWNSSQSYVMTKGWSRFVKDKKLDAGDIVSFQRDSCNKDKLYIDWRRRPKIPDHHHQQFAGAMFPRFYTFPHPQMPTNYETHNLYHRFHQRDLGIGYYVRSMERSHPTAVIESVPVMMQRRAQVASMASRGEKRLRLFGVDMECGGGGGSVNSTEEESSSSGGSIPRGRVSMVGAGSLLQLRLVSSDDKSLVAMEAASLEDHHFFTKKGKPSLSFDLDR

SEQ ID NO: 384 - protein, 283 aa, Arabidopsis thaliana
MEREHMFDKVVTPSDVGKLNRLVIPKQHAERYFPLDNSTTNDSNKGLLLNFEDRSGNSWRFRYSYWNSSQSYVMTKGWSRFVKDKKLDAGDIVSFQRDSCNKDKLYIDWRRRPKIPDHHHQQFAGAMFPRFYTFPHPQMPTNYETHNLYHRFHQRDLGIGYYVRSMERSHPTAVIESVPVMMQRRAQVASMASRGEKRLRLFGVDMECGGGGGSVNSTEEESSSSGGSIPRGRVSMVGAGSLLQLRLVSSDDKSLVAMEAASLEDHHFFTKKGKPSLSFDLDR

SEQ ID NO: 385 - protein, 278 aa, Arabidopsis thaliana
MFDKVVTPSDVGKLNRLVIPKQHAERYFPLDNSTTNDSNKGLLLNFEDRSGNSWRFRYSYWNSSQSYVMTKGWSRFVKDKKLDAGDIVSFQRDSCNKDKLYIDWRRRPKIPDHHHQQFAGAMFPRFYTFPHPQMPTNYETHNLYHRFHQRDLGIGYYVRSMERSHPTAVIESVPVMMQRRAQVASMASRGEKRLRLFGVDMECGGGGGSVNSTEEESSSSGGSIPRGRVSMVGAGSLLQLRLVSSDDKSLVAMEAASLEDHHFFTKKGKPSLSFDLDR

SEQ ID NO: 386 - DNA, 1617 bp, Arabidopsis thaliana
cacgcgtccggaaatttgttctgagctcaacgccatttttgacgatttcgaatctctgtcttctctgagttgttccaagtaatcggagggaactcgtaaagtggaagaataggagaaagagagaaggaagaagatttgtgaatagctcttgatctggtgaagaatggatgcaattagaaaacaagctagcaggttgagagaacaagttgcgagacagcagcaggctgtctttaagcaatttggaggagggggatatggctctggtttagctgatgaagcagaactcaatcagcatcagaagctagaaaagctttacatatccactcgtgctgctaagcattaccaaagagatattgttcgtggtgtggaaggttatatagttacagggtcaaaacaagttgaaataggtacgaaattgtctgaggatagcaggaaatatggttcagagaatacatgtacgaatggtaacgtattaacacgggctgcactgaactatgggcgtgctcgagcacaaatggagaaggaacgtggaaatatgttgaaggctcttggtacacaggttgctgagccattacgggcaatggttttgggagctccattggaggatgctagacatcttgctcaacgctatgacagaatgcgccaagaagctgaagctcaggctacagaagttgccagacgccaagcaaaggcgagagagtctcaaggtaatcctgacatcttgatgaaactggaatctgctgaagcaaaacttcacgacctaaaatcaaatatgacaatattggggaaagaagctgcttctgctttagcttccgttgaagatcaacaacagaaattgactcttgaacgacttctttcaatggttgaatctgaacgcgcctaccatcaaagagtcctccaaatacttgatcagctcgaaggagagatggtatctgagaggcaacgtatagaagctccctctactccctcaagcgcagacagtatgccgccacctccatcatatgaggaagctaatggagtgtttgcatctcagatgcatgacacgtcaacagatagcatgggttacttcttaggagaggtcttgttcccatatcacggtgtgacagatgtcgagctcagcttatcaactggtgaatacgttgttgttagaaaggttacaggcagtggatgggccgaaggtgaatgcaaaggcaaagctggttggttcccttatgggtacattgaaagacgggaacgagttcttgctagcaaagtgtccgaagttttctgagaatttgaaggtaacattatggttctttgttggttatggaattgagttgcttctgtagaagagttgtgtgttctgtagaagaaaaagaaagaaaagattcacgggctaaaacagaagtccatatgcatgaggatcagagttgatgcgggtttctgccatgttctgaatctaatagtgatgccacttgaacaagagttcagtttttaggtattatcttcatattggatttggatattttctttgtcatttgatgtaaacgccacatctctgtttatcttcgtatgtgaatacacttcttttcgggtcttatttgtgattttttgtctaaattactttcatttgatagc

SEQ ID NO: 387 - protein, 368 aa, Arabidopsis thaliana
MDAIRKQASRLREQVARQQQAVFKQFGGGGYGSGLADEAELNQHQKLEKLYISTRAAKHYQRDIVRGVEGYIVTGSKQVEIGTKLSEDSRKYGSENTCTNGNVLTRAALNYGRARAQMEKERGNMLKALGTQVAEPLRAMVLGAPLEDARHLAQRYDRMRQEAEAQATEVARRQAKARESQGNPDILMKLESAEAKLHDLKSNMTILGKEAASALASVEDQQQKLTLERLLSMVESERAYHQRVLQILDQLEGEMVSERQRIEAPSTPSSADSMPPPPSYEEANGVFASQMHDTSTDSMGYFLGEVLFPYHGVTDVELSLSTGEYVVVRKVTGSGWAEGECKGKAGWFPYGYIERRERVLASKVSEVF

SEQ ID NO: 388 - protein, 251 aa, Arabidopsis thaliana
MEKERGNMLKALGTQVAEPLRAMVLGAPLEDARHLAQRYDRMRQEAEAQATEVARRQAKARESQGNPDILMKLESAEAKLHDLKSNMTILGKEAASALASVEDQQQKLTLERLLSMVESERAYHQRVLQILDQLEGEMVSERQRIEAPSTPSSADSMPPPPSYEEANGVFASQMHDTSTDSMGYFLGEVLFPYHGVTDVELSLSTGEYVVVRKVTGSGWAEGECKGKAGWFPYGYIERRERVLASKVSEVF

SEQ ID NO: 389 - protein, 244 aa, Arabidopsis thaliana
MLKALGTQVAEPLRAMVLGAPLEDARHLAQRYDRMRQEAEAQATEVARRQAKARESQGNPDILMKLESAEAKLHDLKSNMTILGKEAASALASVEDQQQKLTLERLLSMVESERAYHQRVLQILDQLEGEMVSERQRIEAPSTPSSADSMPPPPSYEEANGVFASQMHDTSTDSMGYFLGEVLFPYHGVTDVELSLSTGEYVVVRKVTGSGWAEGECKGKAGWFPYGYIERRERVLASKVSEVF

SEQ ID NO: 390 - DNA, 1150 bp, Arabidopsis thaliana
catctcttcttgaagctgctttcttcctcaaattctttttttttccagattcttctcctttcttcttccttcttccttatttcgatttcgaattttgaattttctcaatggctcaatcgtgtcttaaaattgttcgaatcaacaatctaaggaacagagtgaatcgtcggattttgattctccgacgattcacacggttgttatggagtagaatcgttgcttgtactcctggcaaatctcggagatatctcttgctttctcgcgctcttccgtctccgactgtttctcgtccttctccttctccgatccccgccgtcgatgtcgtcgtcggtggtggtggtggtggtggtgagtttgttcgtcgttcgtcggttgtttacgataatgataacagtcatcggagatcggattctgatttggtttctttgaagattagtctcttaggagatccagaaatcggaaaaactagcttcctggcgaaatatgttggagaagagaaagaagtagaaatgagagaattggagaaaggtataaattgtacggacaagacgttatacatgggaggtgctcgcatttcatatagtatctgggaattagaagctgagagatcacgagatcaaatccctgtggcttgcaaggactctgttgccattctctttatgtttgatttaaccagtcgttgcacgcttaatagtgtcattagctggtatcaacaagctaggaagtcaaatcagacggcgataccagttatggtaggaaccaagtttgatgagtttattcagcttcctattgatctgcaatggacaattgctagccaggcgagaacatatgcgaaggctttaaacgcgacgctcttcttctcgagtgcttcatacaacataaacgtgaataagatctttaagtttgtgacggcgaagctcttcgacttaccatggacggtggaacgcaatctcacaatcggagaaccaatcatcgacttctagaatatgtatttgtatataatataaaagaagcgaatcctgaagaatgcgttttttttttttttttttttaattcaccgctaaagcttgtcgccgtgggactgatcggactagtcgtatttaagcgaaatggagagatgaagcggcggagatttcgcccgcttttctcc

SEQ ID NO: 391 - protein, 291 aa, Arabidopsis thaliana
MAQSCLKIVRINNLRNRVNRRILILRRFTRLLWSRIVACTPGKSRRYLLLSRALPSPTVSRPSPSPIPAVDVVVGGGGGGGEFVRRSSVVYDNDNSHRRSDSDLVSLKISLLGDPEIGKTSFLAKYVGEEKEVEMRELEKGINCTDKTLYMGGARISYSIWELEAERSRDQIPVACKDSVAILFMFDLTSRCTLNSVISWYQQARKSNQTAIPVMVGTKFDEFIQLPIDLQWTIASQARTYAKALNATLFFSSASYNINVNKIFKFVTAKLFDLPWTVERNLTIGEPIIDF

SEQ ID NO: 392 - protein, 157 aa, Arabidopsis thaliana
MRELEKGINCTDKTLYMGGARISYSIWELEAERSRDQIPVACKDSVAILFMFDLTSRCTLNSVISWYQQARKSNQTAIPVMVGTKFDEFIQLPIDLQWTIASQARTYAKALNATLFFSSASYNINVNKIFKFVTAKLFDLPWTVERNLTIGEPIIDF

SEQ ID NO: 393 - DNA, 1157 bp, Arabidopsis thaliana
atatatcacagccatggtggttgtcactcacatctccacttccttccaccaaatctctccttccttcttccatctccgtcttcgtaatccctccaccacttcttcgtctcgtcccaaactcgacggtggtttcgctttgtcaattcgagcttacatagagaaaccaaactctttctccaccttcgctaacaaagtcatcggttctcttcccgttatcggactcctcgctcgaattatcagcgatgaaggcggcgttggtagagatctcgtcgatttcgctgagtttaggaaacgagttgggaataaatgtactcctgatgattctagggctttctatgagttccaacagcgacgaggcaaggcaggtgagcctttgtatgtgcttctgtgttgttgggttgctgcagtaggtgcaggtcttctcaaatctgaagagattcttgaaggtgttactagagttagcatttccaatgatctcgagtttgaagaacagaacttcattgctttgatgactgaagctagacagagaagagcaaagttgaacattgatgcgccaacaataccgatggaactaagagttgaaaaggctcttgaaggtatttatgcttgttgctttcggagaggacttattgaagaggaggatgagaagcttcttaaagtgatgttaatagcggttttcccatcggttgagaagtctgagatagagagaatcatcaaagagaaggcgacaagggttgaggaaggaggagaggaagagaatgttatggcgaaacggttgcctaaagaagctattcaaatgcagatgaaggatcttgaattccttcaacaacaaaacatagagtcttaacaatagaggttgagatgccaaaacatgtttactttttcagtacggattattttaaaaaatgcaatcaacttttttcagtcatgagcaagtaattgttactgcataggtttcgagatatggttgcttcctatcatatcttttgagaacttggattgattcattcagttttttagatggtgtttgccgtatggtagatgtgtgaatttgctccagtacattggaacaacatttgaaactataggtaatagagttataaacttagttttcaataagatgtttttgtaagacattaaaataatatagtccatct

SEQ ID NO: 394 - protein, 281 aa, Arabidopsis thaliana
YITAMVVVTHISTSFHQISPSFFHLRLRNPSTTSSSRPKLDGGFALSIRAYIEKPNSFSTFANKVIGSLPVIGLLARIISDEGGVGRDLVDFAEFRKRVGNKCTPDDSRAFYEFQQRRGKAGEPLYVLLCCWVAAVGAGLLKSEEILEGVTRVSISNDLEFEEQNFIALMTEARQRRAKLNIDAPTIPMELRVEKALEGIYACCFRRGLIEEEDEKLLKVMLIAVFPSVEKSEIERIIKEKATRVEEGGEEENVMAKRLPKEAIQMQMKDLEFLQQQNIES

SEQ ID NO: 395 - protein, 277 aa, Arabidopsis thaliana
MVVVTHISTSFHQISPSFFHLRLRNPSTTSSSRPKLDGGFALSIRAYIEKPNSFSTFANKVIGSLPVIGLLARIISDEGGVGRDLVDFAEFRKRVGNKCTPDDSRAFYEFQQRRGKAGEPLYVLLCCWVAAVGAGLLKSEEILEGVTRVSISNDLEFEEQNFIALMTEARQRRAKLNIDAPTIPMELRVEKALEGIYACCFRRGLIEEEDEKLLKVMLIAVFPSVEKSEIERIIKEKATRVEEGGEEENVMAKRLPKEAIQMQMKDLEFLQQQNIES

SEQ ID NO: 396 - DNA, 778 bp, Arabidopsis thaliana
atcttgtatttagttctcttgttaaactttgcctcttcgtcttttgctccagagtttttgtgcggctgccattttcgatttccaaaggttttgagctttgaaaaatggtgagaatcagtgtgcttaacgatgctcttaagagtatgtacaatgctgagaagagagggaagaggcaagtcatgatcaggccttcctctaaagtgatcatcaagtttcttatcgtcatgcagaaacacggttacattggtgagtttgagtacgttgatgaccacaggtctggaaagatcgtggtcgagcttaatggaagacttaacaaatgtggagtcatcagtcctcgtttcgatgttggagttaaggagattgaaggctggaccgctcgtcttcttccttccagacagtttgggtacattgttcttacgacctcggctggtattatggaccacgaagaagccaggagaaagaatgttggtggcaaggttcttggcttcttttactgaatcaagtcttgaagaagagaatcattatggttggtgatactttgcttctccttttggtgagaagaggattccgattgagctaaatgtttaagggtagtagagtttttgatgtcttcttctgtttgttatctttagatgatatgccattttgttcgttttggtttttgcgcaaaagttgttaaagacttgcaaagtagacagtaatttcaatttctgttttctacaacaaaaaacacttgcttttcttgagccaatcttatctatcgagacgtttcaatttc

SEQ ID NO: 397 - protein, 130 aa, Arabidopsis thaliana
MVRISVLNDALKSMYNAEKRGKRQVMIRPSSKVIIKFLIVMQKHGYIGEFEYVDDHRSGKIVVELNGRLNKCGVISPRFDVGVKEIEGWTARLLPSRQFGYIVLTTSAGIMDHEEARRKNVGGKVLGFFY

SEQ ID NO: 398 - protein, 117 aa, Arabidopsis thaliana
MYNAEKRGKRQVMIRPSSKVIIKFLIVMQKHGYIGEFEYVDDHRSGKIVVELNGRLNKCGVISPRFDVGVKEIEGWTARLLPSRQFGYIVLTTSAGIMDHEEARRKNVGGKVLGFFY

SEQ ID NO: 399 - protein, 105 aa, Arabidopsis thaliana
MIRPSSKVIIKFLIVMQKHGYIGEFEYVDDHRSGKIVVELNGRLNKCGVISPRFDVGVKEIEGWTARLLPSRQFGYIVLTTSAGIMDHEEARRKNVGGKVLGFFY

SEQ ID NO: 400 - DNA, 1417 bp, Arabidopsis thaliana
atttccctttttctctgtaattttcaattcccaaaataaagaagctttcgtttctctctcgcattgacccttcttctccagttttatgttttgcctctctcccacttctgtaaataatcttctcacatccccgcacgattattctctagccgatcaacgaacacagagacgctaatgtatttgactcgattcgaatcattagtcttctaatcacaccgattgatttccacccacagatttcttgtctgaaatttagggttagcgaaggtttggatcaatgatgcaaggtgaagtacaattgcagccaccggattcacagaaactaagtgattccgctcctttgttaggagatcacaccaattcttcttcggcgtctccttctgctgcgtctgtggtggcaggaaatagcgatgagataaaggctgaagaagatttagagaacgatgcttcttcagctccttgttgtcgtatttgtttggaggacgatagtgaattgttaggcgatgaattgatttcaccttgtatgtgtaaaggcactcaacaattcgtgcatcgctcatgtctcgatcattggcgatcggttaaagaaggttttgctttctctcactgtactacttgcaaagcacagtttcatctgagagtcgaaccctttgaggataacaattcgtggcgtagaaaagctaaattcagactctttgtcgcaagagatgtgcttttggttttcttagctgtgcagactgttatcgctgtgatggccggattcgcatatatgatggacaaagacggagagtttcgcaactctttcaacgatgattgggatcgtattttgtcgaaacatcccatcccgttttattactgcattggggttatatccttctttgtgctgactggatttcttggaatcattctacattgctctgctctcaacggtaatgacccgaggatggctggatgccagaactgctgttatggatggggtgtcttggattgtttccctgcttcaatggaagcttgtttcgctcttgttgttgtttttgtcgtcatctttgccattcttggtttagcgtatgggtttcttgctgcaactatggctatccaaaggatatggcagagacattaccatattctcaccaagcgagagctcacaaaggagtacattgtggaggatcttcacggaagttacactcccccgaagctggatgcagagcacgaaggaagactgaaaatgctgaaacttctgtgaccgtgttttttaactgtcaaataaaggttgtaaggagtttcgggcacatgagagagacgagttcatacgtatatgttcacagagtgtctttcttttctttatcatgcgatgaaaagtacctaatggatattttgtcttatatatatttattataattatggtatgaggtgatgc

SEQ ID NO: 401 - protein, 321 aa, Arabidopsis thaliana
MMQGEVQLQPPDSQKLSDSAPLLGDHTNSSSASPSAASVVAGNSDEIKAEEDLENDASSAPCCRICLEDDSELLGDELISPCMCKGTQQFVHRSCLDHWRSVKEGFAFSHCTTCKAQFHLRVEPFEDNNSWRRKAKFRLFVARDVLLVFLAVQTVIAVMAGFAYMMDKDGEFRNSFNDDWDRILSKHPIPFYYCIGVISFFVLTGFLGIILHCSALNGNDPRMAGCQNCCYGWGVLDCFPASMEACFALVVVFVVIFAILGLAYGFLAATMAIQRIWQRHYHILTKRELTKEYIVEDLHGSYTPPKLDAEHEGRLKMLKLL

SEQ ID NO: 402 - protein, 320 aa, Arabidopsis thaliana
MQGEVQLQPPDSQKLSDSAPLLGDHTNSSSASPSAASVVAGNSDEIKAEEDLENDASSAPCCRICLEDDSELLGDELISPCMCKGTQQFVHRSCLDHWRSVKEGFAFSHCTTCKAQFHLRVEPFEDNNSWRRKAKFRLFVARDVLLVFLAVQTVIAVMAGFAYMMDKDGEFRNSFNDDWDRILSKHPIPFYYCIGVISFFVLTGFLGIILHCSALNGNDPRMAGCQNCCYGWGVLDCFPASMEACFALVVVFVVIFAILGLAYGFLAATMAIQRIWQRHYHILTKRELTKEYIVEDLHGSYTPPKLDAEHEGRLKMLKLL

SEQ ID NO: 403 - protein, 239 aa, Arabidopsis thaliana
MCKGTQQFVHRSCLDHWRSVKEGFAFSHCTTCKAQFHLRVEPFEDNNSWRRKAKFRLFVARDVLLVFLAVQTVIAVMAGFAYMMDKDGEFRNSFNDDWDRILSKHPIPFYYCIGVISFFVLTGFLGIILHCSALNGNDPRMAGCQNCCYGWGVLDCFPASMEACFALVVVFVVIFAILGLAYGFLAATMAIQRIWQRHYHILTKRELTKEYIVEDLHGSYTPPKLDAEHEGRLKMLKLL

SEQ ID NO: 404 - DNA, 3109 bp, Arabidopsis thaliana
atccatccaaatctcaatccctaattagggttcatttctctgtttctccaaacaggggaattcgaagatgatggagtctaggtctcccatctgcaacacttgtggtgaagagattggtgtaaaatcaaacggagagttctttgtggcttgtcatgagtgtagtttcccaatctgcaaagcttgtcttgagtatgaattcaaagaaggtcgaagaatttgcttgcgttgcggcaatccttacgatgagaatgtgtttgatgatgttgagacaaagacatctaaaactcaatccattgttccaacacagaccaataacacttctcaggattcagggattcatgctagacatataagtacagtctcaacaatagacagtgaactgaatgatgaatatggcaatccaatttggaagaacagagtggagagctggaaagacaagaaagacaagaagagcaagaagaagaagaaagatccaaaagcaacaaaagctgaacaacatgaggctcagattcctacccaacagcacatggaagatacgccaccgaacacagaatctggtgctacagatgtgctttcggttgtgattcctatcccaaggacaaaaatcacttcatataggattgtcatcatcatgcggttgatcatcttggctctgttttttaactaccgtatcacgcatcctgtcgatagcgcttacggtttatggctaacatctgtgatatgtgagatttggtttgctgtttcttgggtgttggatcagttccctaaatggtctcctattaaccgagaaacttacatcgaccggttatccgcaagattcgaaagagaaggcgagcaatcacagcttgcagctgtagatttctttgttagtacggtagatccattaaaggagccacctttgataactgcaaacacggttctttcgatcctcgcgcttgattatccggtggataaagtctcttgctatgtatctgatgatggtgctgcaatgctttcgtttgagtctttggttgagacagcagattttgctaggaaatgggtacctttctgcaaaaagtactccatcgagccacgagctcccgagttttacttctcgcttaaaatcgattacttgagggataaagttcaaccttcttttgtgaaagaacgtagagccatgaaaagagattatgaagagtttaaaataagaatgaatgctttagtcgccaaggctcaaaagacaccagaagaaggatggacaatgcaagatggaacatcttggcccgggaacaacactcgtgaccatcccgggatgattcaggtttttcttggatatagcggtgctcgcgacattgaaggaaatgaacttccaagattagtttacgtctctagagagaagagacctggttatcagcatcacaaaaaggccggggcagagaacgcattggtgagggtgtctgcggttttaacgaatgctccattcattcttaaccttgattgtgatcactacgtcaacaatagcaaagccgtgcgtgaagcaatgtgctttttaatggatcctgttgttggtcaagacgtttgctttgttcagttcccacagagatttgatggaatcgacaagagtgatcgatatgctaaccgcaacattgttttcttcgatgttaatatgagagggcttgatgggattcaaggtccagtttatgttggtacaggtactgtctttagaagacaagcactttacggatacagtccaccttcaaaaccgaggattttaccgcaatcttcatcatcgtcgtgttgctgtctaaccaagaagaaacaacctcaagatccttccgagatttacaaagatgcaaagcgagaagaacttgatgctgcaatctttaatcttggggacctagacaactacgatgagtacgacagatcgatgctgatttcacaaacaagctttgagaaaacgtttggtctctctacggttttcatcgagtctactcttatggagaatggcggtgttcccgactctgtaaacccgtcaacgctcatcaaagaagctattcatgtcattagctgtggatacgaagagaaaactgaatggggaaaagaaataggatggatttacgggtcgatcaccgaagacattttgacgggtttcaagatgcattgtcgtggatggaggtcgatttactgtatgccattaagaccagcatttaaaggatctgctccaatcaatctatcagataggcttcaccaggttctacgttgggctcttggctcggttgagatcttccttagccgacattgtcctttgtggtacggttgcagcggaggccgcctcaagttgctccagagattagcttatataaacactattgtctacccattcacttctttgcctcttgttgcttactgtactcttccagctatttgccttcttaccggcaaatttatcatcccaacgctatcaaacctagcaagcatgctgtttctaggtctctttatatcaatcatcttaacgagtgtcctcgagcttcgatggagcggagtcagtatcgaagacttatggagaaacgaacagttttgggttattggaggtgtctcagctcatctctttgccgttttccaaggattcctcaaaatgctcgctggtctcgacacaaatttcacagtcacatcgaaaaccgcagatgatttagaattcggtgagctttacattgtcaaatggacaactctcttgatccctccgacgtcacttcttataatcaacttggtcggagttgttgctggattctctgacgctcttaacaaaggttatgaagcttggggacctttgtttgggaaggtatttttcgccttttgggtgattcttcatctttatccattcctcaaaggtcttatgggaagacaaaacagaacacctactattgttattctctggtctatcttgcttgcttctgtgttttcacttgtttgggttcgtatcaatcctttcgtctccaaaaccgatacgacttccctttctctgaactgtcttttgatcgattgctaagagaagatacgttatgtttgtattttgaaagattgatcatatgtgttttggttgttttataaattttcatatggttgcttgagc

SEQ ID NO: 405 - protein, 985 aa, Arabidopsis thaliana
MMESRSPICNTCGEEIGVKSNGEFFVACHECSFPICKACLEYEFKEGRRICLRCGNPYDENVFDDVETKTSKTQSIVPTQTNNTSQDSGIHARHISTVSTIDSELNDEYGNPIWKNRVESWKDKKDKKSKKKKKDPKATKAEQHEAQIPTQQHMEDTPPNTESGATDVLSVVIPIPRTKITSYRIVIIMRLIILALFFNYRITHPVDSAYGLWLTSVICEIWFAVSWVLDQFPKWSPINRETYIDRLSARFEREGEQSQLAAVDFFVSTVDPLKEPPLITANTVLSILALDYPVDKVSCYVSDDGAAMLSFESLVETADFARKWVPFCKKYSIEPRAPEFYFSLKIDYLRDKVQPSFVKERRAMKRDYEEFKIRMNALVAKAQKTPEEGWTMQDGTSWPGNNTRDHPGMIQVFLGYSGARDIEGNELPRLVYVSREKRPGYQHHKKAGAENALVRVSAVLTNAPFILNLDCDHYVNNSKAVREAMCFLMDPVVGQDVCFVQFPQRFDGIDKSDRYANRNIVFFDVNMRGLDGIQGPVYVGTGTVFRRQALYGYSPPSKPRILPQSSSSSCCCLTKKKQPQDPSEIYKDAKREELDAAIFNLGDLDNYDEYDRSMLISQTSFEKTFGLSTVFIESTLMENGGVPDSVNPSTLIKEAIHVISCGYEEKTEWGKEIGWIYGSITEDILTGFKMHCRGWRSIYCMPLRPAFKGSAPINLSDRLHQVLRWALGSVEIFLSRHCPLWYGCSGGRLKLLQRLAYINTIVYPFTSLPLVAYCTLPAICLLTGKFIIPTLSNLASMLFLGLFISIILTSVLELRWSGVSIEDLWRNEQFWVIGGVSAHLFAVFQGFLKMLAGLDTNFTVTSKTADDLEFGELYIVKWTTLLIPPTSLLIINLVGVVAGFSDALNKGYEAWGPLFGKVFFAFWVILHLYPFLKGLMGRQNRTPTIVILWSILLASVFSLVWVRINPFVSKTDTTSLSLNCLLIDC

SEQ ID NO: 406 - protein, 984 aa, Arabidopsis thaliana
MESRSPICNTCGEEIGVKSNGEFFVACHECSFPICKACLEYEFKEGRRICLRCGNPYDENVFDDVETKTSKTQSIVPTQTNNTSQDSGIHARHISTVSTIDSELNDEYGNPIWKNRVESWKDKKDKKSKKKKKDPKATKAEQHEAQIPTQQHMEDTPPNTESGATDVLSVVIPIPRTKITSYRIVIIMRLIILALFFNYRITHPVDSAYGLWLTSVICEIWFAVSWVLDQFPKWSPINRETYIDRLSARFEREGEQSQLAAVDFFVSTVDPLKEPPLITANTVLSILALDYPVDKVSCYVSDDGAAMLSFESLVETADFARKWVPFCKKYSIEPRAPEFYFSLKIDYLRDKVQPSFVKERRAMKRDYEEFKIRMNALVAKAQKTPEEGWTMQDGTSWPGNNTRDHPGMIQVFLGYSGARDIEGNELPRLVYVSREKRPGYQHHKKAGAENALVRVSAVLTNAPFILNLDCDHYVNNSKAVREAMCFLMDPVVGQDVCFVQFPQRFDGIDKSDRYANRNIVFFDVNMRGLDGIQGPVYVGTGTVFRRQALYGYSPPSKPRILPQSSSSSCCCLTKKKQPQDPSEIYKDAKREELDAAIFNLGDLDNYDEYDRSMLISQTSFEKTFGLSTVFIESTLMENGGVPDSVNPSTLIKEAIHVISCGYEEKTEWGKEIGWIYGSITEDILTGFKMHCRGWRSIYCMPLRPAFKGSAPINLSDRLHQVLRWALGSVEIFLSRHCPLWYGCSGGRLKLLQRLAYINTIVYPFTSLPLVAYCTLPAICLLTGKFIIPTLSNLASMLFLGLFISIILTSVLELRWSGVSIEDLWRNEQFWVIGGVSAHLFAVFQGFLKMLAGLDTNFTVTSKTADDLEFGELYIVKWTTLLIPPTSLLIINLVGVVAGFSDALNKGYEAWGPLFGKVFFAFWVILHLYPFLKGLMGRQNRTPTIVILWSILLASVFSLVWVRINPFVSKTDTTSLSLNCLLIDC

SEQ ID NO: 407 - protein, 832 aa, Arabidopsis thaliana
MEDTPPNTESGATDVLSVVIPIPRTKITSYRIVIIMRLIILALFFNYRITHPVDSAYGLWLTSVICEIWFAVSWVLDQFPKWSPINRETYIDRLSARFEREGEQSQLAAVDFFVSTVDPLKEPPLITANTVLSILALDYPVDKVSCYVSDDGAAMLSFESLVETADFARKWVPFCKKYSIEPRAPEFYFSLKIDYLRDKVQPSFVKERRAMKRDYEEFKIRMNALVAKAQKTPEEGWTMQDGTSWPGNNTRDHPGMIQVFLGYSGARDIEGNELPRLVYVSREKRPGYQHHKKAGAENALVRVSAVLTNAPFILNLDCDHYVNNSKAVREAMCFLMDPVVGQDVCFVQFPQRFDGIDKSDRYANRNIVFFDVNMRGLDGIQGPVYVGTGTVFRRQALYGYSPPSKPRILPQSSSSSCCCLTKKKQPQDPSEIYKDAKREELDAAIFNLGDLDNYDEYDRSMLISQTSFEKTFGLSTVFIESTLMENGGVPDSVNPSTLIKEAIHVISCGYEEKTEWGKEIGWIYGSITEDILTGFKMHCRGWRSIYCMPLRPAFKGSAPINLSDRLHQVLRWALGSVEIFLSRHCPLWYGCSGGRLKLLQRLAYINTIVYPFTSLPLVAYCTLPAICLLTGKFIIPTLSNLASMLFLGLFISIILTSVLELRWSGVSIEDLWRNEQFWVIGGVSAHLFAVFQGFLKMLAGLDTNFTVTSKTADDLEFGELYIVKWTTLLIPPTSLLIINLVGVVAGFSDALNKGYEAWGPLFGKVFFAFWVILHLYPFLKGLMGRQNRTPTIVILWSILLASVFSLVWVRINPFVSKTDTTSLSLNCLLIDC

SEQ ID NO: 408 - DNA, 522 bp, Arabidopsis thaliana
atgttacacattgttagaatttcaagaatcggcggcggaatattctcgccggaaaatggggaaagctagaggagttaacagcggcggcggagagagctctctcggttatctttttggttccggcgagtctgttcccaaaccaaacaagcccaacgctaaaaccggttttaccaccaccacgaccaccacaacaacaacggatggagctggaggtagacccaagaccacgaccacaactacaacaaccggagataaaaacaagacagaggagaactcggctggtgtgagaggaagtcctaataattactacagatcagatggacaaaactgtggcaacttcctcacggaacgaccatctacgaaggttcatgctgcaccaggtggaggatcttctttgggttacttgtttggatctggtccttgtggatctgacaaatgatttctatttccacgacaaacatctcatgcatttgaccctttgaaaaaatgtaaaaattgttctaaactttattctttatcctc

SEQ ID NO: 409 - protein, 145 aa, Arabidopsis thaliana
CYTLLEFQESAAEYSRRKMGKARGVNSGGGESSLGYLFGSGESVPKPNKPNAKTGFTTTTTTTTTTDGAGGRPKTTTTTTTTGDKNKTEENSAGVRGSPNNYYRSDGQNCGNFLTERPSTKVHAAPGGGSSLGYLFGSGPCGSDK

SEQ ID NO: 410 - protein, 127 aa, Arabidopsis thaliana
MGKARGVNSGGGESSLGYLFGSGESVPKPNKPNAKTGFTTTTTTTTTTDGAGGRPKTTTTTTTTGDKNKTEENSAGVRGSPNNYYRSDGQNCGNFLTERPSTKVHAAPGGGSSLGYLFGSGPCGSDK

SEQ ID NO: 411 - DNA, 1108 bp, Arabidopsis thaliana
agaatttgcaaaatcgaatttgtgtggagaaagaagctcgtcaccaagactgaatttgtggctacgtctaaaacacattcttccacatctcttctctgtttctcaagacaaaaaaagaaaaaatggtggaagatgaacaatgacgaagaatcattgttattgttcatgcattaaccttgttgttatgttcctccatggcctgttacatcgttccttattaccaccatcctgttttgtctcatcccaatagagaaatcttcagtcaccgtcaccaccaccaccaccgtttctgcaacaatctcttgaatagaagaattagtgttcctcgaagctccgctattagtgacggtggtgtctcctacaatactctagtctccgaggcggtgaggcttttggttccacaagcaaactttgattcttcaaagcttaaagttgagttcttaggagagttattggagaacaagagtaacggaggaattattacgccgcggacttatattctttcgcattgtgacttcactgctaacttaacgttaacaatctcaaacgttatcaatctggatcaactagaaggctggtacaagaaagatgatgtggttgctgagtggaagaaggtgaatgatgagctgcgtttacatattcattgttgtgtgagtggtatgagtttattgcaggatgttgctgctgagcttaggtatcatattttctccaaggaattgcctttggtacttaaagctgtggtgcatggagattcagttatgtttagagagaatcctgagctaatggatgcttatgtatgggtttatttccattcaagcacacctaagtacaatcggatcgagtgttggggacctcttaaggatgctgcgaagggaaagcagcagggcaatcatcaaggcttcttgagttcgacgacttcgaggaaattgattcgacataagtctatcttccataccttatttacgtttcttctgtgagacaaagttgtacattctcctgtgtttttttttgcaaatgatgtagatttcttaatgagcatctgacacaagtgcaatttgccaacattcaaatgttcatacttgggaaatttatgagagcctagttttct

SEQ ID NO: 412 - protein, 260 aa, Arabidopsis thaliana
MACYIVPYYHHPVLSHPNREIFSHRHHHHHRFCNNLLNRRISVPRSSAISDGGVSYNTLVSEAVRLLVPQANFDSSKLKVEFLGELLENKSNGGIITPRTYILSHCDFTANLTLTISNVINLDQLEGWYKKDDVVAEWKKVNDELRLHIHCCVSGMSLLQDVAAELRYHIFSKELPLVLKAVVHGDSVMFRENPELMDAYVWVYFHSSTPKYNRIECWGPLKDAAKGKQQGNHQGFLSSTTSRKLIRHKSIFHTLFTFLL

SEQ ID NO: 413 - DNA, 1207 bp, Arabidopsis thaliana
gaagcggataacgaaaagctcgccgagaaagcacaaatggcgggcgtgaaatctctgcaacctagactcatatcttcctttctcggcaacaattctattagatcaacgcaaccacttattcatctctttcgcttcgatttaggaagaagacatgtttcgatgcaattatcaagaaccttttctggattaaccgatctcctgtttaatagaagaaatgaagatgaagttattgatggcaagagaaaacgtctgagaccgggaaatgtatctcctcgtcgtcctgttccgggtcatataacaaaacctccttatgttgattctcttcaagctcccggaatctcaagtggacttgaagttcatgataagaaaggtatagaatgcatgagagcttctggaatacttgcagctagggttcgagattacgctggcactttggttaagccaggcgtaaccactgatgaaatcgatgaagcagttcacaatatgattattgagaatggagcttatccttcgcctcttggttatggaggtttcccgaaaagtgtttgcacatctgtgaatgaatgcatttgccatggtataccagattcaagaccacttgaggatggggatattatcaacatcgatgtcacagtttatttgaatggttatcatggtgatacttcagcaactttcttctgtggaaatgttgacgagaaggctaaaaagctagtcgaggtgacgaaagagtctctcgacaaagcaatatcaatatgtggtcccggagttgagtacaagaaaatcggcaaagtcattcatgatcttgcagataaacataaatatggagttgttcgacaatttgtaggccacggggttggcagcgtcttccacgctgatccagttgttctgcatttccggaacaatgaagctggacgtatggtcttgaatcaaaccttcaccattgaaccgatgcttacaataggaagcagaaacccgataatgtgggatgataactggaccgtggtaacagaagatgcaagcctctcggcgcaattcgagcataccattcttataaccaaagatggtgctgagattctaaccaagtgttaaaaaaatgattctgaaaaattgatcttcttggaatgaaacccaaagccttaaggtatgtaagaatcatattcttattcaaatattgttttgctcacaagcagatgcgaacagttactaa

SEQ ID NO: 414 - protein, 362 aa, Arabidopsis thaliana
EADNEKLAEKAQMAGVKSLQPRLISSFLGNNSIRSTQPLIHLFRFDLGRRHVSMQLSRTFSGLTDLLFNRRNEDEVIDGKRKRLRPGNVSPRRPVPGHITKPPYVDSLQAPGISSGLEVHDKKGIECMRASGILAARVRDYAGTLVKPGVTTDEIDEAVHNMIIENGAYPSPLGYGGFPKSVCTSVNECICHGIPDSRPLEDGDIINIDVTVYLNGYHGDTSATFFCGNVDEKAKKLVEVTKESLDKAISICGPGVEYKKIGKVIHDLADKHKYGVVRQFVGHGVGSVFHADPVVLHFRNNEAGRMVLNQTFTIEPMLTIGSRNPIMWDDNWTVVTEDASLSAQFEHTILITKDGAEILTKC

SEQ ID NO: 415 - protein, 350 aa, Arabidopsis thaliana
MAGVKSLQPRLISSFLGNNSIRSTQPLIHLFRFDLGRRHVSMQLSRTFSGLTDLLFNRRNEDEVIDGKRKRLRPGNVSPRRPVPGHITKPPYVDSLQAPGISSGLEVHDKKGIECMRASGILAARVRDYAGTLVKPGVTTDEIDEAVHNMIIENGAYPSPLGYGGFPKSVCTSVNECICHGIPDSRPLEDGDIINIDVTVYLNGYHGDTSATFFCGNVDEKAKKLVEVTKESLDKAISICGPGVEYKKIGKVIHDLADKHKYGVVRQFVGHGVGSVFHADPVVLHFRNNEAGRMVLNQTFTIEPMLTIGSRNPIMWDDNWTVVTEDASLSAQFEHTILITKDGAEILTKC

SEQ ID NO: 416 - protein, 309 aa, Arabidopsis thaliana
MQLSRTFSGLTDLLFNRRNEDEVIDGKRKRLRPGNVSPRRPVPGHITKPPYVDSLQAPGISSGLEVHDKKGIECMRASGILAARVRDYAGTLVKPGVTTDEIDEAVHNMIIENGAYPSPLGYGGFPKSVCTSVNECICHGIPDSRPLEDGDIINIDVTVYLNGYHGDTSATFFCGNVDEKAKKLVEVTKESLDKAISICGPGVEYKKIGKVIHDLADKHKYGVVRQFVGHGVGSVFHADPVVLHFRNNEAGRMVLNQTFTIEPMLTIGSRNPIMWDDNWTVVTEDASLSAQFEHTILITKDGAEILTKC

SEQ ID NO: 417 - DNA, 441 bp, Arabidopsis thaliana
tcattcatagcaaacaatcacatcatcgcaatatacataaacaaaagaggaagaaaaatggcaaccgagtggtgtagttatattgggaagaactcatggccggagcttttaggaacaaatggagactatgcggcttcggtgataaaaggagagaactcgagcctcaacgttgtcgtggtttcggatggaaattatgtgactgaagacctcagttgctaccgcgttagggtttgggttgacgaaatccgtatcgttgtcagaaacccaaccgccggctagacatgtatatggaccaccattatgctatagccatgtaggcgccttactatgaataaatgaaactatatataatgcatgcatagttggttggttggtcataatgtaacatctattgtttgcttgaatgattctggtgtccgatcatataacgcatttgaatgc

SEQ ID NO: 418 - protein, 92 aa, Arabidopsis thaliana
SFIANNHIIAIYINKRGRKMATEWCSYIGKNSWPELLGTNGDYAASVIKGENSSLNVVVVSDGNYVTEDLSCYRVRVWVDEIRIVVRNPTAG

SEQ ID NO: 419 - protein, 73 aa, Arabidopsis thaliana
MATEWCSYIGKNSWPELLGTNGDYAASVIKGENSSLNVVVVSDGNYVTEDLSCYRVRVWVDEIRIVVRNPTAG

SEQ ID NO: 420 - DNA, 1371 bp, Arabidopsis thaliana
aacgaacaaaccctagaccgttaaaacccttatcaatttcgctgaaacggcaaatggaagaagtgtcgtcggagatggaagtggaggttcaaaatcgtcagctttcggattcttctccggctcaaaacgtgaagaaatttgggctcaagaactctattcagaccaacttcggctctgactacgtcttccagattgtcccaaaaatcgattggacagcaatcgcggtttccttatcaaccaacaccgtcaagctttactcgccggtgactggtcagtactacggcgaatgtaaaggccactccgataccgtcaatcagattgcgttttcctccgactcggcggcgtctcctcacgttttgcactcttgttcctccgatggtaccattagatcttgggacactcgaagtttccaacaggtttcgcgtattgatactgggaatgatcaggagattttcagcttctcctatggaggtgctgcagataatcttctggctggtggatgcaaagagcaggttcttttgtgggactggagaaactcaaagcaagttgcttgtttagaggaatcccacatggacgacgtcactcaggtacactttgttcctaacaagcccaacaagcttctttccgcttccgtggatggattgatatgtctttttaacactgaaggtgatatcaatgacgatgatcatctggaatctgtcatcaacgtgggaacttcaattggcaaaataggtttcctcggagatggctataaaaagctctggtgtctcactcatatagaaactctaagtatttggaattgggaagacggaagctgtgaagtcaacctagagaaagctcgggaactcgcatcagatagttggactcaagataatgttgattattttgttgattgtcattgtccaggaggtgaagatttatgggtgatcggtggaacgtgcgcaggaaccgttggttattttccggtgaactacaaacagcctggatcaatcggtaccgctgaagctattcttggtggaggtcacatagatgtagtaaggagcgttctgcagatgccaggcgagtatggaggagctgcagggttatttggatggactgggggtgaagatgggcgactatgttgctggaagtcggatgaggatgctaccgagattaaccggtcttggacttcaagtgagttggttgttaagccgccaaggaaccgcaagaaaaacagacactctccttactagtaaacagatactactttttgggtcttgtgtcttttataaaagttgagactgaagaggacagtttcctttatgtctcttgttcttgttattattaaaaggcaaagttgtttaaatgaaatattgaagaaagattacatcc

SEQ ID NO: 421 - protein, 409 aa, Arabidopsis thaliana
RTNPRPLKPLSISLKRQMEEVSSEMEVEVQNRQLSDSSPAQNVKKFGLKNSIQTNFGSDYVFQIVPKIDWTAIAVSLSTNTVKLYSPVTGQYYGECKGHSDTVNQIAFSSDSAASPHVLHSCSSDGTIRSWDTRSFQQVSRIDTGNDQEIFSFSYGGAADNLLAGGCKEQVLLWDWRNSKQVACLEESHMDDVTQVHFVPNKPNKLLSASVDGLICLFNTEGDINDDDHLESVINVGTSIGKIGFLGDGYKKLWCLTHIETLSIWNWEDGSCEVNLEKARELASDSWTQDNVDYFVDCHCPGGEDLWVIGGTCAGTVGYFPVNYKQPGSIGTAEAILGGGHIDVVRSVLQMPGEYGGAAGLFGWTGGEDGRLCCWKSDEDATEINRSWTSSELVVKPPRNRKKNRHSPY

SEQ ID NO: 422 - protein, 392 aa, Arabidopsis thaliana
MEEVSSEMEVEVQNRQLSDSSPAQNVKKFGLKNSIQTNFGSDYVFQIVPKIDWTAIAVSLSTNTVKLYSPVTGQYYGECKGHSDTVNQIAFSSDSAASPHVLHSCSSDGTIRSWDTRSFQQVSRIDTGNDQEIFSFSYGGAADNLLAGGCKEQVLLWDWRNSKQVACLEESHMDDVTQVHFVPNKPNKLLSASVDGLICLFNTEGDINDDDHLESVINVGTSIGKIGFLGDGYKKLWCLTHIETLSIWNWEDGSCEVNLEKARELASDSWTQDNVDYFVDCHCPGGEDLWVIGGTCAGTVGYFPVNYKQPGSIGTAEAILGGGHIDVVRSVLQMPGEYGGAAGLFGWTGGEDGRLCCWKSDEDATEINRSWTSSELVVKPPRNRKKNRHSPY

SEQ ID NO: 423 - protein, 385 aa, Arabidopsis thaliana
MEVEVQNRQLSDSSPAQNVKKFGLKNSIQTNFGSDYVFQIVPKIDWTAIAVSLSTNTVKLYSPVTGQYYGECKGHSDTVNQIAFSSDSAASPHVLHSCSSDGTIRSWDTRSFQQVSRIDTGNDQEIFSFSYGGAADNLLAGGCKEQVLLWDWRNSKQVACLEESHMDDVTQVHFVPNKPNKLLSASVDGLICLFNTEGDINDDDHLESVINVGTSIGKIGFLGDGYKKLWCLTHIETLSIWNWEDGSCEVNLEKARELASDSWTQDNVDYFVDCHCPGGEDLWVIGGTCAGTVGYFPVNYKQPGSIGTAEAILGGGHIDVVRSVLQMPGEYGGAAGLFGWTGGEDGRLCCWKSDEDATEINRSWTSSELVVKPPRNRKKNRHSPY

SEQ ID NO: 424 - DNA, 2954 bp, Arabidopsis thaliana
tggatctaaaacttcaagaaaccaaaacaacacttcaaaaaaaaaaagagatctgttctatagagttttaatcttttctttcgactcgagtttggctcaacaaagtttatatcgatttggcactctaaaattgggatatacaggcagaagaaaatcgagataaatcaactaaatgatttggataatcatcttgaagatttgaaggaaaatccaagagcttcaaaaactccaaaaattgataggcatccatcatcatcatgtatcatccaaacatgttcgaatctcatcatcatatgttcgatatgacgccgaaaaactccgaaaacgatttgggtatcaccgggagccacgaagaggatttcgagactaagtccggcgcagaagtcaccatggagaatcctttagaagaagagcttcaagatcctaatcagcgtcccaacaaaaagaagcgttaccaccgtcacacacaacgccagattcaagagctagagtcgttcttcaaggaatgtcctcatccagacgataagcaaagaaaggagctgagtcgcgagctaagcttagaacctcttcaagtcaagttttggttccaaaacaaacgcactcaaatgaaggcacaacatgagaggcacgagaaccagatactgaagtcagaaaatgacaagctccgagcagagaacaataggtacaaggatgctctaagcaacgcaacatgcccaaactgtggtggtccggcagctataggagaaatgtccttcgacgaacagcatttaaggatcgaaaatgctcgtttacgcgaagagattgacagaatctctgccatagctgctaaatacgtagggaagcctttaatggctaattcctcttctttccctcagctctcttcttcacaccacattccctcgcgctcgcttgatcttgaagttgggaactttgggaacaataacaatagccacactggtttcgttggggaaatgtttggaagcagcgacattttgaggtcggtttcgataccttctgaggctgataagcctatgattgttgagttagctgttgcagcaatggaagagcttgtgagaatggctcaaactggtgatcccttatgggtttcaagcgataattctgttgagattctcaatgaagaagagtattttaggacgtttcctagaggaattggaccgaaacctatcggtttgagatcagaagcttcaagagagtctactgttgttatcatgaatcatatcaatctcattgagattctaatggatgtgaatcaatggtctagtgtgttctgcgggattgtatcaagagcattgactctagaagttctctcaactggcgtagcagggaactacaatggggcattgcaagtgatgacagcagagttccaagtcccatcgccgcttgtccctactcgtgagaactactttgtaaggtactgtaaacagcacagtgacggtatttgggcggttgtggatgtctctttggacagcctaagaccaagtccgatcactagaagcagaagaagaccctctggttgtctgattcaagaattgcagaatggttactccaaggtgacatgggtagagcatattgaggtggatgatagatcggttcacaacatgtataaaccgttggttaataccggtttagctttcggtgcgaaacgttgggtggctacacttgaccgccaatgcgagcggctcgccagttccatggccagcaacattccggcttgtgatctttccgtgataacgagtcctgaggggagaaagagcatgctgaaactagcggagagaatggtgatgagcttctgtaccggagtcggcgcgtcaactgcgcatgcctggactacattgtcgaccacaggatccgacgacgttcgggtcatgacccgaaagagcatggatgatccgggaagacctccaggcatcgttctcagcgccgctacttctttctggatccctgtagctccaaaacgagtgttcgattttctcagagatgaaaactcaagaagcgagtgggatatactttccaatggaggcttggttcaagaaatggctcatatcgcaaatggtcgtgatcctgggaatagtgtctccttgcttcgagtcaatagtgggaactcagggcagagcaacatgttgatcttacaagaaagttgtacggacgcatcagggtcctatgtgatatacgcaccagttgatataatagctatgaacgttgtcctgagtggtggtgatccggattatgtcgctttgttaccatccggattcgctattttgccggatggctctgctagaggaggaggaggtagtgctaatgccagtgctggagccggagttgaaggaggaggagaggggaataatcttgaagtggttactactactgggagttgtggcggttcactactcacagttgcgtttcagatacttgttgactctgttcctaccgctaaactctctctcggttcagttgctacagtcaatagtctgatcaaatgcactgtcgagcggattaaagccgctctggcctgcgacggagcctaatcgatgttttcggaaggtaagagtgaaaggggaggtttagggagtttatgataatgtttgtggtcttttgtttttttaagtcttttgagattctccaaaggaagtcaagaacgcacctttttgcgtttaatctcatttccgcgtttgttagcggcgggccgaaaaaaagaggcttgagaaagaaaaggtaaagaggttcgggtattgacttctgctggaaccaaaaaaaaaagaatcgggtttgttgtgtttcggcggtttagcgttttgcgttttctttgttattatttatcattgactagtgaacagtttagcgttctgcttttcgcgtctactgtgaaactccttgttattaagccactctagtggtactgtcattatatattatgaatctatgaaactgtgttt

SEQ ID NO: 425 - protein, 762 aa, Arabidopsis thaliana
MYHPNMFESHHHMFDMTPKNSENDLGITGSHEEDFETKSGAEVTMENPLEEELQDPNQRPNKKKRYHRHTQRQIQELESFFKECPHPDDKQRKELSRELSLEPLQVKFWFQNKRTQMKAQHERHENQILKSENDKLRAENNRYKDALSNATCPNCGGPAAIGEMSFDEQHLRIENARLREEIDRISAIAAKYVGKPLMANSSSFPQLSSSHHIPSRSLDLEVGNFGNNNNSHTGFVGEMFGSSDILRSVSIPSEADKPMIVELAVAAMEELVRMAQTGDPLWVSSDNSVEILNEEEYFRTFPRGIGPKPIGLRSEASRESTVVIMNHINLIEILMDVNQWSSVFCGIVSRALTLEVLSTGVAGNYNGALQVMTAEFQVPSPLVPTRENYFVRYCKQHSDGIWAVVDVSLDSLRPSPITRSRRRPSGCLIQELQNGYSKVTWVEHIEVDDRSVHNMYKPLVNTGLAFGAKRWVATLDRQCERLASSMASNIPACDLSVITSPEGRKSMLKLAERMVMSFCTGVGASTAHAWTTLSTTGSDDVRVMTRKSMDDPGRPPGIVLSAATSFWIPVAPKRVFDFLRDENSRSEWDILSNGGLVQEMAHIANGRDPGNSVSLLRVNSGNSGQSNMLILQESCTDASGSYVIYAPVDIIAMNVVLSGGDPDYVALLPSGFAILPDGSARGGGGSANASAGAGVEGGGEGNNLEVVTTTGSCGGSLLTVAFQILVDSVPTAKLSLGSVATVNSLIKCTVERIKAALACDGA

SEQ ID NO: 426 - protein, 757 aa, Arabidopsis thaliana
MFESHHHMFDMTPKNSENDLGITGSHEEDFETKSGAEVTMENPLEEELQDPNQRPNKKKRYHRHTQRQIQELESFFKECPHPDDKQRKELSRELSLEPLQVKFWFQNKRTQMKAQHERHENQILKSENDKLRAENNRYKDALSNATCPNCGGPAAIGEMSFDEQHLRIENARLREEIDRISAIAAKYVGKPLMANSSSFPQLSSSHHIPSRSLDLEVGNFGNNNNSHTGFVGEMFGSSDILRSVSIPSEADKPMIVELAVAAMEELVRMAQTGDPLWVSSDNSVEILNEEEYFRTFPRGIGPKPIGLRSEASRESTVVIMNHINLIEILMDVNQWSSVFCGIVSRALTLEVLSTGVAGNYNGALQVMTAEFQVPSPLVPTRENYFVRYCKQHSDGIWAVVDVSLDSLRPSPITRSRRRPSGCLIQELQNGYSKVTWVEHIEVDDRSVHNMYKPLVNTGLAFGAKRWVATLDRQCERLASSMASNIPACDLSVITSPEGRKSMLKLAERMVMSFCTGVGASTAHAWTTLSTTGSDDVRVMTRKSMDDPGRPPGIVLSAATSFWIPVAPKRVFDFLRDENSRSEWDILSNGGLVQEMAHIANGRDPGNSVSLLRVNSGNSGQSNMLILQESCTDASGSYVIYAPVDIIAMNVVLSGGDPDYVALLPSGFAILPDGSARGGGGSANASAGAGVEGGGEGNNLEVVTTTGSCGGSLLTVAFQILVDSVPTAKLSLGSVATVNSLIKCTVERIKAALACDGA

SEQ ID NO: 427 - protein, 750 aa, Arabidopsis thaliana
MFDMTPKNSENDLGITGSHEEDFETKSGAEVTMENPLEEELQDPNQRPNKKKRYHRHTQRQIQELESFFKECPHPDDKQRKELSRELSLEPLQVKFWFQNKRTQMKAQHERHENQILKSENDKLRAENNRYKDALSNATCPNCGGPAAIGEMSFDEQHLRIENARLREEIDRISAIAAKYVGKPLMANSSSFPQLSSSHHIPSRSLDLEVGNFGNNNNSHTGFVGEMFGSSDILRSVSIPSEADKPMIVELAVAAMEELVRMAQTGDPLWVSSDNSVEILNEEEYFRTFPRGIGPKPIGLRSEASRESTVVIMNHINLIEILMDVNQWSSVFCGIVSRALTLEVLSTGVAGNYNGALQVMTAEFQVPSPLVPTRENYFVRYCKQHSDGIWAVVDVSLDSLRPSPITRSRRRPSGCLIQELQNGYSKVTWVEHIEVDDRSVHNMYKPLVNTGLAFGAKRWVATLDRQCERLASSMASNIPACDLSVITSPEGRKSMLKLAERMVMSFCTGVGASTAHAWTTLSTTGSDDVRVMTRKSMDDPGRPPGIVLSAATSFWIPVAPKRVFDFLRDENSRSEWDILSNGGLVQEMAHIANGRDPGNSVSLLRVNSGNSGQSNMLILQESCTDASGSYVIYAPVDIIAMNVVLSGGDPDYVALLPSGFAILPDGSARGGGGSANASAGAGVEGGGEGNNLEVVTTTGSCGGSLLTVAFQILVDSVPTAKLSLGSVATVNSLIKCTVERIKAALACDGA

SEQ ID NO: 428 - DNA, 1051 bp, Arabidopsis thaliana
aactttaattcgccggctctcttgccgtgttttcgattttgacaaacgaaaaaaaaatcttcaatgagataacaataatatcagcagcggaacaaggattgagaaaaggaacctttcccttttaataagccgatatagatccttggaggagaatttgtagcagaccgatctctgtctgttgtctctgtttctacgaatctctgtgtttgtcggaaatcgtaaattatgggtttgtgggatgctcttctcaattggcttcgcagcctcttcttcaagcaagaaatggagctttcattgataggacttcaaaatgcaggaaagacatcacttgttaacgttgttgcaaccggtggatacagtgaagacatgatccctacggttggtttcaacatgaggaaagtgacaaaaggaagtgtcacgatcaagctttgggatctcggtggtcaacctaggttccgcagcatgtgggaacgttactgccgttctgtttccgcgattgtgtatgtagttgatgctgctgatcctgataacctcagtgtctcgaagagtgaactccatgatttgttgagcaagacgtcgcttaatggtatccctctcctagtccttgggaacaaaatcgacaagcctggagctttgtccaaagaagccctaaccgatgaaatgggtctcaagtcactgacagatagagaagtctgttgcttcatgatatcttgcaagaactctaccaacatcgatcaagtcattgattggcttgtaaagcactccaaatcatcgaattaaactttaccccaaaaggagagaagtcaactctctgcagttgtcgatctttcttgtgtttttggtcatttgatgatgatgatggtgattgtggaagaagacacagcttttttcttttatcctgtgaaaaacaagatttgtctatgttctctgtctgattctttatctgtctttcttctgcgtatgtggctgtgttctctgtatattagatttgattggtgttccctcttcttaaagccatgatgagatcacttccttcggggtcagcttttcc

SEQ ID NO: 429 - protein, 184 aa, Arabidopsis thaliana
MGLWDALLNWLRSLFFKQEMELSLIGLQNAGKTSLVNVVATGGYSEDMIPTVGFNMRKVTKGSVTIKLWDLGGQPRFRSMWERYCRSVSAIVYVVDAADPDNLSVSKSELHDLLSKTSLNGIPLLVLGNKIDKPGALSKEALTDEMGLKSLTDREVCCFMISCKNSTNIDQVIDWLVKHSKSSN

SEQ ID NO: 430 - protein, 165 aa, Arabidopsis thaliana
MELSLIGLQNAGKTSLVNVVATGGYSEDMIPTVGFNMRKVTKGSVTIKLWDLGGQPRFRSMWERYCRSVSAIVYVVDAADPDNLSVSKSELHDLLSKTSLNGIPLLVLGNKIDKPGALSKEALTDEMGLKSLTDREVCCFMISCKNSTNIDQVIDWLVKHSKSSN

SEQ ID NO: 431 - protein, 137 aa, Arabidopsis thaliana
MIPTVGFNMRKVTKGSVTIKLWDLGGQPRFRSMWERYCRSVSAIVYVVDAADPDNLSVSKSELHDLLSKTSLNGIPLLVLGNKIDKPGALSKEALTDEMGLKSLTDREVCCFMISCKNSTNIDQVIDWLVKHSKSSN

SEQ ID NO: 432 - DNA, 1677 bp, Arabidopsis thaliana
agtccaaacaaaaatctgaaacggaagctcagagagacaaggatgagatttttctcttcctttgataaatcccaatacctaattcccaaattcccttacttttaggcgccgaaagatagagagaaacatagatacgcattggttttttcttttttgaagattctcgcttcttactacatgtgtatcaatcgatctctacccagattctccggaggagctttgagtcttgtcgtatagatgcagtgaaggtcctttgttagatgggaaaacttgttcttgagttgtcaaaaggtattttctatgtttttggagtagaactgtttacaaggaagcagccaatatggagtttgattttggagaaatgtttttagtgttgttgtgaagaaatatcagttttgattgtttttggatttgatgggtaaagagaatcagttggagactaccgattgtggagtcagtgatcacggttctccacctatcaagaatgaagaacatgaggcaccacgttacagttcagacaaagacacgggtttaccaacttgccgtgtatgccagtgtgcagaatctgatagaagaggagatgctgctttagggtttttgggaattactcctccggtttcagaacctcgtagaagcaatgcgggtgaagaaaccgttgatcagagaagctcggttgtcaaatctagcggattcatcgaactgataagtcctgatggagaagtttttgtttgtgcaaacgacgatatagaaatgggagcgtggcagcatcgagataagttgctagaacttggatgttcttgcaagaatgatctcgctttggtacactatgcttgtgcattgaaatggtttgtcaaccacggatcaactgtttgtgagatatgcggaaaaaccacggagaatataagaacagttgatttcaacaaagtggttatcgccttaaaagattacgcagcgctaagagaaagaacagcggatggagatccaaatcctgtagtggttaacaacaacaccagttcgtcagggattgatcctgatgcagttgcagccattcgaaggcaacgacttagtgagatatcgttatggtttggtcctcattgttcaaccaacaacaacaatagtagtaattccgctgctgcagggacggcttcttctcaggttacatctgaacaacctgtgggtatagtaaactttgatatcttgcctatggaaagccgtgcgactaaatgggcggtggaaggtaccggaatactacttgcaaccggattactcacagttactttggcttggctcattgctcctcgtgtcggaaagagaactgcaaagagtggtctacacatacttctaggtggtctctgtgctttaacagtagtcatcttcttcagattcgttgtgctgacaagaatcaggtacggaccagcacgttactgggcaatattgttcgtcttctggtttcttgtgtttggcatttgggcttcacgttcacacgcttctcactcctccacatgataaattctccatcatccttcaagacacaaaatgtactctttttggtctctgtcaatatcatgtacgttattctctttcaagacacaaaatgtacaattaattactcttatcaaaaagaaaaaaaggggtgaaactgaatgttatcatctcacaacaaagtctcttggtcgc

SEQ ID NO: 433 - protein, 363 aa, Arabidopsis thaliana
MGKENQLETTDCGVSDHGSPPIKNEEHEAPRYSSDKDTGLPTCRVCQCAESDRRGDAALGFLGITPPVSEPRRSNAGEETVDQRSSVVKSSGFIELISPDGEVFVCANDDIEMGAWQHRDKLLELGCSCKNDLALVHYACALKWFVNHGSTVCEICGKTTENIRTVDFNKVVIALKDYAALRERTADGDPNPVVVNNNTSSSGIDPDAVAAIRRQRLSEISLWFGPHCSTNNNNSSNSAAAGTASSQVTSEQPVGIVNFDILPMESRATKWAVEGTGILLATGLLTVTLAWLIAPRVGKRTAKSGLHILLGGLCALTVVIFFRFVVLTRIRYGPARYWAILFVFWFLVFGIWASRSHASHSST

SEQ ID NO: 434 - protein, 251 aa, Arabidopsis thaliana
MGAWQHRDKLLELGCSCKNDLALVHYACALKWFVNHGSTVCEICGKTTENIRTVDFNKVVIALKDYAALRERTADGDPNPVVVNNNTSSSGIDPDAVAAIRRQRLSEISLWFGPHCSTNNNNSSNSAAAGTASSQVTSEQPVGIVNFDILPMESRATKWAVEGTGILLATGLLTVTLAWLIAPRVGKRTAKSGLHILLGGLCALTVVIFFRFVVLTRIRYGPARYWAILFVFWFLVFGIWASRSHASHSST

SEQ ID NO: 435 - DNA, 1431 bp, Arabidopsis thaliana
acggagctcacctttcatcgtcaatctccggcggacgaatttctcttcgtagccgttacttctcattatttctttgaaactttcttagaaaattctctgttttggttaggacaatacaaacagaggatgttgatgacactagcggcgacgacctccgtttcatttaactcgaagcttctcctatttcgaatacgttgctcggattctaaccctaagcgtggcttcggctcaaaaaaggaagagaaagacccggcattgcagcaaaggaaatcatcttctaaacagtctgtttctgtacccagaaaggcacctggtctgaatactcagtttgaaggaaaatctggtcgatcttttgatatagacttcgatgaacggctggaaaacatcagaaggtcagctcttgagcagaaaaagacagaagtagttaaagaatttggtccaattgactatgatgcaccagtcaagtctgaccagaaaacaattggtcttggtactaaggttggagttggcatagctgttgttgtatttggtttggtttttgctcttggtgactttcttcccacgggaagtgatagtccaactaagaacacaacagtagttaaaaatcaaatttcagaagaagagaaagccacgcttcagcaaaggctcaaagagtttgaaacaactctcaatggcacgcctcaggatcaagctgctctggagggtgcagctgtgacactgactgaactaggagattattcacgggctgctgcgtttcttgagaaactcgctaaggagagaccaactgaccctgatgtatttcgactgcttggagaagtaaattatgaacttaacaactatgaaggcagtatcgctgcatacaaaatttctgaaaaggtttctaaagggattgatcttgaagttacacgaggcctcatgaatgcgtatttagctgcgaagaaaccagacgaggccgtcaaatttcttctagacactcgtgaacgtctgaatacaaagaaaacaagcacaactgacagtgttacagatgaaacaaatctagacccaattcaggttgagttacttctcggaaaagcgtattcagactggggacatatcagcgacgcgatagctgtttatgaccagttaatcagtgctcatcctgaagacttccgaggctacttggctaagggaattatattgagagaaaatggaagcagaggagatgcagagagaatgttcatccaggcgcgcttttttgcaccaaacaaagctaaggcccttgtggatagatactccaaactatgatcactatctgattctgtgtatataaatatacatgcacatgggcctgtgagttactaatatgagtcagattcatctgtgagacaactgtacaatacaaatattcccaatatgaagccacagaaccaagaagttcaggaactgttatcc

SEQ ID NO: 436 - protein, 427 aa, Arabidopsis thaliana
TELTFHRQSPADEFLFVAVTSHYFFETFLENSLFWLGQYKQRMLMTLAATTSVSFNSKLLLFRIRCSDSNPKRGFGSKKEEKDPALQQRKSSSKQSVSVPRKAPGLNTQFEGKSGRSFDIDFDERLENIRRSALEQKKTEVVKEFGPIDYDAPVKSDQKTIGLGTKVGVGIAVVVFGLVFALGDFLPTGSDSPTKNTTVVKNQISEEEKATLQQRLKEFETTLNGTPQDQAALEGAAVTLTELGDYSRAAAFLEKLAKERPTDPDVFRLLGEVNYELNNYEGSIAAYKISEKVSKGIDLEVTRGLMNAYLAAKKPDEAVKFLLDTRERLNTKKTSTTDSVTDETNLDPIQVELLLGKAYSDWGHISDAIAVYDQLISAHPEDFRGYLAKGIILRENGSRGDAERMFIQARFFAPNKAKALVDRYSKL

SEQ ID NO: 437 - protein, 385 aa, Arabidopsis thaliana
MLMTLAATTSVSFNSKLLLFRIRCSDSNPKRGFGSKKEEKDPALQQRKSSSKQSVSVPRKAPGLNTQFEGKSGRSFDIDFDERLENIRRSALEQKKTEVVKEFGPIDYDAPVKSDQKTIGLGTKVGVGIAVVVFGLVFALGDFLPTGSDSPTKNTTVVKNQISEEEKATLQQRLKEFETTLNGTPQDQAALEGAAVTLTELGDYSRAAAFLEKLAKERPTDPDVFRLLGEVNYELNNYEGSIAAYKISEKVSKGIDLEVTRGLMNAYLAAKKPDEAVKFLLDTRERLNTKKTSTTDSVTDETNLDPIQVELLLGKAYSDWGHISDAIAVYDQLISAHPEDFRGYLAKGIILRENGSRGDAERMFIQARFFAPNKAKALVDRYSKL

SEQ ID NO: 438 - protein, 383 aa, Arabidopsis thaliana
MTLAATTSVSFNSKLLLFRIRCSDSNPKRGFGSKKEEKDPALQQRKSSSKQSVSVPRKAPGLNTQFEGKSGRSFDIDFDERLENIRRSALEQKKTEVVKEFGPIDYDAPVKSDQKTIGLGTKVGVGIAVVVFGLVFALGDFLPTGSDSPTKNTTVVKNQISEEEKATLQQRLKEFETTLNGTPQDQAALEGAAVTLTELGDYSRAAAFLEKLAKERPTDPDVFRLLGEVNYELNNYEGSIAAYKISEKVSKGIDLEVTRGLMNAYLAAKKPDEAVKFLLDTRERLNTKKTSTTDSVTDETNLDPIQVELLLGKAYSDWGHISDAIAVYDQLISAHPEDFRGYLAKGIILRENGSRGDAERMFIQARFFAPNKAKALVDRYSKL

SEQ ID NO: 439 - DNA, 734 bp, Arabidopsis thaliana
catcgctgtctggaacagcgatgactcgagaaccgaaagaaaacaaaaagccaagaatcaaagaatcaggaaagcaaacacaacacaactaacaatggatttaggaaggtttccaataatctcaatcctcgaagacatgcttgaagtccccgaagaccacaacaacgagaagacccgcaacaacccttcacgagtttacatgcgagacgctaaggcaatggctgctacacctgctgacgtcatcgagcaccctaacgcatatgcattcgtcgtggacatgcctggaatcaaaggagatgagatcaaggttcaggtcgagaacgacaatgtgcttgtggtgagtggagagaggcagagagagaacaaagaaaacgaaggtgtgaagtatgtgaggatggagagaagaatgggtaagttcatgaggaagtttcagttgcctgaaaatgcagatttggacaagatctctgctgtttgtcatgacggtgtgttgaaggttactgttcagaaacttcctcctccggaaccaaagaaaccaaagacaattcaagttcaagttgcttgagtttgttttgtgattgtgtgttggatttatctattttgttttgatttatggatttgatgaatgtaatcggaatgcgtgagggatatggtgttttgttctaagatgaaataaaagtttgttctgtttctttcattctcctttgggatattcaaattaatgaagttgttataag

SEQ ID NO: 440 - protein, 186 aa, Arabidopsis thaliana
IAVWNSDDSRTERKQKAKNQRIRKANTTQLTMDLGRFPIISILEDMLEVPEDHNNEKTRNNPSRVYMRDAKAMAATPADVIEHPNAYAFVVDMPGIKGDEIKVQVENDNVLVVSGERQRENKENEGVKYVRMERRMGKFMRKFQLPENADLDKISAVCHDGVLKVTVQKLPPPEPKKPKTIQVQVA

SEQ ID NO: 441 - protein, 155 aa, Arabidopsis thaliana
MDLGRFPIISILEDMLEVPEDHNNEKTRNNPSRVYMRDAKAMAATPADVIEHPNAYAFVVDMPGIKGDEIKVQVENDNVLVVSGERQRENKENEGVKYVRMERRMGKFMRKFQLPENADLDKISAVCHDGVLKVTVQKLPPPEPKKPKTIQVQVA

SEQ ID NO: 442 - protein, 141 aa, Arabidopsis thaliana
MLEVPEDHNNEKTRNNPSRVYMRDAKAMAATPADVIEHPNAYAFVVDMPGIKGDEIKVQVENDNVLVVSGERQRENKENEGVKYVRMERRMGKFMRKFQLPENADLDKISAVCHDGVLKVTVQKLPPPEPKKPKTIQVQVA

SEQ ID NO: 443 - DNA, 427 bp, Arabidopsis thaliana
ttaacgagtcacggatgatgcggatagcaagagggtcagggaggcaagtaagagaagtgatggagatgttggaagagtacaagaggctagcgaagatatggagcaagatgaaaggactcaagatcccaaagaatggagatatgagtgcactctcgagaaacatgaacgcacagcacatgagcaaggtcctcccacctcagatgctcaagcagattggcggcatgggcggtctgcagagtctaatgaagcagataggttccggcaaggacatgatgggaatgttcggtggcggagacaagtagtatctttcttccttcctttgcacaccaaaaactagacattcttacgttgtcattattagagttttcccctttgtatttgtaaaatatttgcaaattttctccaattttacaaaaagagatttggc

SEQ ID NO: 444 - protein, 99 aa, Arabidopsis thaliana
NESRMMRIARGSGRQVREVMEMLEEYKRLAKIWSKMKGLKIPKNGDMSALSRNMNAQHMSKVLPPQMLKQIGGMGGLQSLMKQIGSGKDMMGMFGGGDK

SEQ ID NO: 445 - protein, 95 aa, Arabidopsis thaliana
MMRIARGSGRQVREVMEMLEEYKRLAKIWSKMKGLKIPKNGDMSALSRNMNAQHMSKVLPPQMLKQIGGMGGLQSLMKQIGSGKDMMGMFGGGDK

SEQ ID NO: 446 - protein, 94 aa, Arabidopsis thaliana
MRIARGSGRQVREVMEMLEEYKRLAKIWSKMKGLKIPKNGDMSALSRNMNAQHMSKVLPPQMLKQIGGMGGLQSLMKQIGSGKDMMGMFGGGDK

SEQ ID NO: 447 - protein, 79 aa, Arabidopsis thaliana
MEQDERTQDPKEWRYECTLEKHERTAHEQGPPTSDAQADWRHGRSAESNEADRFRQGHDGNVRWRRQVVSFFLPLHTKN

SEQ ID NO: 448 - DNA, 981 bp, Arabidopsis thaliana
acattatcatcaaaaagaacaatagagagagcgagtgaggattagccacaatgtatcttcctctcctctatcttctgtttctggcttcttgcttgacacatcaagctttaggccgtggtcgtggccggccatcaccggaaggaagcttggatccttcttctcgcatcaccgtagtcggagttgtctactgtgacacgtgttctatcaacactttctcaagacaaagctatttcttacaaggtgtggaagttcatgtgacatgtagattcaaagcaagttcaccaaaaacagcagaggaagtgaacatatcagtaaacagaacaacaaacagaagtggcgtgtacaagctcgagatccctcacgtagatggcatcgattgtgtcgacggaatcgctatatcatcacaatgcagtgccaagatactcaaaacctcctctgacgacaacggaggctgcagcatccctgttttccaaactgcaaccaacgaagtatccatcaaatcaaagcaagatcgtgtctgtatctacagcttaagcgcactaagctataaacctcctcacaaaaacacatcattgtgtggaaacggagggaagaaacatcaccgaaaggacgagaaggtggagaagaagtttagagattcgaaattcttctggccttatttggcaccgtattggttcccttggccatatccggatctacctccattgccaactctaccgccttttccgtctttccctttcccttctttacctttcggaaacccgaatctggcattgccggctttcgattggaaaaatccggtcacttggataccttatcttccacgttttcctccaggagatcataatccttagggacactccatatttggattcctctgttttttattttcttggtgatcacctctgtttagggttgattgtatgtgtttgtgatatgattacttattaatgtgtaattattcttcacttacagaagatt

SEQ ID NO: 449 - protein, 267 aa, Arabidopsis thaliana
MYLPLLYLLFLASCLTHQALGRGRGRPSPEGSLDPSSRITVVGVVYCDTCSINTFSRQSYFLQGVEVHVTCRFKASSPKTAEEVNISVNRTTNRSGVYKLEIPHVDGIDCVDGIAISSQCSAKILKTSSDDNGGCSIPVFQTATNEVSIKSKQDRVCIYSLSALSYKPPHKNTSLCGNGGKKHHRKDEKVEKKFRDSKFFWPYLAPYWFPWPYPDLPPLPTLPPFPSFPFPSLPFGNPNLALPAFDWKNPVTWIPYLPRFPPGDHNP

SEQ ID NO: 450 - DNA, 1352 bp, Arabidopsis thaliana
gaaacggaacgtaattatttacgtgacttatgaaaagtcatcggcgattgtttctaatttgtcatcgccgccgttgaactatctcgccggcgataatgatctacgttggtggagtgcaatttctagacgagagtagctctttttcattgtcttcttcatcgcagggaagtagcttgcttgttgatgtaatgagtcatcctgtgataacgttagcttctgattcctttaagaatcttgaggaaaagaatgtttctttcgatgaaagtgattcagagagctcaacaaaagacagatatgtttacatattccaaagagaatttgctgttgtgaatccagctcttgttgattttgttggcaccgatgaagcaacaacttgtgtaggccttgttatccgcaacagaaaatctggaatgacgtctgttgcacacatggattcgccagagattgtggatttggggataagccagatgttgttattggttttacaggatgacgtagatgccgagttagatgtacatatggttggtggttatgaagatgtcgacataaaaaatgctgatggtgttggtgactatgccaaaccagagggttattcatttccgttgtgttgcaaattagtagaaactttgcagaagagaagagaaaactttcacattcaaaccctctttattcttgggcacaataccaagttggattcacaagcaaacacgtgccccatttttaatggatgcctggtgaataccagcaccggtgcaatcttgccagccagtttcaacagaacatctagatgtccggatgagatcgttagaagaattcgagtttcatcatcgtttgaagattctagctggaagggaaagttacttgacacatatgacacaaaaactgatagattcatcatcgcaccatgccgctggacaatgcgcttgattgaatatgtttgggaacttaatcagcttactgatgaagaaatcctcactaactgttccacctcaccttctgctgaaggtccagacttcgtaaacagtttaagaaggaattggggatatttactgaaatatccagaatggagcaaaacattcccaaggaggcaaccacgtgtgtttgaaagaactgtcgatggacactggaaaaaatgctgactttctcatctaatcatcatgacattatccagaaatctggctaaaaacaacggttagtgtatctaacattttgagatttatgtaaatggtcaagaacacatgtgattgattcttggacacagaaaatgtttgatttatctttttgactttttgtgtcaaacgttgcaagtttggttcctatgaaaatatgggccggatcaggcccggtagacc

SEQ ID NO: 451 - protein, 347 aa, Arabidopsis thaliana
MIYVGGVQFLDESSSFSLSSSSQGSSLLVDVMSHPVITLASDSFKNLEEKNVSFDESDSESSTKDRYVYIFQREFAVVNPALVDFVGTDEATTCVGLVIRNRKSGMTSVAHMDSPEIVDLGISQMLLLVLQDDVDAELDVHMVGGYEDVDIKNADGVGDYAKPEGYSFPLCCKLVETLQKRRENFHIQTLFILGHNTKLDSQANTCPIFNGCLVNTSTGAILPASFNRTSRCPDEIVRRIRVSSSFEDSSWKGKLLDTYDTKTDRFIIAPCRWTMRLIEYVWELNQLTDEEILTNCSTSPSAEGPDFVNSLRRNWGYLLKYPEWSKTFPRRQPRVFERTVDGHWKKC

SEQ ID NO: 452 - protein, 316 aa, Arabidopsis thaliana
MSHPVITLASDSFKNLEEKNVSFDESDSESSTKDRYVYIFQREFAVVNPALVDFVGTDEATTCVGLVIRNRKSGMTSVAHMDSPEIVDLGISQMLLLVLQDDVDAELDVHMVGGYEDVDIKNADGVGDYAKPEGYSFPLCCKLVETLQKRRENFHIQTLFILGHNTKLDSQANTCPIFNGCLVNTSTGAILPASFNRTSRCPDEIVRRIRVSSSFEDSSWKGKLLDTYDTKTDRFIIAPCRWTMRLIEYVWELNQLTDEEILTNCSTSPSAEGPDFVNSLRRNWGYLLKYPEWSKTFPRRQPRVFERTVDGHWKKC

SEQ ID NO: 453 - protein, 242 aa, Arabidopsis thaliana
MTSVAHMDSPEIVDLGISQMLLLVLQDDVDAELDVHMVGGYEDVDIKNADGVGDYAKPEGYSFPLCCKLVETLQKRRENFHIQTLFILGHNTKLDSQANTCPIFNGCLVNTSTGAILPASFNRTSRCPDEIVRRIRVSSSFEDSSWKGKLLDTYDTKTDRFIIAPCRWTMRLIEYVWELNQLTDEEILTNCSTSPSAEGPDFVNSLRRNWGYLLKYPEWSKTFPRRQPRVFERTVDGHWKKC

SEQ ID NO: 454 - DNA, 1067 bp, Arabidopsis thaliana
aaaccgagaaaagttttacaaataatttaacaaatgttagtactgtatttcacaaattgaatttgagaatattaaacgaaaaaacgtttttgcttgagagagaggcgaatctgattcttgtgagagcttccaacaaagtctgcaggctcatcctgcggatcccttcgttcccaatttctcttaggcaggtatcccttcattggcgagatccttgttttcttcgttggggaacagattgcccaaactgaagtctctctctctctgttatggctaaacagagaccggcgacgttgtcagtctacctctacattcccaatatcgttgggtacatgagagttctcttgaactgcattgccttctctgtgtgcttctccaacaagacactcttctccctcttgtactttttcagtttttgttgtgatgctgtggatggatggtgcgctcgtaaatttaaccaagtctctacatttggagctgttttggatatggttacagatagagtcagcacagcctgtcttctcgtgattctctcccagatatacaggcctagcttggttttcctgtcattgctggctttagatatcgctagtcactggctgcaaatgtacagtaccttcctatcagggaagaccagccataaggatgtgaaagatagcacgagctggctctttagactctattatggaaaccggatgttcatgggttattgctgtgtttcctgcgaggttctttatataatccttcttctcatagcaacgaaccaaaccgaaaacttgatgaacgtggtagtgaaatcattgatgcagatttcaccgctctctttactcttggctttgagcatatttggttggtccatcaagcagatcatcaatgtgattcagatgaaaacggctgcagatgtttgtgtcctgtatgacatagagaaacagcataagaagccttgacgttatgtgcccgtgaatcgtgtttaactcttttgtttcatgttgtgtacgacactgtacatacggatccatcttgtttagtatgtagataaactcttgtctttaaatccattcactattttc

SEQ ID NO: 455 - protein, 225 aa, Arabidopsis thaliana
MAKQRPATLSVYLYIPNIVGYMRVLLNCIAFSVCFSNKTLFSLLYFFSFCCDAVDGWCARKFNQVSTFGAVLDMVTDRVSTACLLVILSQIYRPSLVFLSLLALDIASHWLQMYSTFLSGKTSHKDVKDSTSWLFRLYYGNRMFMGYCCVSCEVLYIILLLIATNQTENLMNVVVKSLMQISPLSLLLALSIFGWSIKQIINVIQMKTAADVCVLYDIEKQHKKP

SEQ ID NO: 456 - protein, 204 aa, Arabidopsis thaliana
MRVLLNCIAFSVCFSNKTLFSLLYFFSFCCDAVDGWCARKFNQVSTFGAVLDMVTDRVSTACLLVILSQIYRPSLVFLSLLALDIASHWLQMYSTFLSGKTSHKDVKDSTSWLFRLYYGNRMFMGYCCVSCEVLYIILLLIATNQTENLMNVVVKSLMQISPLSLLLALSIFGWSIKQIINVIQMKTAADVCVLYDIEKQHKKP

SEQ ID NO: 457 - protein, 152 aa, Arabidopsis thaliana
MVTDRVSTACLLVILSQIYRPSLVFLSLLALDIASHWLQMYSTFLSGKTSHKDVKDSTSWLFRLYYGNRMFMGYCCVSCEVLYIILLLIATNQTENLMNVVVKSLMQISPLSLLLALSIFGWSIKQIINVIQMKTAADVCVLYDIEKQHKKP

SEQ ID NO: 458 - DNA, 1322 bp, Arabidopsis thaliana
ctctctcgatcttactcaattttgcgtttctgcttttcattttctctcaagaagcgtaaatggcgaacaatggacctaactgggacggattactcaaatggagcctctcacattccgatggagcttcctcttctagccgtataagtgaggaagatcgacaatggtttgtggaagctatgcaagcacatacaatcgattcaatctctcgtatgaaagtaatatctcaaatcatgaagatgcctgaacaagtcttggaggctcaaggagttacacctgatgatcttgaaggaatgttggctgagctgcaggaacacgtcgagtcgatagatttggccaatgatcttcactccattggaggtttggttcctctccttagctatctcaagaactctaatgcgaaaattcgagcaaagtctgccgatgttttgactacggttgtccaaaacaatccaagaagccagcaacttgttatggaagcaaatgggttcgaaccattattaactaactttattgctgatcctgacattagagtccggaccaaggcactcggggctatatcttctcttatccgtaacaaccaacccgggattacagcattccgtctggcaaatggttatgctggcctgcgagacgctttggtctctgataccgttagattccaaagaaaagcgttgaacttgcttcactatcttctccaagaaagcaactcagactgtaaaatcgttagagatcttggattccctcgcataatgatccacctagcatccaaccaagattttgaagttcgggaattcgctcttcgtggtctcctagagcttgcccgtgaagaatctgtgagaaaccttgatagaggggatgtgaatctaagacagcttcttgaggagagaacaagacgaataattgtgatgtcggacgaagatctttgtgcagctagagaagaaagacagctagtggatagtctttggaccgtgtgttatgatgaaccgtcccttctaagagaaagaggtctggtctacctcccttctgacgacgagctggctcctgatgtggttagggaccgctttgaacctcctctaagggcttgggctgcaagacgacatgatgaaacgagtgaatccccggttccacttcttcttggtcctgcaccgtgatctcgttcaaccaaattattagattttgcagttatcaacaaatcagctttgctttagaatttctctagctcttgtttatgtatatctgagcgacaacaagacgctattaaagagattatctgtgttctgtttctgtaatacaaatctacactcatggacttcaagttctac

SEQ ID NO: 459 - protein, 363 aa, Arabidopsis thaliana
MANNGPNWDGLLKWSLSHSDGASSSSRISEEDRQWFVEAMQAHTIDSISRMKVISQIMKMPEQVLEAQGVTPDDLEGMLAELQEHVESIDLANDLHSIGGLVPLLSYLKNSNAKIRAKSADVLTTVVQNNPRSQQLVMEANGFEPLLTNFIADPDIRVRTKALGAISSLIRNNQPGITAFRLANGYAGLRDALVSDTVRFQRKALNLLHYLLQESNSDCKIVRDLGFPRIMIHLASNQDFEVREFALRGLLELAREESVRNLDRGDVNLRQLLEERTRRIIVMSDEDLCAAREERQLVDSLWTVCYDEPSLLRERGLVYLPSDDELAPDVVRDRFEPPLRAWAARRHDETSESPVPLLLGPAP

SEQ ID NO: 460 - protein, 324 aa, Arabidopsis thaliana
MQAHTIDSISRMKVISQIMKMPEQVLEAQGVTPDDLEGMLAELQEHVESIDLANDLHSIGGLVPLLSYLKNSNAKIRAKSADVLTTVVQNNPRSQQLVMEANGFEPLLTNFIADPDIRVRTKALGAISSLIRNNQPGITAFRLANGYAGLRDALVSDTVRFQRKALNLLHYLLQESNSDCKIVRDLGFPRIMIHLASNQDFEVREFALRGLLELAREESVRNLDRGDVNLRQLLEERTRRIIVMSDEDLCAAREERQLVDSLWTVCYDEPSLLRERGLVYLPSDDELAPDVVRDRFEPPLRAWAARRHDETSESPVPLLLGPAP

SEQ ID NO: 461 - protein, 313 aa, Arabidopsis thaliana
MKVISQIMKMPEQVLEAQGVTPDDLEGMLAELQEHVESIDLANDLHSIGGLVPLLSYLKNSNAKIRAKSADVLTTVVQNNPRSQQLVMEANGFEPLLTNFIADPDIRVRTKALGAISSLIRNNQPGITAFRLANGYAGLRDALVSDTVRFQRKALNLLHYLLQESNSDCKIVRDLGFPRIMIHLASNQDFEVREFALRGLLELAREESVRNLDRGDVNLRQLLEERTRRIIVMSDEDLCAAREERQLVDSLWTVCYDEPSLLRERGLVYLPSDDELAPDVVRDRFEPPLRAWAARRHDETSESPVPLLLGPAP

SEQ ID NO: 462 - DNA, 1350 bp, Arabidopsis thaliana
aaaaaaaaaaaataaaaaagaagagacaaaggggagagagagaaaagaagagcgaacaaattccttctttttcccctctttctctctctctcccactctctcatcttcttcttcttatgattttcaacttattacaacaacaacaacaacaaaataatcttgcaaagtttcagtctcaggtggttcacagttaatgctacttgcaatgatgaatccatcccaatttcgataacctctactgaggcatccaaatgttgaacggaaaagaagagcctaagcagaagaaaggttggtcagagtcgctgctagaatttcggtcagggtttggggaaaagatgaaagttgtgtcgaagaaacgttggaaatctcttggtcctcttcatctgaaaagcaaatcagttgcacggttttgcttcttttcgaagttgaagtcaaacaaccatggtccaggccgtgcaccagtgtatctcaatgtttatgacttgactcctattaacggatatatctattgggcaggccttggtatatttcactctggtgtagaagttcatggagtagagtatgcttttggtgcccatgattatgcaacgagtggtgtttttgaggttgaaccaaggcaatgcccgggcttcaagttcaagaaatcgatattcattggaaccacgaatttaaacccaacacaagtgagagagtttatggaagacatggcttgcagttactacgggaatatgtatcacttgattgttaagaactgcaaccatttctgccaggacgtttgctacaagcttaccgggaaaaagatcccaaaatgggtgaatcggcttgcacaaataggttctgtgtgcagctgcatacttcccgagtccctcaagataacagcggtctgccacgatccagacgggcaaatcccggaggaagaaaacgaaaagagaagtcttagaagctcattcagctgtttatcatccatctccatgagacaaaaacagctttcaacatcatcattgttcctacaatcacctctcagaggctgcttacctccttggcaactcaaacgctcaaaatctaacagcagctccttgaaagaaaggtagacattccaacaaaaaccattgcggtctctcattcgtttcgttagcaacacaaaccacgatttatccttcttctatctttgtaatggagttcgaaaacagatttcccgcgccatcgcttttcatttgattttaacaggctttcataagccattcttcatcttctttctgtttgtattgcttccaaatttgaatcttttctcattttcaaaatcatgtattgcatcaacgctgtttatatctaaactagctctcttagttc

SEQ ID NO: 463 - protein, 279 aa, Arabidopsis thaliana
MLNGKEEPKQKKGWSESLLEFRSGFGEKMKVVSKKRWKSLGPLHLKSKSVARFCFFSKLKSNNHGPGRAPVYLNVYDLTPINGYIYWAGLGIFHSGVEVHGVEYAFGAHDYATSGVFEVEPRQCPGFKFKKSIFIGTTNLNPTQVREFMEDMACSYYGNMYHLIVKNCNHFCQDVCYKLTGKKIPKWVNRLAQIGSVCSCILPESLKITAVCHDPDGQIPEEENEKRSLRSSFSCLSSISMRQKQLSTSSLFLQSPLRGCLPPWQLKRSKSNSSSLKER

SEQ ID NO: 464 - protein, 251 aa, Arabidopsis thaliana
MKVVSKKRWKSLGPLHLKSKSVARFCFFSKLKSNNHGPGRAPVYLNVYDLTPINGYIYWAGLGIFHSGVEVHGVEYAFGAHDYATSGVFEVEPRQCPGFKFKKSIFIGTTNLNPTQVREFMEDMACSYYGNMYHLIVKNCNHFCQDVCYKLTGKKIPKWVNRLAQIGSVCSCILPESLKITAVCHDPDGQIPEEENEKRSLRSSFSCLSSISMRQKQLSTSSLFLQSPLRGCLPPWQLKRSKSNSSSLKER

SEQ ID NO: 465 - DNA, 1407 bp, Arabidopsis thaliana
tgaaatgaacaaatatatcaaataataatagtgtaattaagtcggaggaaaacaacaagaacccagaaagaggaacgaagaaactaattcaaaggatcaagttcaccgcttcattttagtcattaaacaaagatggtgatgggaggagaagcatccatggaactggaccagtgttttcagaagatgaagatggaaggaatctcgatcaaagagtggaaagatatccctgtggagcttctgatgaggatcctttcccttgttgatgatcgtaatgtcattgttgcttctggtgtttgcactggctggagagatgctatctcttttggcctcactcgtctccgtctatcttggtgcaacaacaacatgaacagcttggttctttctcttgttcccaagtttgtaaagctgcagactttaaatctaaggcaggacaaaccgcaactagaggacaatgcagtggaggccatagcaaatcactgccatgagttacaagaacttgatctcagcaaaagcttgaaaattacagaccgttcactttatgcacttgctcatggttgcccagacctcacaaaactcaaccttagtggctgcacttcattcagcgacactgctattgcgtatttgaccagattctgcagaaagcttaaagttttgaatctttgcggatgtgtcaaagctgtaactgacaatgccttggaggctattgggaataactgcaatcagatgcagtcactaaacttgggatggtgtgagaatatcagtgatgatggggtaatgagtttagcttatggctgtccagatctcaggacccttgacctctgcggctgtgttcttattacagatgagagtgtggtagctctagcagactggtgtgtccacttgaggtcactggggctatactattgcagaaacataacagacagagcaatgtactcgctagctcaaagcggggtaaagaacaaaccgggatcgtggaaatcggttaagaaaggtaaatacgatgaagaaggactgagaagtctcaacattagccaatgcactgcccttacaccttcagcggttcaagctgtttgcgattcatttcccgcacttcacacatgctcaggaaggcattcgcttgtcatgagcggctgtctgaacttaacaactgtgcactgtgcttgtatccttcaggctcatcgtgcacacaatgcggttcctcatcctgctcattaagacagaggaatagttatgttgtatatataaacatcatgttgatggagattagtattataaacgaagtagcttttttaaggtttatgtgaaaccttagaagcttttgagttgttctttctttgtcttgaaagatcttttgtatattttggtgctatgttcataacttctttagtaagacctctcgttgttacc

SEQ ID NO: 466 - protein, 360 aa, Arabidopsis thaliana
MVMGGEASMELDQCFQKMKMEGISIKEWKDIPVELLMRILSLVDDRNVIVASGVCTGWRDAISFGLTRLRLSWCNNNMNSLVLSLVPKFVKLQTLNLRQDKPQLEDNAVEAIANHCHELQELDLSKSLKITDRSLYALAHGCPDLTKLNLSGCTSFSDTAIAYLTRFCRKLKVLNLCGCVKAVTDNALEAIGNNCNQMQSLNLGWCENISDDGVMSLAYGCPDLRTLDLCGCVLITDESVVALADWCVHLRSLGLYYCRNITDRAMYSLAQSGVKNKPGSWKSVKKGKYDEEGLRSLNISQCTALTPSAVQAVCDSFPALHTCSGRHSLVMSGCLNLTTVHCACILQAHRAHNAVPHPAH

SEQ ID NO: 467 - protein, 358 aa, Arabidopsis thaliana
MGGEASMELDQCFQKMKMEGISIKEWKDIPVELLMRILSLVDDRNVIVASGVCTGWRDAISFGLTRLRLSWCNNNMNSLVLSLVPKFVKLQTLNLRQDKPQLEDNAVEAIANHCHELQELDLSKSLKITDRSLYALAHGCPDLTKLNLSGCTSFSDTAIAYLTRFCRKLKVLNLCGCVKAVTDNALEAIGNNCNQMQSLNLGWCENISDDGVMSLAYGCPDLRTLDLCGCVLITDESVVALADWCVHLRSLGLYYCRNITDRAMYSLAQSGVKNKPGSWKSVKKGKYDEEGLRSLNISQCTALTPSAVQAVCDSFPALHTCSGRHSLVMSGCLNLTTVHCACILQAHRAHNAVPHPAH

SEQ ID NO: 468 - protein, 352 aa, Arabidopsis thaliana
MELDQCFQKMKMEGISIKEWKDIPVELLMRILSLVDDRNVIVASGVCTGWRDAISFGLTRLRLSWCNNNMNSLVLSLVPKFVKLQTLNLRQDKPQLEDNAVEAIANHCHELQELDLSKSLKITDRSLYALAHGCPDLTKLNLSGCTSFSDTAIAYLTRFCRKLKVLNLCGCVKAVTDNALEAIGNNCNQMQSLNLGWCENISDDGVMSLAYGCPDLRTLDLCGCVLITDESVVALADWCVHLRSLGLYYCRNITDRAMYSLAQSGVKNKPGSWKSVKKGKYDEEGLRSLNISQCTALTPSAVQAVCDSFPALHTCSGRHSLVMSGCLNLTTVHCACILQAHRAHNAVPHPAH

SEQ ID NO: 469 - DNA, 1571 bp, Arabidopsis thaliana
attttgtcttaacgactctttattgtcccgacacacgaaaatggcgtctcttagccaaatcaccctgccacgcgcgccgtcgtcggagattggcctcttacgccgtcgattggagcggccgatcatcagaacccggatcggattcaacggccggattgcgagcgtattgactaacgcaggggaccaagcggtgtcggtaaaagcgagtgtgagccagaaggtgattgaagaggaagccaaagttattgtgggtacctacgcgcgagctccagtggttctctcgagtgggaaaggttgtaaattgttcgaccctgaaggaaaagagtatctggattgtgcatctggaatcgctgtgaatgctcttggtcatggagatcctgattggcttcgagctgtcactgagcaagctggtgttcttgcccatgtcagcaatgtttattacacgatccctcagatagagctcgcaaaacgcttggtggcgagttcttttgcagaccgtgtattcttttgtaactcgggaacggaagccaatgaagcagccattaagttttcaagaaaattccagagattcacccatccagaagacaaagaagtcgcgacaggtttcatcgcctttacaaacagcttccatggaagaaccttaggagctcttgccttgacaagcaaagaacaatacagaactcctttcgaacccatcatgcctggtgtaaccttcttagaatatggtaacattcaagcagccacagaccttatccgctcaggtaaaatagctgcagtttttgtggaaccaattcaaggagaaggcgggatttactctgctacaaaagagtttctgcaatctctgcgctctgcttgtgatgccgctggatctcttctcgtcttcgatgaggttcaatgtggtttgggtcgaacgggtctcatgtgggcttatgaagccttcggtgtgactcctgacataatgacggttgcaaagcctttagctggtggtttacctattggagcggtgctggtgactgaaaaggttgcagagaccataaactacggagatcatggaagtacatttgcaggcagccctcttgtgtgcagtgcagccattgcagttatggataaagtatcgaaaccctctttcttgtccagtgtctcaaataaaggtcgatactttagagacctgttggtgaaaaaacttggaggaaactcgcacgtgaaggaagtgagaggcgaagggcttatcataggagtggagctcgatgtgccggcaagctcactggttgatgcttgccgagattcgggtcttctgatcttgacagcggggaaaggaaatgtcgtcaggattgttcctccgttggttatatcagaggaggaaatcgaacgtgcggttgagatcatgtctcaaaatttgactgcgcttgattgaagttcttggaagagaaatgatgtggtgttgaagaagagctaatgttttatattcgatcttgtcttaaattagcctcaagtgtaccggtaaagatgctctgcacaattgaaaagaaataaaatttgacacaaaacttgatgaactaattgttcaatct

SEQ ID NO: 470 - protein, 470 aa, Arabidopsis thaliana
FCLNDSLLSRHTKMASLSQITLPRAPSSEIGLLRRRLERPIIRTRIGFNGRIASVLTNAGDQAVSVKASVSQKVIEEEAKVIVGTYARAPVVLSSGKGCKLFDPEGKEYLDCASGIAVNALGHGDPDWLRAVTEQAGVLAHVSNVYYTIPQIELAKRLVASSFADRVFFCNSGTEANEAAIKFSRKFQRFTHPEDKEVATGFIAFTNSFHGRTLGALALTSKEQYRTPFEPIMPGVTFLEYGNIQAATDLIRSGKIAAVFVEPIQGEGGIYSATKEFLQSLRSACDAAGSLLVFDEVQCGLGRTGLMWAYEAFGVTPDIMTVAKPLAGGLPIGAVLVTEKVAETINYGDHGSTFAGSPLVCSAAIAVMDKVSKPSFLSSVSNKGRYFRDLLVKKLGGNSHVKEVRGEGLIIGVELDVPASSLVDACRDSGLLILTAGKGNVVRIVPPLVISEEEIERAVEIMSQNLTALD

SEQ ID NO: 471 - protein, 457 aa, Arabidopsis thaliana
MASLSQITLPRAPSSEIGLLRRRLERPIIRTRIGFNGRIASVLTNAGDQAVSVKASVSQKVIEEEAKVIVGTYARAPVVLSSGKGCKLFDPEGKEYLDCASGIAVNALGHGDPDWLRAVTEQAGVLAHVSNVYYTIPQIELAKRLVASSFADRVFFCNSGTEANEAAIKFSRKFQRFTHPEDKEVATGFIAFTNSFHGRTLGALALTSKEQYRTPFEPIMPGVTFLEYGNIQAATDLIRSGKIAAVFVEPIQGEGGIYSATKEFLQSLRSACDAAGSLLVFDEVQCGLGRTGLMWAYEAFGVTPDIMTVAKPLAGGLPIGAVLVTEKVAETINYGDHGSTFAGSPLVCSAAIAVMDKVSKPSFLSSVSNKGRYFRDLLVKKLGGNSHVKEVRGEGLIIGVELDVPASSLVDACRDSGLLILTAGKGNVVRIVPPLVISEEEIERAVEIMSQNLTALD

SEQ ID NO: 472 - protein, 238 aa, Arabidopsis thaliana
MPGVTFLEYGNIQAATDLIRSGKIAAVFVEPIQGEGGIYSATKEFLQSLRSACDAAGSLLVFDEVQCGLGRTGLMWAYEAFGVTPDIMTVAKPLAGGLPIGAVLVTEKVAETINYGDHGSTFAGSPLVCSAAIAVMDKVSKPSFLSSVSNKGRYFRDLLVKKLGGNSHVKEVRGEGLIIGVELDVPASSLVDACRDSGLLILTAGKGNVVRIVPPLVISEEEIERAVEIMSQNLTALD

SEQ ID NO: 473 - DNA, 1061 bp, Arabidopsis thaliana
atggaaacgagacagaagcaaatgggtataatcttcaagtcaagcgaacgatcggtgacggtgttatcttaccgccggagccggagtttcccactctattgtaataacagatatttcgaccggagtttctaagtgaatccaaatttgttgttcttcgttgcggctccatctctcgctgtgtatttatagtcaggtcttttgagttatcccattttgcgcgatcccgtcttcaccgtttccatcttccagcgagcacatctctgttgatcgataattttgtacctagttcagttgtaggaaagatgaacaagctgttggaatatgggagaaaagctatgttctatgtgagagttctctccggctatgaagaaaggagaatccggagttacaggttgcaactcgaaaagcgtatccagcaggctaaccaaaggaaagtagagataaacagacttccagagcagattgtattatctgaagtccgccgtatggttgaggagatgcagaatttgaataagcagattgagaatacggaggctcaaattgaagactacttcaaaccgatagacaagcatgctagtaccataatggaaattcagctcgaaggagagaagaaaacgatggggacaatgatgaacgcaacacaacaggaagctatacgaaagattgaagaagctgagaaactcgctcgggcacgtggaaatgcaaatgtgactacagatgcaaacatgggagataagatccaggattcagagtcctcagccaacgaaaaatctcaagcaaaatgaagtcagatcttgtcttcatgttgacacagaatagattcagcgtctctgaatacatcctcttagttgattaaactgagattgtagcctcgcatttgctgaggttttaataattttgaaatttggtcaactgaatagaatcaaaaccgagattgtgttctgtctagcgtacaagaaattatagaggtgatcctggttggaccatccccaacgaccacgttttgtcaatatatgttgtttcaaacttaacttcgcctaataaagtatattgtgatttgc

SEQ ID NO: 474 - protein, 160 aa, Arabidopsis thaliana
MNKLLEYGRKAMFYVRVLSGYEERRIRSYRLQLEKRIQQANQRKVEINRLPEQIVLSEVRRMVEEMQNLNKQIENTEAQIEDYFKPIDKHASTIMEIQLEGEKKTMGTMMNATQQEAIRKIEEAEKLARARGNANVTTDANMGDKIQDSESSANEKSQAK

SEQ ID NO: 475 - protein, 149 aa, Arabidopsis thaliana
MFYVRVLSGYEERRIRSYRLQLEKRIQQANQRKVEINRLPEQIVLSEVRRMVEEMQNLNKQIENTEAQIEDYFKPIDKHASTIMEIQLEGEKKTMGTMMNATQQEAIRKIEEAEKLARARGNANVTTDANMGDKIQDSESSANEKSQAK

SEQ ID NO: 476 - protein, 99 aa, Arabidopsis thaliana
MVEEMQNLNKQIENTEAQIEDYFKPIDKHASTIMEIQLEGEKKTMGTMMNATQQEAIRKIEEAEKLARARGNANVTTDANMGDKIQDSESSANEKSQAK

SEQ ID NO: 477 - DNA, 1708 bp, Arabidopsis thaliana
atcttcttcccccataacactcttcttctctcatcaaaatctctaactcaaaccttcctttgatcccaagaaatctcttccaaagccctaagccaaaagcttcaagagaaaaaatggcgatgatgggtcagttatggactaacacaggctctgctcttgcaacactaatgtttgtatacacaatcttcaaacaattcttccctctcttcggaccccagttggaaccattcctttatagactcttcggtcgcttctacccttacatccaaataacattccatgaatacagcggagagcatttcaagagaagcgaagcctacttggggatccagagctatctaagcaaagactcttctgctagagcaaagaaactcaaagccaacacaactaaaggaagcaaatctattgttcttagcatggatgataaggaagagatcactgacgattttgagggcattagggtttggtggcagtcgaagaaagagggagctactaggcaatctttctcgttttaccctgaagctaatgagaagagatattacatgttaaggttccacagacgtgaccgagaagtaatcatagagaggtatcttgagcatgttatgagagaagggaagacgatagagcaaaagaacagagagaggaagctttattcgaatactccgggtcagagccatggaaacaacagtaagtggagtcatgtaacctttgagcatccagctacgtttgatactctagctatggaagagaataagaaggaagagatcaagagtgatctgatcaagtttagtaagagtaaagattattacaagaagatcggaaaagcgtggaagagagggtatcttttgtttggaccacccgggactgggaagtctacaatgatcgcagcgatggctaatttcttggagtatgatgtttatgatcttgagttgacaacggttaaggataatacacatctgagaaggttattgattgagacttcagcgaaatcgattattgtgattgaagatatcgattgttcgcttaatctaacggggcagagaaagaagaaggaggaggaagaggaagatggagacgataagaacacgattgagaagaagatgatgatgaagaatgaaggtgagaataaagagagtaaagttactttatcagggctactaaatttcattgatggtttatggtcagcttgtggtggtgagaggatcattgtattcactacaaactttgtggacaagttagatccggctttgattaggaaaggaagaatggataagcatatagagatgtcgtattgttgtttcgaagcgtttaaggtattggctaagaactatttggatgtggaagagagtgagatgtttgaggagataaagaggttgcttgaggttgaagaaatcaagatgacaccggcggatgttggggagaatctgttaccgaagtcagaaaaggaaggaggtgagacttgtttgaagagattgatcgaagcgttgaaggaagagaaggaggaagcgaagaagaaggtcgaggaagaggaggaagagaagcagaggaaaaaggaaaaggtgaaagaaatagaggcagagaaagagaagaagaaaaagattgaagaagagaattgagtttgaaggaaatttgttggattgtagtatctaactgaaataattgtagtctgattggttcatcttatgaatgttttgtgtttcatttagcg

SEQ ID NO: 478 - protein, 500 aa, Arabidopsis thaliana
MAMMGQLWTNTGSALATLMFVYTIFKQFFPLFGPQLEPFLYRLFGRFYPYIQITFHEYSGEHFKRSEAYLGIQSYLSKDSSARAKKLKANTTKGSKSIVLSMDDKEEITDDFEGIRVWWQSKKEGATRQSFSFYPEANEKRYYMLRFHRRDREVIIERYLEHVMREGKTIEQKNRERKLYSNTPGQSHGNNSKWSHVTFEHPATFDTLAMEENKKEEIKSDLIKFSKSKDYYKKIGKAWKRGYLLFGPPGTGKSTMIAAMANFLEYDVYDLELTTVKDNTHLRRLLIETSAKSIIVIEDIDCSLNLTGQRKKKEEEEEDGDDKNTIEKKMMMKNEGENKESKVTLSGLLNFIDGLWSACGGERIIVFTTNFVDKLDPALIRKGRMDKHIEMSYCCFEAFKVLAKNYLDVEESEMFEEIKRLLEVEEIKMTPADVGENLLPKSEKEGGETCLKRLIEALKEEKEEAKKKVEEEEEEKQRKKEKVKEIEAEKEKKKKIEEEN

SEQ ID NO: 479 - protein, 498 aa, Arabidopsis thaliana
MMGQLWTNTGSALATLMFVYTIFKQFFPLFGPQLEPFLYRLFGRFYPYIQITFHEYSGEHFKRSEAYLGIQSYLSKDSSARAKKLKANTTKGSKSIVLSMDDKEEITDDFEGIRVWWQSKKEGATRQSFSFYPEANEKRYYMLRFHRRDREVIIERYLEHVMREGKTIEQKNRERKLYSNTPGQSHGNNSKWSHVTFEHPATFDTLAMEENKKEEIKSDLIKFSKSKDYYKKIGKAWKRGYLLFGPPGTGKSTMIAAMANFLEYDVYDLELTTVKDNTHLRRLLIETSAKSIIVIEDIDCSLNLTGQRKKKEEEEEDGDDKNTIEKKMMMKNEGENKESKVTLSGLLNFIDGLWSACGGERIIVFTTNFVDKLDPALIRKGRMDKHIEMSYCCFEAFKVLAKNYLDVEESEMFEEIKRLLEVEEIKMTPADVGENLLPKSEKEGGETCLKRLIEALKEEKEEAKKKVEEEEEEKQRKKEKVKEIEAEKEKKKKIEEEN

SEQ ID NO: 480 - protein, 497 aa, Arabidopsis thaliana
MGQLWTNTGSALATLMFVYTIFKQFFPLFGPQLEPFLYRLFGRFYPYIQITFHEYSGEHFKRSEAYLGIQSYLSKDSSARAKKLKANTTKGSKSIVLSMDDKEEITDDFEGIRVWWQSKKEGATRQSFSFYPEANEKRYYMLRFHRRDREVIIERYLEHVMREGKTIEQKNRERKLYSNTPGQSHGNNSKWSHVTFEHPATFDTLAMEENKKEEIKSDLIKFSKSKDYYKKIGKAWKRGYLLFGPPGTGKSTMIAAMANFLEYDVYDLELTTVKDNTHLRRLLIETSAKSIIVIEDIDCSLNLTGQRKKKEEEEEDGDDKNTIEKKMMMKNEGENKESKVTLSGLLNFIDGLWSACGGERIIVFTTNFVDKLDPALIRKGRMDKHIEMSYCCFEAFKVLAKNYLDVEESEMFEEIKRLLEVEEIKMTPADVGENLLPKSEKEGGETCLKRLIEALKEEKEEAKKKVEEEEEEKQRKKEKVKEIEAEKEKKKKIEEEN

SEQ ID NO: 481 - DNA, 1157 bp, Arabidopsis thaliana
gggttcccgtcggtgacatccaccgcgaacatttcgaccggagttttgagagagctcagagtgtttcgagtgtgttatttggatctgcgatctgatcgtctcgcatcgacgtgaaaggttttctaatccaattggttctgtggaaatttggattcggaggtttttgtttggaagatctttctgcggttttcaccgccatggctgctccgtttttctctactccatttcagccttatgtctatcagagtcaagaagatacgatcacacctttccaaattttgggtggtgaagcacaggttgttcagataatgttaaaaccacaagagaaggtcattgctaagcctggttcaatgtgctacatgtctgggtccattgagatggataatacttatacccctgaacaagaagttggagttgtacaatggattttaggaaagagtgttagtagtatagttcttcgtaacactgggcaaaacgatggatttgttggtatcgctgcaccttctttggcaaggattctcccacttgatttggcaatgtttggtggggacatcttatgccagccagatgcatttctctgttctgtccatgatgtgaaggtcgtaaacactgtgtatcagagacatcgagcaagaaacattgctgcagctggggctgagggggttctgagacaaaggctttctggtcagggtcttgcttttattatcgctggcggctctgttgtacagaaaaacctggaggtgggagaagttctcaccattgacgtttcttgcattgccgctctcactccgtcgatcaatttccaaatcaaatacaatgctgctcctgtaagacgggcagttttcgggggtgataatgtagtaacagcaactctaacgggaccaggcatcgtgttcatccaaagtttaccgtttcatcgactctcgcagcgaattgcaaggtcggtgacgtccccaaatatgagagaaaatccaagattattagttcaaatagggttattcatatttcttgcatacgttgtaattgtgtcctctttaatccttactgaaatgtgaaatacagaggtgcactcacatttgtatcctcttttgctatatatgggatttactacacccatatcaccttttgtattctcttttgctattaacctttctcag

SEQ ID NO: 482 - protein, 285 aa, Arabidopsis thaliana
MAAPFFSTPFQPYVYQSQEDTITPFQILGGEAQVVQIMLKPQEKVIAKPGSMCYMSGSIEMDNTYTPEQEVGVVQWILGKSVSSIVLRNTGQNDGFVGIAAPSLARILPLDLAMFGGDILCQPDAFLCSVHDVKVVNTVYQRHRARNIAAAGAEGVLRQRLSGQGLAFIIAGGSVVQKNLEVGEVLTIDVSCIAALTPSINFQIKYNAAPVRRAVFGGDNVVTATLTGPGIVFIQSLPFHRLSQRIARSVTSPNMRENPRLLVQIGLFIFLAYVVIVSSLILTEM

SEQ ID NO: 483 - protein, 248 aa, Arabidopsis thaliana
MLKPQEKVIAKPGSMCYMSGSIEMDNTYTPEQEVGVVQWILGKSVSSIVLRNTGQNDGFVGIAAPSLARILPLDLAMFGGDILCQPDAFLCSVHDVKVVNTVYQRHRARNIAAAGAEGVLRQRLSGQGLAFIIAGGSVVQKNLEVGEVLTIDVSCIAALTPSINFQIKYNAAPVRRAVFGGDNVVTATLTGPGIVFIQSLPFHRLSQRIARSVTSPNMRENPRLLVQIGLFIFLAYVVIVSSLILTEM

SEQ ID NO: 484 - protein, 234 aa, Arabidopsis thaliana
MCYMSGSIEMDNTYTPEQEVGVVQWILGKSVSSIVLRNTGQNDGFVGIAAPSLARILPLDLAMFGGDILCQPDAFLCSVHDVKVVNTVYQRHRARNIAAAGAEGVLRQRLSGQGLAFIIAGGSVVQKNLEVGEVLTIDVSCIAALTPSINFQIKYNAAPVRRAVFGGDNVVTATLTGPGIVFIQSLPFHRLSQRIARSVTSPNMRENPRLLVQIGLFIFLAYVVIVSSLILTEM

SEQ ID NO: 485 - DNA, 935 bp, Arabidopsis thaliana
atttttatttgaaagacatttttgcctatttcattcatattttgcttttaaaacgagaattataattcttcgactccgtgggataagttttctaaaaaatcgaagaaagatcgatggctctagatatctgcgtgaaggttgccgtcggtgctcctgatgttctcggcgactgtccgtttagccaacgtgttcttctgacacttgaggagaagaagcttccctacaagacccatctgattaacgtctccgacaaaccccaatggttcttagacattagtccagaggggaaagttccggtggtgaagcttgatggcaaatgggtggctgattctgacgtaattgttggacttcttgaagagaaatatccagagccttctctcaagactcctcctgaatttgcttctgtaggatccaaaatctttggtgcttttgtgactttcttgaagagcaaagacgctaatgacggatccgagaaggctttggttgatgagttagaagcgttggagaatcacttgaagacacattctggtccttttgtagctggagagaagattactgcagtggatttgagtttagcaccaaagctttaccatcttgaggttgctcttggtcattacaagaactggtctgtccctgagagcttgaccagtgttcgtaactacgccaaggctttgttctctagggagtcgtttgagaacaccaaggctaagaaagagattgtggttgcgggttgggaatcgaaggtgaatgcgtgatgtggatccatgcttctctagttaatgttgctttagaactattcttcactgaataataagaatgcacgagtatgtgtgtgttcttgtttttgttagagttggttatcaataatgatgcgataaagcagcatatctttttttgataatatacacctcttattcaatttggtattacagacc

SEQ ID NO: 486 - protein, 213 aa, Arabidopsis thaliana
MALDICVKVAVGAPDVLGDCPFSQRVLLTLEEKKLPYKTHLINVSDKPQWFLDISPEGKVPVVKLDGKWVADSDVIVGLLEEKYPEPSLKTPPEFASVGSKIFGAFVTFLKSKDANDGSEKALVDELEALENHLKTHSGPFVAGEKITAVDLSLAPKLYHLEVALGHYKNWSVPESLTSVRNYAKALFSRESFENTKAKKEIVVAGWESKVNA

SEQ ID NO: 487 - DNA, 810 bp, Arabidopsis thaliana
aatactacatgctctaatcacgtccttgtagaggaaaagaaaaaaaaatggctgcttcatcttcctctttcactctctgtaatcacaccacacttcgtactctccctctgagaaagacccttgtcaccaaaacccaattttcagttcccacaaaatcatcagaatctaacttctttggctccacactcactcactcattgtatatctccccagtctcttcctcttctctcaaaggcttaatctttgccaaggttaacaagggtcaggctgcaccagacttcacactaaaggatcaaaacggaaagccggtgagcctcaaaaagtataaagggaagcctgttgttctctacttctaccctgcagatgaaacccctggctgcaccaagcaggcttgtgctttcagagactcttatgagaaattcaagaaagctggtgcagaggtcattggcattagtggagatgactctgcttctcacaaggcgtttgcaagcaaatacaaactaccgtatacattgttaagcgacgaagggaataaggtgagaaaagattggggagtgcctggagacctgtttggagcattgccagggagacagacttacgttcttgacaaaaacggtgttgttcagctcatctacaacaaccagttccagcctgagaaacacatcgacgagaccttgaagtttctcaaagctgcttgatcattctctctttctcttctttcatgcatgtctcatgtctgtctccatgagaccatgaccttcttatattgtttctgttgaatatgaattttcaataataccatgttatacc

SEQ ID NO: 488 - protein, 216 aa, Arabidopsis thaliana
MAASSSSFTLCNHTTLRTLPLRKTLVTKTQFSVPTKSSESNFFGSTLTHSLYISPVSSSSLKGLIFAKVNKGQAAPDFTLKDQNGKPVSLKKYKGKPVVLYFYPADETPGCTKQACAFRDSYEKFKKAGAEVIGISGDDSASHKAFASKYKLPYTLLSDEGNKVRKDWGVPGDLFGALPGRQTYVLDKNGVVQLIYNNQFQPEKHIDETLKFLKAA

SEQ ID NO: 489 - DNA, 876 bp, Arabidopsis thaliana
tctcttcgatttcagcaattgcaatggcttccttcacaacaacttcttcttcctcgcttctcctcaaaactcttctccccgtaagccacctgaatcgtttctctacactctctggtatccgcgttggcgattcatggactcctctgctccggaacatctccaccgctgggtctcggcgtcgagtggcgattgtgaaagctgcgacggtggattcggattactcgtcgaaacggagcaatagcaatgagcagagagagacgattatgcttcctggttgcgattacaatcattggctcattgtaatggagtttcctaaagatccagcgccaagtagggatcagatgattgatacttaccttaacactcttgctactgttcttggcagcatggaagaggcgaagaagaacatgtatgcattcagtaccacgacatatactggattccaatgcaccatcgacgaagaaacatctgagaagttcaagggtttgcctggagttctctgggtcttgcctgactcctacatagatgtcaagaacaaagactatggaggcgacaagtacatcaatggagagattatcccgtgcacatacccaacataccaaccaaagcagcgcaataacactaagtatcaaagtaagagatacgaaagaaaaagagacggtcctccacctcctgaacagaggaaaccaagacaagaaccagcagcctctgattcctcttaaactataataagataatggagtgtttgcaagttttgatcttttggttagcacttagcttgttgaagtcgtgtgtaaaatcgtctagtaccaaatgatgatactgtatcatcacaccttgaacaatagctattgttatgttaggatgaaattcaac

SEQ ID NO: 490 - protein, 239 aa, Arabidopsis thaliana
SSISAIAMASFTTTSSSSLLLKTLLPVSHLNRFSTLSGIRVGDSWTPLLRNISTAGSRRRVAIVKAATVDSDYSSKRSNSNEQRETIMLPGCDYNHWLIVMEFPKDPAPSRDQMIDTYLNTLATVLGSMEEAKKNMYAFSTTTYTGFQCTIDEETSEKFKGLPGVLWVLPDSYIDVKNKDYGGDKYINGEIIPCTYPTYQPKQRNNTKYQSKRYERKRDGPPPPEQRKPRQEPAASDSS

SEQ ID NO: 491 - protein, 232 aa, Arabidopsis thaliana
MASFTTTSSSSLLLKTLLPVSHLNRFSTLSGIRVGDSWTPLLRNISTAGSRRRVAIVKAATVDSDYSSKRSNSNEQRETIMLPGCDYNHWLIVMEFPKDPAPSRDQMIDTYLNTLATVLGSMEEAKKNMYAFSTTTYTGFQCTIDEETSEKFKGLPGVLWVLPDSYIDVKNKDYGGDKYINGEIIPCTYPTYQPKQRNNTKYQSKRYERKRDGPPPPEQRKPRQEPAASDSS

SEQ ID NO: 492 - protein, 152 aa, Arabidopsis thaliana
MLPGCDYNHWLIVMEFPKDPAPSRDQMIDTYLNTLATVLGSMEEAKKNMYAFSTTTYTGFQCTIDEETSEKFKGLPGVLWVLPDSYIDVKNKDYGGDKYINGEIIPCTYPTYQPKQRNNTKYQSKRYERKRDGPPPPEQRKPRQEPAASDSS

SEQ ID NO: 493 - DNA, 1195 bp, Arabidopsis thaliana
aaaaactttcgtcttctcaacgaaatctgcagttccttgctcctttctcagtccaaattctctgatttttgattttttcgattcaatgggtttcaccaaagatcagttgcttgatcgacttcaggaacttgagattgattattccaagtatgaacatccgcctgtactaaccgtcgaagaacaggccaagtatgttagcagtagtaagggtgcactgagtaagaatctcttcttgaaggacaagaaacatcggtattatattgtttcagcgatggtggatacgaaagttgacatgaaagttttatctcagagacttggtcttggaaaaggagggattagaatggctccagaagaagcacttggtgagcttttgcaggtatccctcggatgtgttaccccgtttgcagttgtaaatgaatcagcaagagacgtgtctctcttgttagaccaaaaattcaagaaccaaacgcgttgcatcttccacccattgtctaacgatgtctcagtctctctgaacacattgggtctggacaagtttctgaagtcgattgggagagatcccgtatacgttgaccttgaggctaacccggtagttggtaaagaccaggctccagatctagctgtttgtgttccgtctaattcagttattgttcccgagattcctaatcaaacatcttctacacaaattcctcttccaaaaagtgtgtcagcagaggtcaagcctgtggcttcagccaaaacgagcaagccagcttgtaaggtgaagagcgtcgctgaaaattcagctccatcagcttacaagaacccggagaaatttgtgcaggagattttggacaaaacttcggctctattattgtccgaggctaagggagagtgcgtggaggctttggcagaaacactaagaaaacgacttacctcagagttgacccacctctctattatgtacaagaactcagcgtacgcagaaggtttttatgctggtacacgccaccagccgaagcgattgtaagaggtttggtttacatgttgaaccggagatatttgggagagaaacattaccggttcagcaatatattttccttcgttggacagcaaattttagataagactgaaaatgattacatttacatgaaagctcgaaccatttattcacttattgttgctttgtttgttcaatcaaagataaaccttttct

SEQ ID NO: 494 - protein, 335 aa, Arabidopsis thaliana
KTFVFSTKSAVPCSFLSPNSLIFDFFDSMGFTKDQLLDRLQELEIDYSKYEHPPVLTVEEQAKYVSSSKGALSKNLFLKDKKHRYYIVSAMVDTKVDMKVLSQRLGLGKGGIRMAPEEALGELLQVSLGCVTPFAVVNESARDVSLLLDQKFKNQTRCIFHPLSNDVSVSLNTLGLDKFLKSIGRDPVYVDLEANPVVGKDQAPDLAVCVPSNSVIVPEIPNQTSSTQIPLPKSVSAEVKPVASAKTSKPACKVKSVAENSAPSAYKNPEKFVQEILDKTSALLLSEAKGECVEALAETLRKRLTSELTHLSIMYKNSAYAEGFYAGTRHQPKRL

SEQ ID NO: 495 - protein, 307 aa, Arabidopsis thaliana
MGFTKDQLLDRLQELEIDYSKYEHPPVLTVEEQAKYVSSSKGALSKNLFLKDKKHRYYIVSAMVDTKVDMKVLSQRLGLGKGGIRMAPEEALGELLQVSLGCVTPFAVVNESARDVSLLLDQKFKNQTRCIFHPLSNDVSVSLNTLGLDKFLKSIGRDPVYVDLEANPVVGKDQAPDLAVCVPSNSVIVPEIPNQTSSTQIPLPKSVSAEVKPVASAKTSKPACKVKSVAENSAPSAYKNPEKFVQEILDKTSALLLSEAKGECVEALAETLRKRLTSELTHLSIMYKNSAYAEGFYAGTRHQPKRL

SEQ ID NO: 496 - protein, 245 aa, Arabidopsis thaliana
MVDTKVDMKVLSQRLGLGKGGIRMAPEEALGELLQVSLGCVTPFAVVNESARDVSLLLDQKFKNQTRCIFHPLSNDVSVSLNTLGLDKFLKSIGRDPVYVDLEANPVVGKDQAPDLAVCVPSNSVIVPEIPNQTSSTQIPLPKSVSAEVKPVASAKTSKPACKVKSVAENSAPSAYKNPEKFVQEILDKTSALLLSEAKGECVEALAETLRKRLTSELTHLSIMYKNSAYAEGFYAGTRHQPKRL

SEQ ID NO: 497 - DNA, 837 bp, Arabidopsis thaliana
ataaatactaaacaagggctcctctttgatctctcccataataataagaagaagatggccaactctaacaacgactggtctcaattctacaacaaccaaaccttcttcaccaccgcaacctccaccgtcacaaccaccaccaccaccgccacgtcagctgattctcctctgagtccggataatcgccgtgttgcaaagccaacacgtcggagatctagagcctcacgtcgtacacctactacacttttcaacaccgacacagccaacttcagagccatggtgcaacaattcaccggcggtccatccgccgttgcgttcgggtcttcgccgtcgtctggttttagtctcacctcgtctgatcccactgccggagtatcttcctctccttggcaatacgctaatttgcagaaccaaatggctcataacgagctaatgcaacaacagcgaccgtacatgttttcgtcgtcaaacaacgtgagcactcttagctatcctaacgcagtggctaccgatggttttgtgggggcggaggagagtagagagggtggtggaggaggaggaggaggttatgctccgtcgtcggagaggaatagcaatactacctattccgaggaaaaaacggtatattattcttagaaatgttctttttctagttttttacctattccgagaaaaaaaaacataaaggaagaaatgttaggtatactgactttgtttgtagcagaatgaaaactttgactattgtaattttctttagttgtttattgtttttcatattttgaggacttgtggacggataaattaaataaacttaatagaattatacgattcaattag

SEQ ID NO: 498 - protein, 211 aa, Arabidopsis thaliana
INTKQGLLFDLSHNNKKKMANSNNDWSQFYNNQTFFTTATSTVTTTTTTATSADSPLSPDNRRVAKPTRRRSRASRRTPTTLFNTDTANFRAMVQQFTGGPSAVAFGSSPSSGFSLTSSDPTAGVSSSPWQYANLQNQMAHNELMQQQRPYMFSSSNNVSTLSYPNAVATDGFVGAEESREGGGGGGGGYAPSSERNSNTTYSEEKTVYYS

SEQ ID NO: 499 - protein, 193 aa, Arabidopsis thaliana
MANSNNDWSQFYNNQTFFTTATSTVTTTTTTATSADSPLSPDNRRVAKPTRRRSRASRRTPTTLFNTDTANFRAMVQQFTGGPSAVAFGSSPSSGFSLTSSDPTAGVSSSPWQYANLQNQMAHNELMQQQRPYMFSSSNNVSTLSYPNAVATDGFVGAEESREGGGGGGGGYAPSSERNSNTTYSEEKTVYYS

SEQ ID NO: 500 - protein, 119 aa, Arabidopsis thaliana
MVQQFTGGPSAVAFGSSPSSGFSLTSSDPTAGVSSSPWQYANLQNQMAHNELMQQQRPYMFSSSNNVSTLSYPNAVATDGFVGAEESREGGGGGGGGYAPSSERNSNTTYSEEKTVYYS

SEQ ID NO: 501 - DNA, 791 bp, Arabidopsis thaliana
atggatagatattcacatgtgtttctgtatttctttcctctttttacgtatttctttctctgtatacatcgtttagtttctcataaagaaaacttccaaaatacacagagagagctttcaaaatttggtaacatcgctctcagttctcactaccaagaaaactcgaccatcgtgatgtcatctctctcctacaacggaggctacattggaaaagagagctgcttcaacgctttctccgacaagaccggtgatgtcaagttgccatgtgagagaagagaggagaaaaagacagtggcgcgtgagataatgtcacctccaatgttgccgtcgcacgtgccgtcggtgctgaagcgagagtacacgagtgatggtcggcttttactcaaggaagagaaagtgtgtcgcaacgagtattttcgagctcacagatccaacggtcgtctcatgatccagctcgtctctcttgatgaagatgatgatcgggattcggatgttaagaattgttgatgatcatcactatcttgaatggaggcaactttctttcttggaaggcaagttacgttgaagtttgaagccttcaacatgtttaacctattcactaaaatatcatcaatgttctgatttctcaatcaccgttctgtttagttttggtggtttcttttattttcatgttcctataatctccgaaactgaaagaaagtggttgtaatttaccggctgaaatggctatttgcccaaattaaggtttataatatgataattatattaaagatttgggtatatgccctact

SEQ ID NO: 502 - protein, 168 aa, Arabidopsis thaliana
MDRYSHVFLYFFPLFTYFFLCIHRLVSHKENFQNTQRELSKFGNIALSSHYQENSTIVMSSLSYNGGYIGKESCFNAFSDKTGDVKLPCERREEKKTVAREIMSPPMLPSHVPSVLKREYTSDGRLLLKEEKVCRNEYFRAHRSNGRLMIQLVSLDEDDDRDSDVKNC

SEQ ID NO: 503 - protein, 110 aa, Arabidopsis thaliana
MSSLSYNGGYIGKESCFNAFSDKTGDVKLPCERREEKKTVAREIMSPPMLPSHVPSVLKREYTSDGRLLLKEEKVCRNEYFRAHRSNGRLMIQLVSLDEDDDRDSDVKNC

SEQ ID NO: 504 - DNA, 1024 bp, Arabidopsis thaliana
agatcattcatagacgtacgcatcatcaaatcaattcatcgtcgtcttccacaattgtcatcaccgatcgattttccgactccgacgtacctcctcttccccgttaccttctcagagtttttagtagtcttcctttggaacaatgagtgacgtgtttgatggatatgagcgacaatactgtgagctctcggcgagtctttcaaagaagtgttcctctgctatttcgcttgatggagaacaaaagaagcagaagttgtctgaaataaaatccgggctggaaaatgcagaagtattgattaggaaaatggatctcgaggcaaggacccttccacctaatcttaagtccagcctccttgtcaaattaagagaattcaagtctgatctgaacaatttcaaaactgaagtgaagagaatcacatctggacagttgaacgctgctgctcgtgatgagttgctagaagctggtatggctgacacaaagacggcttcagctgatcagagagcaagattgatgatgtcaactgagcgtctgggccgaaccactgacagagtcaaggacagtcgtagaacaatgatggagactgaagaaatcggtgtttcaatcctccaagacttgcacggtcagagacagtctctcttacgtgcccacgaaacgcttcatggagtagacgataacattggaaagagcaagaagatcttgacagacatgacgaggaggatgaacaagaacaaatggaccattggagccatcatcatcgcattgattgccgccattttcatcatcttgtacttcaaactcaccaagtaagcctctgtaactaaatccgaccaaatcaaagaacaacggttgttttcgttttgtgagtctttgatttatcctgtttcttctttttgtgtgaaaagttgttttgccacctttgtattctaaatttgaccatacatactttaagcaagtaaagcttcggcctaagtgtcacgtatattgtttatattgttcatatcaaatccagaactatacatggtt

SEQ ID NO: 505 - protein, 221 aa, Arabidopsis thaliana
MSDVFDGYERQYCELSASLSKKCSSAISLDGEQKKQKLSEIKSGLENAEVLIRKMDLEARTLPPNLKSSLLVKLREFKSDLNNFKTEVKRITSGQLNAAARDELLEAGMADTKTASADQRARLMMSTERLGRTTDRVKDSRRTMMETEEIGVSILQDLHGQRQSLLRAHETLHGVDDNIGKSKKILTDMTRRMNKNKWTIGAIIIALIAAIFIILYFKLTK

SEQ ID NO: 506 - protein, 167 aa, Arabidopsis thaliana
MDLEARTLPPNLKSSLLVKLREFKSDLNNFKTEVKRITSGQLNAAARDELLEAGMADTKTASADQRARLMMSTERLGRTTDRVKDSRRTMMETEEIGVSILQDLHGQRQSLLRAHETLHGVDDNIGKSKKILTDMTRRMNKNKWTIGAIIIALIAAIFIILYFKLTK

SEQ ID NO: 507 - protein, 113 aa, Arabidopsis thaliana
MADTKTASADQRARLMMSTERLGRTTDRVKDSRRTMMETEEIGVSILQDLHGQRQSLLRAHETLHGVDDNIGKSKKILTDMTRRMNKNKWTIGAIIIALIAAIFIILYFKLTK

SEQ ID NO: 508 - DNA, 1796 bp, Arabidopsis thaliana
gacagtgaattagggttttactcaaaaaaccttctcgttgtcgttgtttactgctccgacgagaaaatggcgatgcgacatttgagccgatcgagagacgttacaaagagatcgacaaagaagtacatcgaagaacctctgtacaatcgcctcttcaaagatggtggtacagaggtcaaagttcgacagcagcttaatcagttcctcaaaggcactaaacacgtcttcaaatgggaggtcggcgatacgatcaagaaactccgaaatcgcggcctctattacccagctctcaagctatctgaagttatggaagagagaggtatgaacaagacagtgagtgatcaagcaatccatcttgatcttgttgctaaagctcgtgaaattactgctggggagaattattttgttgatcttccggaaacatctaagacggaactcacgtatgggtctcttttgaactgttactgcaaggagttgttgacagagaaagcggaaggtttgctgaataagatgaaagagctcaacattactcctagttccatgtcttataacagcctcatgactctttacaccaagacaggtgagactgagaaagttccggcgatgattcaagaattgaaggcggagaatgtgatgccggattcgtacacttataatgtctggatgagggctttggctgctactaatgatatttctggtgttgagagagtcattgaagagatgaatagagatggtagagttgctccggattggactacgtatagcaatatggcatcgatatatgttgatgctggactgtctcagaaagctgagaaggctcttcaggaactggagatgaaaaacacgcaacgggattttacggcatatcagtttcttattactttgtatggacgtctggggaagctgactgaagtttacagaatttggcgttcgttgaggctggctattccgaaaacctcaaatgtagcttatctaaacatgatacaagtgctggtcaagttgaatgatttacctggtgcagagacattgttcaaggaatggcaagctaactgttctacttatgacatcaggattgtgaatgtgttgattggagcttatgctcaagagggtctaatccagaaagcaaatgagctcaaggagaaagctcccagaagaggtggaaagctcaatgctaaaacatgggagatcttcatggattactatgtaaagagcggtgatatggctcgagcactcgaatgcatgtcaaaggcagtctccatcggcaaaggagatggtggcaagtggctaccgtcacctgaaacagtcagagctttgatgagctatttcgagcaaaagaaagatgttaatggagctgagaatttgttggagattttaaagaatggaacagacaacataggcgcagaaatatttgaaccattgataagaacatatgcagcagcgggaaagagtcaccctgctatgcgacggcgcctgaagatggaaaacgtggaggttaatgaagcgacaaagaagctactcgatgaagtatctcaggatgtgtgaggtctgttccatctctttctccttcattattcacttcagacaaagacatcattagtcgtgatagggtcacttgcattctcacagctctgtctcttattggtaataaaaaaataggctctgaatcggcaaaatcaattgtatgggtctgttttactttcaccgtagactgtttgttcatgtttttgtgaattgtttttggtttagcttggatttacagttgagacagctctcacaatgtaatcccttttttggag

SEQ ID NO: 509 - protein, 513 aa, Arabidopsis thaliana
DSELGFYSKNLLVVVVYCSDEKMAMRHLSRSRDVTKRSTKKYIEEPLYNRLFKDGGTEVKVRQQLNQFLKGTKHVFKWEVGDTIKKLRNRGLYYPALKLSEVMEERGMNKTVSDQAIHLDLVAKAREITAGENYFVDLPETSKTELTYGSLLNCYCKELLTEKAEGLLNKMKELNITPSSMSYNSLMTLYTKTGETEKVPAMIQELKAENVMPDSYTYNVWMRALAATNDISGVERVIEEMNRDGRVAPDWTTYSNMASIYVDAGLSQKAEKALQELEMKNTQRDFTAYQFLITLYGRLGKLTEVYRIWRSLRLAIPKTSNVAYLNMIQVLVKLNDLPGAETLFKEWQANCSTYDIRIVNVLIGAYAQEGLIQKANELKEKAPRRGGKLNAKTWEIFMDYYVKSGDMARALECMSKAVSIGKGDGGKWLPSPETVRALMSYFEQKKDVNGAENLLEILKNGTDNIGAEIFEPLIRTYAAAGKSHPAMRRRLKMENVEVNEATKKLLDEVSQDV

SEQ ID NO: 510 - protein, 491 aa, Arabidopsis thaliana
MAMRHLSRSRDVTKRSTKKYIEEPLYNRLFKDGGTEVKVRQQLNQFLKGTKHVFKWEVGDTIKKLRNRGLYYPALKLSEVMEERGMNKTVSDQAIHLDLVAKAREITAGENYFVDLPETSKTELTYGSLLNCYCKELLTEKAEGLLNKMKELNITPSSMSYNSLMTLYTKTGETEKVPAMIQELKAENVMPDSYTYNVWMRALAATNDISGVERVIEEMNRDGRVAPDWTTYSNMASIYVDAGLSQKAEKALQELEMKNTQRDFTAYQFLITLYGRLGKLTEVYRIWRSLRLAIPKTSNVAYLNMIQVLVKLNDLPGAETLFKEWQANCSTYDIRIVNVLIGAYAQEGLIQKANELKEKAPRRGGKLNAKTWEIFMDYYVKSGDMARALECMSKAVSIGKGDGGKWLPSPETVRALMSYFEQKKDVNGAENLLEILKNGTDNIGAEIFEPLIRTYAAAGKSHPAMRRRLKMENVEVNEATKKLLDEVSQDV

SEQ ID NO: 511 - protein, 489 aa, Arabidopsis thaliana
MRHLSRSRDVTKRSTKKYIEEPLYNRLFKDGGTEVKVRQQLNQFLKGTKHVFKWEVGDTIKKLRNRGLYYPALKLSEVMEERGMNKTVSDQAIHLDLVAKAREITAGENYFVDLPETSKTELTYGSLLNCYCKELLTEKAEGLLNKMKELNITPSSMSYNSLMTLYTKTGETEKVPAMIQELKAENVMPDSYTYNVWMRALAATNDISGVERVIEEMNRDGRVAPDWTTYSNMASIYVDAGLSQKAEKALQELEMKNTQRDFTAYQFLITLYGRLGKLTEVYRIWRSLRLAIPKTSNVAYLNMIQVLVKLNDLPGAETLFKEWQANCSTYDIRIVNVLIGAYAQEGLIQKANELKEKAPRRGGKLNAKTWEIFMDYYVKSGDMARALECMSKAVSIGKGDGGKWLPSPETVRALMSYFEQKKDVNGAENLLEILKNGTDNIGAEIFEPLIRTYAAAGKSHPAMRRRLKMENVEVNEATKKLLDEVSQDV

SEQ ID NO: 512 - DNA, 868 bp, Arabidopsis thaliana
aaacacgcttgagatatctttccccaaattcgaaagaaccctaattttttccgattccgattgatcaaacaagcgaatcccgattaactgatcgaggagatgggtaatacagataagctgatgaaccagatctttgaattgaaatttacgtcaaagtctctgcagaggcaagctaggaagtgcgaaaaagaggagagatcggagaagctcaaggtaaagaaagccattgagaaaggtaacatggatggtgctcggatctatgccgagaacgccattcgcaaacgcagcgagcagatgaactaccttcgtctctcttctcgattggacgctgttgttgctcgactcgatacccaggctaagatggctaccatcaccaaatcgatgaccaacattgtcaaatccctcgaatcgtctcttaccactggcaacttacagaagatgtctgagacgatggattcgtttgagaaacagtttgtgaacatggaagtccaagctgagttcatggataatgcaatggctggctctacttcattgtcgactccagaaggagaagtcaacagcttgatgcagcaagtagcagatgattacggtcttgaagtttctgttggactacctcagcctgctggtcatgccattcctaccaagactgaagagaaagttgaggaggatgatttaaccaggagacttgccgagcttaaagccagaggttaattagctaacctaacaaaaaaaaaaactgtatttggattcttcttttattgagatgttgatgctattaatccctgaacatgatgggaatgtttgtgtaaattgctcaccctggtacatgcttttgtttatataaaacctagagtgtgtttttacaatg

SEQ ID NO: 513 - protein, 203 aa, Arabidopsis thaliana
MGNTDKLMNQIFELKFTSKSLQRQARKCEKEERSEKLKVKKAIEKGNMDGARIYAENAIRKRSEQMNYLRLSSRLDAVVARLDTQAKMATITKSMTNIVKSLESSLTTGNLQKMSETMDSFEKQFVNMEVQAEFMDNAMAGSTSLSTPEGEVNSLMQQVADDYGLEVSVGLPQPAGHAIPTKTEEKVEEDDLTRRLAELKARG

SEQ ID NO: 514 - protein, 196 aa, Arabidopsis thaliana
MNQIFELKFTSKSLQRQARKCEKEERSEKLKVKKAIEKGNMDGARIYAENAIRKRSEQMNYLRLSSRLDAVVARLDTQAKMATITKSMTNIVKSLESSLTTGNLQKMSETMDSFEKQFVNMEVQAEFMDNAMAGSTSLSTPEGEVNSLMQQVADDYGLEVSVGLPQPAGHAIPTKTEEKVEEDDLTRRLAELKARG

SEQ ID NO: 515 - protein, 156 aa, Arabidopsis thaliana
MDGARIYAENAIRKRSEQMNYLRLSSRLDAVVARLDTQAKMATITKSMTNIVKSLESSLTTGNLQKMSETMDSFEKQFVNMEVQAEFMDNAMAGSTSLSTPEGEVNSLMQQVADDYGLEVSVGLPQPAGHAIPTKTEEKVEEDDLTRRLAELKARG

SEQ ID NO: 516 - DNA, 752 bp, Arabidopsis thaliana
aaaaatcacaaatcttcaacttccgatactttcaatctctctaaactctcaatttcagtaatcgataaccgtagcaatggaatccaccggaaaagtgaagaaagctttcggaggaagaaaaccacctggtgccccaaaaaccaaatcggtttcgaaatcgatgaaagccggtcttcaattcccagtgggaagaatcactcgtttcctgaagaaaggacgatacgctcagagacttggtggtggtgctccggtttacatggccgccgttcttgaatacctcgccgcagaagttctggagcttgctggtaacgctgcgagagataacaagaaatcaaggataattccgaggcatcttcttctcgcgataaggaacgatgaagaattggggaaacttctgagtggtgtcacaatcgctcacggtggtgttttgcctaacatcaactctgttctattgcctaagaagtctgccactaaaccagctgaagaaaaggctaccaaatcaccagtcaagtctccaaagaaagcttaatctgctagagttttcgttgctagtttgtgtttgagctctggtgaatgtagaaatttgaagcttttggatcttagtttctatgtatttggtgatttagaatgttgttcaaaatccttttcctaatcataagaatttatgatctatctattatacgcttcgtctaatcttttggtccactcgtcgtaatgtcattagtgaatatttaataaacaactttgtcatc

SEQ ID NO: 517 - protein, 150 aa, Arabidopsis thaliana
MESTGKVKKAFGGRKPPGAPKTKSVSKSMKAGLQFPVGRITRFLKKGRYAQRLGGGAPVYMAAVLEYLAAEVLELAGNAARDNKKSRIIPRHLLLAIRNDEELGKLLSGVTIAHGGVLPNINSVLLPKKSATKPAEEKATKSPVKSPKKA

SEQ ID NO: 518 - protein, 122 aa, Arabidopsis thaliana
MKAGLQFPVGRITRFLKKGRYAQRLGGGAPVYMAAVLEYLAAEVLELAGNAARDNKKSRIIPRHLLLAIRNDEELGKLLSGVTIAHGGVLPNINSVLLPKKSATKPAEEKATKSPVKSPKKA

SEQ ID NO: 519 - protein, 90 aa, Arabidopsis thaliana
MAAVLEYLAAEVLELAGNAARDNKKSRIIPRHLLLAIRNDEELGKLLSGVTIAHGGVLPNINSVLLPKKSATKPAEEKATKSPVKSPKKA

SEQ ID NO: 520 - DNA, 1826 bp, Arabidopsis thaliana
gtagtttagttttatcctcaacaaccatcttcttcgttatattccttgagataacaacaaagcatcgttcttcacctttaccaaaaagataaaaaaaaagaaaaatggcaaaagaaaatggatttataggatcaatcgatcaaggaaccaccagcaccagattcatcatttacgaccacgatgctcgtcctgttgcttctcatcaagtcgagttcactcagttctatcccgaagctggatgggtggaacacgatccaatggagatactggaaagtgtgaaagtgtgcattgcaaaggctctcgacaaagccactgccgatggacacaacgtcgacggtggcttgaaggccattgggcttacagatcagagagagactactgttgtttggagcaaatccactggccttcctctccacaaggctattgtctggatggatgctcgtaccagctccatctgcaggagactagagaaagaactctcgggaggaagatcccattttgtggagtcttgcggcttgccaataagcacatacttctctgccatgaagctgctttggctcatggagaatgtggatgatgtcaaagacgctatcaagaaaggggatgccatctttggcactatcgacacatggttgatctggaacatgactggcggtatcaatggcggccttcatgtcactgatgtcaccaatgcttcacggacaatgctcatgaacctcaaaaccttgagctgggaccaggacactttgaagacacttggcataccggctgaaatcttgcccaagattgtcagcaattcagaagtgattggagagatctgcaaaggctggcctattcccggtatcaagattgctggatgtcttggtgatcagcatgctgcgatgttggggcaagcttgcagaaaaggcgaggcgaagagtacttatggcacaggtgctttcattcttctcaacaccggagaagtgccaatcaaatcaggtcatggtcttctgaccacgttggcctacaagctcggtcctcaagcacagacaaactatgcattggagggttcgattgccatagcaggagctgctgttcagtggcttagagacagccttgggataatcaaaagcgcctctgagatcgaagatttggcagcaatggtagattctacaggaggagtgtactttgtgccagcgttcaacggcttgtttgctccttggtggagagaagacgcacgtggtgtgtgcattggaatcacgaggttcaccaacaagtctcacattgctcgggctgtgctggagagcatgtgtttccaggtgaaagacgtccttgactccatgaacaaagatgcaggtgaaaagggttcccttaataacgggaaaggggagttcttgctcagagttgatggtggtgccacagctaacaaccttctgatgcagattcaggctgatctgatgggaagtccggtggtgaggccagtggacatagagacaacagcattaggagcagcctatgcagctggattagctgtgggattctggaaggaagcagacatattcgagtcgggagagaaggcgaagaactccaaagttttcagacccgctatggaagaaggaatcaggaagaagaaagtggcgtcttggtgcaaagcggtggaaagaacatttgatctcgctgacctctctatctaaaacttgaagaagttgatctcagagatgtcctctttatttaccacagttgggctctgtcttccaagtcacataatgttttaaggtctaatatatgtttgattaaaccgtctttgaatgatttatacatcaatgcttaattctgttggaagtaag

SEQ ID NO: 521 - protein, 522 aa, Arabidopsis thaliana
MAKENGFIGSIDQGTTSTRFIIYDHDARPVASHQVEFTQFYPEAGWVEHDPMEILESVKVCIAKALDKATADGHNVDGGLKAIGLTDQRETTVVWSKSTGLPLHKAIVWMDARTSSICRRLEKELSGGRSHFVESCGLPISTYFSAMKLLWLMENVDDVKDAIKKGDAIFGTIDTWLIWNMTGGINGGLHVTDVTNASRTMLMNLKTLSWDQDTLKTLGIPAEILPKIVSNSEVIGEICKGWPIPGIKIAGCLGDQHAAMLGQACRKGEAKSTYGTGAFILLNTGEVPIKSGHGLLTTLAYKLGPQAQTNYALEGSIAIAGAAVQWLRDSLGIIKSASEIEDLAAMVDSTGGVYFVPAFNGLFAPWWREDARGVCIGITRFTNKSHIARAVLESMCFQVKDVLDSMNKDAGEKGSLNNGKGEFLLRVDGGATANNLLMQIQADLMGSPVVRPVDIETTALGAAYAAGLAVGFWKEADIFESGEKAKNSKVFRPAMEEGIRKKKVASWCKAVERTFDLADLSI

SEQ ID NO: 522 - protein, 471 aa, Arabidopsis thaliana
MEILESVKVCIAKALDKATADGHNVDGGLKAIGLTDQRETTVVWSKSTGLPLHKAIVWMDARTSSICRRLEKELSGGRSHFVESCGLPISTYFSAMKLLWLMENVDDVKDAIKKGDAIFGTIDTWLIWNMTGGINGGLHVTDVTNASRTMLMNLKTLSWDQDTLKTLGIPAEILPKIVSNSEVIGEICKGWPIPGIKIAGCLGDQHAAMLGQACRKGEAKSTYGTGAFILLNTGEVPIKSGHGLLTTLAYKLGPQAQTNYALEGSIAIAGAAVQWLRDSLGIIKSASEIEDLAAMVDSTGGVYFVPAFNGLFAPWWREDARGVCIGITRFTNKSHIARAVLESMCFQVKDVLDSMNKDAGEKGSLNNGKGEFLLRVDGGATANNLLMQIQADLMGSPVVRPVDIETTALGAAYAAGLAVGFWKEADIFESGEKAKNSKVFRPAMEEGIRKKKVASWCKAVERTFDLADLSI

SEQ ID NO: 523 - protein, 413 aa, Arabidopsis thaliana
MDARTSSICRRLEKELSGGRSHFVESCGLPISTYFSAMKLLWLMENVDDVKDAIKKGDAIFGTIDTWLIWNMTGGINGGLHVTDVTNASRTMLMNLKTLSWDQDTLKTLGIPAEILPKIVSNSEVIGEICKGWPIPGIKIAGCLGDQHAAMLGQACRKGEAKSTYGTGAFILLNTGEVPIKSGHGLLTTLAYKLGPQAQTNYALEGSIAIAGAAVQWLRDSLGIIKSASEIEDLAAMVDSTGGVYFVPAFNGLFAPWWREDARGVCIGITRFTNKSHIARAVLESMCFQVKDVLDSMNKDAGEKGSLNNGKGEFLLRVDGGATANNLLMQIQADLMGSPVVRPVDIETTALGAAYAAGLAVGFWKEADIFESGEKAKNSKVFRPAMEEGIRKKKVASWCKAVERTFDLADLSI

SEQ ID NO: 524 - DNA, 781 bp, Arabidopsis thaliana
gaaagacgttataccttccccatccacattttcttgcttaactgcagaacaacaccaaattcgaccctatcaagttttgattcgtgtctacatagaaagagtctcaattgttctgtccctggacttttttttgtttcgtttttcttgttaagatcgaaaactctgttttggtagatttttgtgttcttgattttgattcaagatggggaggctgtttgtggtgaatcttgaagggaagatctatagctgcaaacactgtaagactcatcttgctacttatgaagacatcatctccaagtcttttcactgcaagcatgggaaagcttatctcttcaataaggttgccaatgtttccattggagagactgaagaaagactgatgatgactggtaaacatactgtggctgatattttctgtgtctcgtgtggatcaatcgttggctggaaatacgagactgctcatgagaagaaccagaagtacaaagaaggaaaatcagtgcttgaaagatttaagatatcgggtcctgatgggagcaactattgggtgagtagccatggaaggcatataggtggaagtgatgcagatgatgcttgaatcatctctctctctctctattctctgatttgaccatttcatgtaaatgtaaattattcaacctccattccaatttcttgtaataagactaaccaatactctttcttctcttgacttattatgtctcagtaaataaaaaatctgattctgtctaatgactatttattggttttctgtgaaaccatc

SEQ ID NO: 525 - protein, 130 aa, Arabidopsis thaliana
MGRLFVVNLEGKIYSCKHCKTHLATYEDIISKSFHCKHGKAYLFNKVANVSIGETEERLMMTGKHTVADIFCVSCGSIVGWKYETAHEKNQKYKEGKSVLERFKISGPDGSNYWVSSHGRHIGGSDADDA

SEQ ID NO: 526 - protein, 71 aa, Arabidopsis thaliana
MMTGKHTVADIFCVSCGSIVGWKYETAHEKNQKYKEGKSVLERFKISGPDGSNYWVSSHGRHIGGSDADDA

SEQ ID NO: 527 - protein, 70 aa, Arabidopsis thaliana
MTGKHTVADIFCVSCGSIVGWKYETAHEKNQKYKEGKSVLERFKISGPDGSNYWVSSHGRHIGGSDADDA

SEQ ID NO: 528 - DNA, 539 bp, Arabidopsis thaliana
gaatcaatcgagtaaagtgttcgtagctgagaaaaaccctaagctctcgtttttcgtcttctccgattctgcaagtatgagtcgatcaggtcagcctccagatctcaagaagtacatggacaagaaactccaaattaagcttaatgccaacagaatggttgttggaactctccgtggctttgatcagttcatgaatcttgttgtggataacactgttgaagtcaatggtgatgacaaaactgacattgggatggtggtgataagaggaaacagcattgttactgttgaagctctcgaaccagttggaagatcttagcttatgacttttcacccccaagtaatcatcttctgtaatatgagactttgacttactttgctctctgtaccggcatgaatcaatcttgattttatttgatgaattcctcttctttggctcctctacttatgtcattttacccttgttcggtcctgtttgttccctatagatttttctgaacccttgatttgatggatacaaggaaatttggatacttactgcc

SEQ ID NO: 529 - protein, 104 aa, Arabidopsis thaliana
NQSSKVFVAEKNPKLSFFVFSDSASMSRSGQPPDLKKYMDKKLQIKLNANRMVVGTLRGFDQFMNLVVDNTVEVNGDDKTDIGMVVIRGNSIVTVEALEPVGRS

SEQ ID NO: 530 - protein, 79 aa, Arabidopsis thaliana
MSRSGQPPDLKKYMDKKLQIKLNANRMVVGTLRGFDQFMNLVVDNTVEVNGDDKTDIGMVVIRGNSIVTVEALEPVGRS

SEQ ID NO: 531 - protein, 66 aa, Arabidopsis thaliana
MDKKLQIKLNANRMVVGTLRGFDQFMNLVVDNTVEVNGDDKTDIGMVVIRGNSIVTVEALEPVGRS

SEQ ID NO: 532 - DNA, 621 bp, Arabidopsis thaliana
aaataataaaagcccttaggaccgattcgttatttcttcgctctctctttctctctgtgtctcgtactcgagtaggtctcagttacgtaaaggatcgagcttaaaagatgagtggagttgaagagaaagtttctggaacgacaaagacacctgcagatttcctcaaatccatccgtgggagacccgttgttgtcaagctcaattctggtgttgattatcgaggcactcttacttgtcttgatggatatatgaacatagcaatggagcagacggaggagtatgtaaacgggcagctcaagaacaaatatggtgacgcctttatccgtggaaacaacgttctttacatcagtacagtaaacatgactgtagcagacggagcctaggcccatcatgatcatcaacaacaacaacagtggtcatgttatggctgccatttttgttgtcttcttctacctcatattaaaagagtagtagacatgtaccaagattgtcatcctatgttcttcagtagatttttgggatacagacatcacttttttcttagtaatatgatactcttccatgtgaccccagataaagaagaaaaattattaatttatggcttgatacaatcatacaagc

SEQ ID NO: 533 - protein, 91 aa, Arabidopsis thaliana
MSGVEEKVSGTTKTPADFLKSIRGRPVVVKLNSGVDYRGTLTCLDGYMNIAMEQTEEYVNGQLKNKYGDAFIRGNNVLYISTVNMTVADGA

SEQ ID NO: 534 - protein, 48 aa, Arabidopsis thaliana
MYQDCHPMFFSRFLGYRHHFFLSNMILFHVTPDKEEKLLIYGLIQSYK

SEQ ID NO: 535 - DNA, 1578 bp, Arabidopsis thaliana
accgaaaaagataaaaactcacactttctctctctctctctagaaaaagaaagaaagaagaaaaacttattgttattcccatttcgcccctatccgaaaaatggttgaagctcaatcatggacaacgcggcggatgagcaatcctagattcgacgccgccgcaaccgccgcaccaaccatcgtagacatccccggaacaccaccacactcctccgcttcttcaccactcaaacccttcttcctctcttcccccaccgtatcaccaacaatcctcacggcggctataatcgccgcctggtttggctcaaatataggagtcctcctcttaaacaaataccttctcttctactacggtttccgttacccaatcttcctcaccatgacacacatgttatcatgcgccgcctatagctccgccgtaatcaatatcgccggaatcgtgccacgtcagcacatcttatctcgccgtcagtttctaaagatcctctctttgtcagcgatcttttgtctctccgtcgtctgtggcaacacttcgctacgttatatccctgtttcttttaatcaagctattggagctacgacgccgtttttcaccgccgtgttctcttttctcattacttgtaaaacagagtccactgaagtttatttagctcttcttccggttgtctccggcatcgttcttgcttctaactctgaaccttcttttcatctttttggtttccttatctgtgttgcttccaccgccggtagagctctcaaatccgtcgtccaggggattattctgacgtcggaatcggagaagctacattctatgaatcttttgctatacatggctccaatggcggcttgtatcttactaccatttacgctatacattgaaggaaacgttttaagagttctaatcgagaaagcgaggacggatccattgatcatcttcttgttagccgggaatgcgacagtggcatatttagtgaatttgacgaatttcttggtgacaaagcatacaagtgctctcacattgcaggttttggggaacggaaaagctgcggtggctgccggagtctcggttttgatatttaggaatccggtgacggtgatgggaatagccggatttggtgtgacgattatgggtgtggttctctatagcgaagctaggaagagatccaaattgctaaaccagaagtgaaaagtgtgaagagaaagattattggatttaaaccggtgaagtaatttttactttttaatttttacttcttttttttcggtttagtttcttgattctttggaattctgctattgtttggaaccggtttggttcgttttgagagggggaaaatcaatttaattgtaaatggttgagattggggaaaaactatgaaaagaaaagtggagatatatttatgtaacaaaagtgaaaaagtagggagcataattaaaggaaataagattgtatctttattttattttactttcttttagttttttcttttcttgtactattatgttttatagtttgtcttaccaaaattatcgaaacatagtgaggaaaatagtcaaaataataaatttctttctact

SEQ ID NO: 536 - protein, 361 aa, Arabidopsis thaliana
MVEAQSWTTRRMSNPRFDAAATAAPTIVDIPGTPPHSSASSPLKPFFLSSPTVSPTILTAAIIAAWFGSNIGVLLLNKYLLFYYGFRYPIFLTMTHMLSCAAYSSAVINIAGIVPRQHILSRRQFLKILSLSAIFCLSVVCGNTSLRYIPVSFNQAIGATTPFFTAVFSFLITCKTESTEVYLALLPVVSGIVLASNSEPSFHLFGFLICVASTAGRALKSVVQGIILTSESEKLHSMNLLLYMAPMAACILLPFTLYIEGNVLRVLIEKARTDPLIIFLLAGNATVAYLVNLTNFLVTKHTSALTLQVLGNGKAAVAAGVSVLIFRNPVTVMGIAGFGVTIMGVVLYSEARKRSKLLNQK

SEQ ID NO: 537 - protein, 350 aa, Arabidopsis thaliana
MSNPRFDAAATAAPTIVDIPGTPPHSSASSPLKPFFLSSPTVSPTILTAAIIAAWFGSNIGVLLLNKYLLFYYGFRYPIFLTMTHMLSCAAYSSAVINIAGIVPRQHILSRRQFLKILSLSAIFCLSVVCGNTSLRYIPVSFNQAIGATTPFFTAVFSFLITCKTESTEVYLALLPVVSGIVLASNSEPSFHLFGFLICVASTAGRALKSVVQGIILTSESEKLHSMNLLLYMAPMAACILLPFTLYIEGNVLRVLIEKARTDPLIIFLLAGNATVAYLVNLTNFLVTKHTSALTLQVLGNGKAAVAAGVSVLIFRNPVTVMGIAGFGVTIMGVVLYSEARKRSKLLNQK

SEQ ID NO: 538 - protein, 268 aa, Arabidopsis thaliana
MTHMLSCAAYSSAVINIAGIVPRQHILSRRQFLKILSLSAIFCLSVVCGNTSLRYIPVSFNQAIGATTPFFTAVFSFLITCKTESTEVYLALLPVVSGIVLASNSEPSFHLFGFLICVASTAGRALKSVVQGIILTSESEKLHSMNLLLYMAPMAACILLPFTLYIEGNVLRVLIEKARTDPLIIFLLAGNATVAYLVNLTNFLVTKHTSALTLQVLGNGKAAVAAGVSVLIFRNPVTVMGIAGFGVTIMGVVLYSEARKRSKLLNQK

SEQ ID NO: 539 - DNA, 1331 bp, Arabidopsis thaliana
attacaacaaactctttgagacctaaagagagagagagcgatagtgagatttagatcaacagatttgaatcgatttctgaaaacatgcagtacaagaatctggggaaatcgggtttaaaagtgagcacgctctcgttcggagcgtgggttacgttcgggaaccagctcgatgtgaaagaagcgaaatcgattcttcagtgttgtcgtgatcatggagtcaatttcttcgataacgctgaggtttacgctaatggtcgcgctgaggagattatgggtcaagcgattcgtgaactgggttggcgtcgatccgatatcgtcatctctaccaagatcttctggggtggtcctggtcctaacgataagggtttatctaggaaacatatcgttgaaggcactaaagcttctctcaaacgacttgatatggattacgttgatgtgctctattgccacaggccggatgcttcaactcctatcgaagagactgtgagggcgatgaactacgtgattgataagggttgggccttctattggggaaccagtgaatggtcagctcaacaaattacggaggcatggggagctgctgaccggttggatttggttggtccaattgtcgaacagccagaatacaacatgttcgctaggcacaaagttgagacagagtttcttcctctgtacaccaaccatggtataggtctcactacctggagcccacttgcatctggtgtgctcactggtaaatacaacaagggagctattccctcagacagccgatttgcattggagaactacaaaaaccttgccaatagatcacttgtggatgacgtgctgaggaaagttagcggtctcaaacccattgcagatgagctaggtgtaaccttggctcagcttgcaatcgcatggtgtgcttcaaatcctaatgtgtcatctgttatcactggtgccacaagggagtcacagattcaagaaaatatgaaagctgttgatgtgatcccattgttgacccctattgttctggacaagattgagcaagtgatacagagcaaaccaaaacgtcctgaatcatataggtaaaaccaacatccaagatctctcttccctattcaatcgtttacaaaagagtgttgcaggaaaaagaaaacattagaagaagctctgtgatgtatgttgttggatgttgtctcgttttcgctttgtttgttctctttagcagcttatgcatttttaagactcagacagagagaaagagagactaatgtttttttttagtttttcttgtttcatcatttaaaaaacggtcttatttgttacttgttagtgcaacttaaagtttg

SEQ ID NO: 540 - protein, 328 aa, Arabidopsis thaliana
MQYKNLGKSGLKVSTLSFGAWVTFGNQLDVKEAKSILQCCRDHGVNFFDNAEVYANGRAEEIMGQAIRELGWRRSDIVISTKIFWGGPGPNDKGLSRKHIVEGTKASLKRLDMDYVDVLYCHRPDASTPIEETVRAMNYVIDKGWAFYWGTSEWSAQQITEAWGAADRLDLVGPIVEQPEYNMFARHKVETEFLPLYTNHGIGLTTWSPLASGVLTGKYNKGAIPSDSRFALENYKNLANRSLVDDVLRKVSGLKPIADELGVTLAQLAIAWCASNPNVSSVITGATRESQIQENMKAVDVIPLLTPIVLDKIEQVIQSKPKRPESYR

SEQ ID NO: 541 - protein, 266 aa, Arabidopsis thaliana
MGQAIRELGWRRSDIVISTKIFWGGPGPNDKGLSRKHIVEGTKASLKRLDMDYVDVLYCHRPDASTPIEETVRAMNYVIDKGWAFYWGTSEWSAQQITEAWGAADRLDLVGPIVEQPEYNMFARHKVETEFLPLYTNHGIGLTTWSPLASGVLTGKYNKGAIPSDSRFALENYKNLANRSLVDDVLRKVSGLKPIADELGVTLAQLAIAWCASNPNVSSVITGATRESQIQENMKAVDVIPLLTPIVLDKIEQVIQSKPKRPESYR

SEQ ID NO: 542 - protein, 216 aa, Arabidopsis thaliana
MDYVDVLYCHRPDASTPIEETVRAMNYVIDKGWAFYWGTSEWSAQQITEAWGAADRLDLVGPIVEQPEYNMFARHKVETEFLPLYTNHGIGLTTWSPLASGVLTGKYNKGAIPSDSRFALENYKNLANRSLVDDVLRKVSGLKPIADELGVTLAQLAIAWCASNPNVSSVITGATRESQIQENMKAVDVIPLLTPIVLDKIEQVIQSKPKRPESYR

SEQ ID NO: 543 - DNA, 758 bp, Arabidopsis thaliana
aaaaaaaaaaaagcatttacacaacgaagatcattaatggctctcgaggcatggtttatggatgatagcaatgaggaccagagacttcctcatcatcgtaacccgaaagaactcgtctcgttggattacttggcagagttgggagtgttgtactggaagttgaaccctgagaactacgagaatgattctgaacttagcaagattagagaagacaggggttacgattacatggatttgctggatctgtgtcccgagaaagtcagcaactacgaagaaaagctgaagaactttttcacagaacacattcacaaggacgaagagattcggtactgcctagcaggaagtggctactttgatgttagggacaaggatgatcgttggatccgtatctggatgcaacctggcgatctcattgtccttcctgccggaatctaccaccggttcacactcgacgccagcaactacatcaagctaatgaggctgttcgtgggggaaccggtttggacaccatataaccggccacaggaagaacatcctgttaggaaaaagtatatccacggcttaacctacaagtttggagaaaccgttaaagcacattaacaatattaatatatgcttgttgtgtaatttgtatgtattgtttactctttagtcttaagcagtaaaataaaaacagcggctccttctggatagttgttcttgtaacatacttttgcgatgtatgcttttatacataaaaaaaatagtgtgtatttatc

SEQ ID NO: 544 - protein, 199 aa, Arabidopsis thaliana
KKKKAFTQRRSLMALEAWFMDDSNEDQRLPHHRNPKELVSLDYLAELGVLYWKLNPENYENDSELSKIREDRGYDYMDLLDLCPEKVSNYEEKLKNFFTEHIHKDEEIRYCLAGSGYFDVRDKDDRWIRIWMQPGDLIVLPAGIYHRFTLDASNYIKLMRLFVGEPVWTPYNRPQEEHPVRKKYIHGLTYKFGETVKAH

SEQ ID NO: 545 - protein, 187 aa, Arabidopsis thaliana
MALEAWFMDDSNEDQRLPHHRNPKELVSLDYLAELGVLYWKLNPENYENDSELSKIREDRGYDYMDLLDLCPEKVSNYEEKLKNFFTEHIHKDEEIRYCLAGSGYFDVRDKDDRWIRIWMQPGDLIVLPAGIYHRFTLDASNYIKLMRLFVGEPVWTPYNRPQEEHPVRKKYIHGLTYKFGETVKAH

SEQ ID NO: 546 - protein, 180 aa, Arabidopsis thaliana
MDDSNEDQRLPHHRNPKELVSLDYLAELGVLYWKLNPENYENDSELSKIREDRGYDYMDLLDLCPEKVSNYEEKLKNFFTEHIHKDEEIRYCLAGSGYFDVRDKDDRWIRIWMQPGDLIVLPAGIYHRFTLDASNYIKLMRLFVGEPVWTPYNRPQEEHPVRKKYIHGLTYKFGETVKAH

SEQ ID NO: 547 - DNA, 1004 bp, Arabidopsis thaliana
tgggggaagaaaatttacagtgttgaaattggttaaaccctgacactagcaccttcctcagtcgcatcaccaccatgtcagagcgcgaccgccgcgaacgagagagggataaggaccgtgaaccagaccgtgatagacgccgaggtagagacgaccgtgaccgtgaccgtgatcgagaccgggaaagagatagagagcgcgaccgtgaccgagggcttagaaacaaaaaatcccgatctcgtactccagaccaccacgctcgtgctcgccacgtgcgctctccggagaggtatcgctctcgttcccgctcgattgaccgtgaccgggaccgggaccgtcaacgacaccacaggcgcaggtctccttctccagatgctccgtcgcgaaaacggcctcgccagggttcagtagacgatgagaaagaaaggaatcgcaaaagagtagtgactgattccgttgacgagaatgcgtctactattactaagaagaaggataaacaaccaagtgatgctgctgataatggcggaggcgaagatgaagaaggaatggatgtgaatgagattgagatgatgaagatgttagggattcctactggatttgattccacaaaaggcaaaccagttgctggtgctgatgttagtggtattagagctgtaactaagcgtcagccaagacagtacatgaaccgtcgcggtggatttaaccgtcctctaccggccgagcgtaatcgctagtcttctcaaggtccctctaacgctgtcttgaacactagtcaaaaagatgagggctagagctgcatttcccagatagtagttactagttactccaattcttccccagactctgttctgatgtcttatagagaacaaacttgtactctctgaatttggttggaaacaactcgtgagttatttctttttcgagatttaaaaatgttaatgtttgtgtgtaatctcccggctctaactgtcagactatggttcatttgaaatcaggcttattct

SEQ ID NO: 548 - protein, 219 aa, Arabidopsis thaliana
MSERDRRERERDKDREPDRDRRRGRDDRDRDRDRDRERDRERDRDRGLRNKKSRSRTPDHHARARHVRSPERYRSRSRSIDRDRDRDRQRHHRRRSPSPDAPSRKRPRQGSVDDEKERNRKRVVTDSVDENASTITKKKDKQPSDAADNGGGEDEEGMDVNEIEMMKMLGIPTGFDSTKGKPVAGADVSGIRAVTKRQPRQYMNRRGGFNRPLPAERNR

SEQ ID NO: 549 - DNA, 3283 bp, Arabidopsis thaliana
acagggcagagataataaaaaaaggctctctctttctttctctctctctctctctctcttctctaatctaatctaatcaaaaatctcttctttaggaagagaagtttcctccttcgactttcttctttctcaatatgaatcccggaaaatcgggaacctctagcgatttcagctaatctttacttaccttttctttagttctgacaagaagtagcaatacccttttggagattcgatcgtattcgctgttttttttttttgtgttttagctgtcttcgtgtctctgctactttgtgtttgatcatggagagatctgattctagagatttctacaacttcgctaagacttcttctgataacaatagtgcactctttgacgcatctcaatatgagttctttggtcaaagtcttgaagaagtcgaattgggtggtcttgatgatgatggtactgttcgtggacatgttgatgatgaagagtatcacttgtttgataaaagagagggtgctggtttaggatcattatctgacatggatgatcttgccacaacttttgcaaagctgaacagaaatgttaccgggcccaaacaccttggagtaattggtgacagaggatcagggtccttttcaagagaaagttctactgctacagattggactcaggataatgagttcacaagctggttggatcagcacacagttgaagaacaagttcaggaagctagttggtcttcacagccacaatcatctcctaattcaaattctctgtataggacatcctcatatcctcagcagcaaacacagctacaacattacagtagcgaaccgattatcgtaccagaatcgacgtttacatcttttccttcgcctggaaaaagatctcaacagtcttccccgagccatattcatcgtgctccttctcttcctggtggtagtcagtcgaacttttcagctccaaacgcctctccgttgtcgaattctactttccatctctcgggattgtcacatggaccgtcgcattatggtaataatttggctagatatgcctcatgtggtcctactcttggtaacatggtgcaacaacctcctcattgggttaccgaccccggccttctccacggtgatcattccgcgttgttacacagtctaatgcaacagcaacatctccaacaactgcctcctcggaatggttttacttcacaacagttgatatctcttcagcagagacaatctttagctcatcttgctgcattacaacctcagctatatagttcttatccttctccatcacataaagctcttttcggggttggtgaagtaagggaacacaaacataagtcgtctcatcgaagtcgaaagaacagaggtggtatctctcaacagacatcagatttagctagccagaaaagcgaaagcggattgcagtttagatcaaagtacatgacttcagaagagatagagagtattctcaagatgcagcattctaattcacacagtagtgacccttatgtcaatgattattaccaccaagctcggcttgcgaaaaagtcatccggatcaagaacaaagcctcagttgtatccttctcatttgaaggatcaccaatctcggtcgcggaatagttctgatcagcaaccacaagttcatgttgatgctcttggaaagattacacttccttctatttgcagaccacgagctctactcgaggttgactctcctcctagctctggtcataagcatcttgaagatgagcctcttgttgcagctagagtcacaattgaagatgctttcggagttcttatcgatatagttgacattgataggactcttcaattcaaccggccacaagacggtggtgcacagctcaggagaaaacggcagatccttcttgaaggattagcaacttcacttcaacttgttgatccttttagcaaaactggtcagaaaaccggattgaccacaaaggatgatatcgtgtttctccgcataacgactcttcctaagggtcggaaattgctgacaaagtatctacagcttcttgttccgggtactgagatcgcgcgggttgtctgtatggctgtattccgccacctgaggtttctattcggtggcctaccgtcagatagccttgcagcagagacgatagctaatcttgctaaagcagttacggtttgtgttcaagcaatggacctccgagcattgagtgcttgtcttgcagctgttgtttgctcgtcagaacagccacctctccgtccaataggaagttcttccggggacggagcatcggttgtcttggtatctcttcttgagagagctgctgaagtaatagtggcggtggttccaccgcgtgtcagcaaccacgggaatccgaatgatggactctggagagcctcgtttgatgagttcttctctcttcttactaaatattgcaggagcaagtacgagacaatccatggtcagaaccacgacaatgcagctgatgtgttggagttagctataaagagggaaatgcctgccgagcttttacgtgcgagtcttcgtcatactaatgaagaccagcggaacttcttacttaacgttggtcgtagtgcatcgccagttagcgagtcgacaacaacccgtgcaagtgcaagtggtggtcagattaactctgaatttgtgaggggttaagtttaaccatataggaaacaaactgtgagattaagaagcggtgccacggtttgtttgtggatcaaagtgagtagctggttcacacagggctcaggtgacaaatgttgttcttttagatttctcttaaaacttggtagattcctcgttatggtggttgaaagcaggaaaaacagtaaattgaaagtgggagtttggtaaaactggaaaaaaaaaacaagtgaatttttccgggggagctgtatttttggttgctctgtcatgaaaactcctatttgtaggactcatttagggttttaggagtttggaaggagattagtgtttgtgactctgtatagactgatggtgaatgggtgaacggtggatggtaatggtaatgtgatggtgatggtgatgacgtgatggtgaatggtgcggtagctaagaggtattttggtgtcttagcttcctgtggggtttgtttaaaatgtgggcattgtaataataaggaacgcaaagtttttaaaaagttgtttctattaaatcatgtctcaaatgtattacttctgttatttgtaagaagttgataaacttgaaatgtattacgtttacgcagttgatagtgtcaacattttaagcc

SEQ ID NO: 550 - protein, 787 aa, Arabidopsis thaliana
MERSDSRDFYNFAKTSSDNNSALFDASQYEFFGQSLEEVELGGLDDDGTVRGHVDDEEYHLFDKREGAGLGSLSDMDDLATTFAKLNRNVTGPKHLGVIGDRGSGSFSRESSTATDWTQDNEFTSWLDQHTVEEQVQEASWSSQPQSSPNSNSLYRTSSYPQQQTQLQHYSSEPIIVPESTFTSFPSPGKRSQQSSPSHIHRAPSLPGGSQSNFSAPNASPLSNSTFHLSGLSHGPSHYGNNLARYASCGPTLGNMVQQPPHWVTDPGLLHGDHSALLHSLMQQQHLQQLPPRNGFTSQQLISLQQRQSLAHLAALQPQLYSSYPSPSHKALFGVGEVREHKHKSSHRSRKNRGGISQQTSDLASQKSESGLQFRSKYMTSEEIESILKMQHSNSHSSDPYVNDYYHQARLAKKSSGSRTKPQLYPSHLKDHQSRSRNSSDQQPQVHVDALGKITLPSICRPRALLEVDSPPSSGHKHLEDEPLVAARVTIEDAFGVLIDIVDIDRTLQFNRPQDGGAQLRRKRQILLEGLATSLQLVDPFSKTGQKTGLTTKDDIVFLRITTLPKGRKLLTKYLQLLVPGTEIARVVCMAVFRHLRFLFGGLPSDSLAAETIANLAKAVTVCVQAMDLRALSACLAAVVCSSEQPPLRPIGSSSGDGASVVLVSLLERAAEVIVAVVPPRVSNHGNPNDGLWRASFDEFFSLLTKYCRSKYETIHGQNHDNAADVLELAIKREMPAELLRASLRHTNEDQRNFLLNVGRSASPVSESTTTRASASGGQINSEFVRG

SEQ ID NO: 551 - protein, 712 aa, Arabidopsis thaliana
MDDLATTFAKLNRNVTGPKHLGVIGDRGSGSFSRESSTATDWTQDNEFTSWLDQHTVEEQVQEASWSSQPQSSPNSNSLYRTSSYPQQQTQLQHYSSEPIIVPESTFTSFPSPGKRSQQSSPSHIHRAPSLPGGSQSNFSAPNASPLSNSTFHLSGLSHGPSHYGNNLARYASCGPTLGNMVQQPPHWVTDPGLLHGDHSALLHSLMQQQHLQQLPPRNGFTSQQLISLQQRQSLAHLAALQPQLYSSYPSPSHKALFGVGEVREHKHKSSHRSRKNRGGISQQTSDLASQKSESGLQFRSKYMTSEEIESILKMQHSNSHSSDPYVNDYYHQARLAKKSSGSRTKPQLYPSHLKDHQSRSRNSSDQQPQVHVDALGKITLPSICRPRALLEVDSPPSSGHKHLEDEPLVAARVTIEDAFGVLIDIVDIDRTLQFNRPQDGGAQLRRKRQILLEGLATSLQLVDPFSKTGQKTGLTTKDDIVFLRITTLPKGRKLLTKYLQLLVPGTEIARVVCMAVFRHLRFLFGGLPSDSLAAETIANLAKAVTVCVQAMDLRALSACLAAVVCSSEQPPLRPIGSSSGDGASVVLVSLLERAAEVIVAVVPPRVSNHGNPNDGLWRASFDEFFSLLTKYCRSKYETIHGQNHDNAADVLELAIKREMPAELLRASLRHTNEDQRNFLLNVGRSASPVSESTTTRASASGGQINSEFVRG

SEQ ID NO: 552 - protein, 532 aa, Arabidopsis thaliana
MVQQPPHWVTDPGLLHGDHSALLHSLMQQQHLQQLPPRNGFTSQQLISLQQRQSLAHLAALQPQLYSSYPSPSHKALFGVGEVREHKHKSSHRSRKNRGGISQQTSDLASQKSESGLQFRSKYMTSEEIESILKMQHSNSHSSDPYVNDYYHQARLAKKSSGSRTKPQLYPSHLKDHQSRSRNSSDQQPQVHVDALGKITLPSICRPRALLEVDSPPSSGHKHLEDEPLVAARVTIEDAFGVLIDIVDIDRTLQFNRPQDGGAQLRRKRQILLEGLATSLQLVDPFSKTGQKTGLTTKDDIVFLRITTLPKGRKLLTKYLQLLVPGTEIARVVCMAVFRHLRFLFGGLPSDSLAAETIANLAKAVTVCVQAMDLRALSACLAAVVCSSEQPPLRPIGSSSGDGASVVLVSLLERAAEVIVAVVPPRVSNHGNPNDGLWRASFDEFFSLLTKYCRSKYETIHGQNHDNAADVLELAIKREMPAELLRASLRHTNEDQRNFLLNVGRSASPVSESTTTRASASGGQINSEFVRG

SEQ ID NO: 553 - DNA, 1315 bp, Arabidopsis thaliana
aaaaagtctcaacctttgaatcgtcgtttccttctttctcgcttcagatcttcgaaaaaccctaattttttgtataatttcgcttccatggctgcttcagctgcattctccatttcatcaccaccttttgtaccctttaccaccaaaattcgcagaccatttctcttgcttactccaaaatatcccaaacctgtttcggtgcgagcttctgtgtcctcgatctccatcgatgaaaaattgccagtccaaacaaagacaagcaactggcagtggaagttcaagggcaattcgattggtatatactatgaagagcatgagagggagaagtgtgaatcggctaagaatattctaatgataccaacaatttccgatgttagcaccgttgaggagtggagatctgtagctaaagacattgtgcagcgcgatggagacgtcaactggcgagcaactattgtagattggcccggtcttggttactctgctaggccgaagatggattatgacacagatgtcatggagaagtttgtggtcgacttcatgaactcacctgaaagcccaatgagccagtcaggtaatgatgatttagtgatcattggaggagggcatgcggcaacactagcactccgtgctacccaacgtgggctactaaaaccatcagctattgctgctgtcgcacctacatgggctggacctctccctattgtatttggccgtgattcttccatggtgtcgaggtatggtatgctaagaggaactctaagagcacctggagttggttggatgatgtacaacatgttggtgagcaacgagaagtcaatcgagtctcagtacaaatcccatgtttatgcagaccaaaccaacgtgaccgatgccataatccaaagcagatacgagttaacaaaacagaagggatcacgctacgtccctgcagcttttctgactggtttactcgacccggtatcatcccgggaagaatttctccaactgtttgctgatttggaagggaaattaccggttatggttatgtcaacaaaaggagctccaaaaagatcgaaagcagaaatggaagcattaagaggagcgaaaggagtaagcaaattcgtggaagttgaaggtgcactcttacctcaagaagagtatccttctcttgttgctcaagagctctacaacttcttgcaagagacttttgctaaatgttagatagattaaagctcacgtatacagccaggcccagaaaatgtgaccgcaggcccatagagtgttcattgtttgctgaactctacagtaagaagtctttttttatatttgctttccc

SEQ ID NO: 554 - protein, 399 aa, Arabidopsis thaliana
KKSQPLNRRFLLSRFRSSKNPNFLYNFASMAASAAFSISSPPFVPFTTKIRRPFLLLTPKYPKPVSVRASVSSISIDEKLPVQTKTSNWQWKFKGNSIGIYYEEHEREKCESAKNILMIPTISDVSTVEEWRSVAKDIVQRDGDVNWRATIVDWPGLGYSARPKMDYDTDVMEKFVVDFMNSPESPMSQSGNDDLVIIGGGHAATLALRATQRGLLKPSAIAAVAPTWAGPLPIVFGRDSSMVSRYGMLRGTLRAPGVGWMMYNMLVSNEKSIESQYKSHVYADQTNVTDAIIQSRYELTKQKGSRYVPAAFLTGLLDPVSSREEFLQLFADLEGKLPVMVMSTKGAPKRSKAEMEALRGAKGVSKFVEVEGALLPQEEYPSLVAQELYNFLQETFAKC

SEQ ID NO: 555 - protein, 370 aa, Arabidopsis thaliana
MAASAAFSISSPPFVPFTTKIRRPFLLLTPKYPKPVSVRASVSSISIDEKLPVQTKTSNWQWKFKGNSIGIYYEEHEREKCESAKNILMIPTISDVSTVEEWRSVAKDIVQRDGDVNWRATIVDWPGLGYSARPKMDYDTDVMEKFVVDFMNSPESPMSQSGNDDLVIIGGGHAATLALRATQRGLLKPSAIAAVAPTWAGPLPIVFGRDSSMVSRYGMLRGTLRAPGVGWMMYNMLVSNEKSIESQYKSHVYADQTNVTDAIIQSRYELTKQKGSRYVPAAFLTGLLDPVSSREEFLQLFADLEGKLPVMVMSTKGAPKRSKAEMEALRGAKGVSKFVEVEGALLPQEEYPSLVAQELYNFLQETFAKC

SEQ ID NO: 556 - protein, 282 aa, Arabidopsis thaliana
MIPTISDVSTVEEWRSVAKDIVQRDGDVNWRATIVDWPGLGYSARPKMDYDTDVMEKFVVDFMNSPESPMSQSGNDDLVIIGGGHAATLALRATQRGLLKPSAIAAVAPTWAGPLPIVFGRDSSMVSRYGMLRGTLRAPGVGWMMYNMLVSNEKSIESQYKSHVYADQTNVTDAIIQSRYELTKQKGSRYVPAAFLTGLLDPVSSREEFLQLFADLEGKLPVMVMSTKGAPKRSKAEMEALRGAKGVSKFVEVEGALLPQEEYPSLVAQELYNFLQETFAKC

SEQ ID NO: 557 - DNA, 1686 bp, Arabidopsis thaliana
aaaaaaacgaaaaaaaacaaaaaaaaaactttgaatccgtttgttgcttcttcgcaacgttctctctcaaactcgcagagtaacagattcgataatgggaggaggatttagagttttgcatttggtgaggccattcttggcttttcttccagaagtgcaaagtgctgacaggaagattccatttagagagaaagtgatctacactgtcatctccctcttcattttccttgtttgtagtcagcttcctctctatgggatccattctaccaccggtgctgatccgttctattggatgcgtgtcattctcgcatcgaatcgtggaacggtgatggagcttggtattactcctattgtcacatctggattagtgatgcaactcttagcagggtcaaagattattgaggttgacaacaatgttcgtgaggatcgtgctctcttgaatggtgctcagaagcttcttgggattctgattgctattggtgaggctgttgcatatgttctttcgggaatgtatggtcctgttggtcaacttggtgttggaaatgctattctgatcatcctccagcttttctttgctggaatcatcgttatctgtcttgacgagcttcttcagaagggatatggtcttggctctggaatctctcttttcatagcaaccaatatctgtgaaagcattatctggaaagcatttagccccacgacaatcaacactggtcgtggagctgagtttgaaggcgctgtgattgcgttgttccatatgctgataactaagtccaataaggttgctgcgctcagacaagctttttaccggcagaaccttccaaatgttaccaacttgcttgcaacagtgttgatcttcttgattgttatatacttccaaggcttccgtgttgtgttgcccgtgaggtcaaagagtgctcgtggccaacagggttcatacccgatcaagctgttctacacctccaacatgccaatcattctccagtctgctctcgtctcaaacctctacttcatctctcagcttctctacaggaaattcagtggaaatttctttgtgaacctattgggacagtggaaagaatcagagtacagtggacaatctataccagttagtggtcttgcatatttgatcacagctccggcaagttttgccgatatggcagctcatccattccatgctctgttctatatcgtcttcatgctcactgcttgtgccctattctcaaaaacatggattgaagtctccgggtcttctgctagagatgtagctaagcagctaaaggaacaacaaatggtgatgccgggacacagagagtccaacttacaaaaggagctgaaccggtacatcccaacagcggctgcatttggaggagtgtgcatcggtgcgctcactgttttggctgatttcatgggagccattgggtcggggactggaatcttacttgcagtcacaatcatatatcagtattttgaaacctttgagaaggaaaaagccagcgagcttggtttctttggattctgattgtttctagtcatataaaggggtaaattttgctaagactagtgagaaatttgaaagcctaattaagaagtagctttcctcttatgtgttcattcaaaggttcaatagacgattaaaagagcattttggtagacactttttgattaaccaacagatttttctct

SEQ ID NO: 558 - protein, 475 aa, Arabidopsis thaliana
MGGGFRVLHLVRPFLAFLPEVQSADRKIPFREKVIYTVISLFIFLVCSQLPLYGIHSTTGADPFYWMRVILASNRGTVMELGITPIVTSGLVMQLLAGSKIIEVDNNVREDRALLNGAQKLLGILIAIGEAVAYVLSGMYGPVGQLGVGNAILIILQLFFAGIIVICLDELLQKGYGLGSGISLFIATNICESIIWKAFSPTTINTGRGAEFEGAVIALFHMLITKSNKVAALRQAFYRQNLPNVTNLLATVLIFLIVIYFQGFRVVLPVRSKSARGQQGSYPIKLFYTSNMPIILQSALVSNLYFISQLLYRKFSGNFFVNLLGQWKESEYSGQSIPVSGLAYLITAPASFADMAAHPFHALFYIVFMLTACALFSKTWIEVSGSSARDVAKQLKEQQMVMPGHRESNLQKELNRYIPTAAAFGGVCIGALTVLADFMGAIGSGTGILLAVTIIYQYFETFEKEKASELGFFGF

SEQ ID NO: 559 - protein, 409 aa, Arabidopsis thaliana
MRVILASNRGTVMELGITPIVTSGLVMQLLAGSKIIEVDNNVREDRALLNGAQKLLGILIAIGEAVAYVLSGMYGPVGQLGVGNAILIILQLFFAGIIVICLDELLQKGYGLGSGISLFIATNICESIIWKAFSPTTINTGRGAEFEGAVIALFHMLITKSNKVAALRQAFYRQNLPNVTNLLATVLIFLIVIYFQGFRVVLPVRSKSARGQQGSYPIKLFYTSNMPIILQSALVSNLYFISQLLYRKFSGNFFVNLLGQWKESEYSGQSIPVSGLAYLITAPASFADMAAHPFHALFYIVFMLTACALFSKTWIEVSGSSARDVAKQLKEQQMVMPGHRESNLQKELNRYIPTAAAFGGVCIGALTVLADFMGAIGSGTGILLAVTIIYQYFETFEKEKASELGFFGF

SEQ ID NO: 560 - protein, 397 aa, Arabidopsis thaliana
MELGITPIVTSGLVMQLLAGSKIIEVDNNVREDRALLNGAQKLLGILIAIGEAVAYVLSGMYGPVGQLGVGNAILIILQLFFAGIIVICLDELLQKGYGLGSGISLFIATNICESIIWKAFSPTTINTGRGAEFEGAVIALFHMLITKSNKVAALRQAFYRQNLPNVTNLLATVLIFLIVIYFQGFRVVLPVRSKSARGQQGSYPIKLFYTSNMPIILQSALVSNLYFISQLLYRKFSGNFFVNLLGQWKESEYSGQSIPVSGLAYLITAPASFADMAAHPFHALFYIVFMLTACALFSKTWIEVSGSSARDVAKQLKEQQMVMPGHRESNLQKELNRYIPTAAAFGGVCIGALTVLADFMGAIGSGTGILLAVTIIYQYFETFEKEKASELGFFGF

SEQ ID NO: 561 - DNA, 1484 bp, Arabidopsis thaliana
ctcttaacgtcgatcacctgtttttctctttccctctctctctatttttctcaactaggaatcaaccatgaatctcccatcattctcacttctctcttctaattctttcatggaattttcaggttagaagaagattccgggcagattatctgttgattcgaagaataccgaatacgcgtttgaaatttctgaagaattatgggatacttggacttggccttgtcgtattccaaccagccgcagactgttgaagctccagcgagcggaggaggtctcagccagaatggaaaatttagctatggatatgcaagctccgctggcaagagatcatctatggaagacttttttgaaactaggatcgacggtatcaatggagaaatagttggtctatttggagtttttgatggccatggtggagccagagcagctgagtacgtgaagcgccatcttttcagtaatctgatcacccacccaaagtttatctctgacaccaaatcagctataactgatgcttataaccatacagactccgaacttctcaagtcagaaaatagtcacaatagagacgctggttctactgcgtctacagctattcttgttggtgaccgtttagttgttgcaaatgttggtgattctagagctgttatcagcagaggcggaaaagccattgctgtgtcaagggaccataaaccggaccaaagtgatgaacgtgaaaggattgagaatgctggtggatttgtgatgtgggcaggaacttggagggtaggaggagttcttgcagtttctcgtgcgtttggtgatcggcttctgaagcaatatgttgttgctgatccagaaatccaggaagaaaagattgatgatactcttgagtttttgattctagcaagtgatggactgtgggatgttttctctaatgaggcagcagttgcaatggtaaaggaagttgaagatcccgaggactcagcgaaaaaactggtgggtgaagcaataaagagaggaagtgcagataacatcacatgtgttgtcgttcgtttcttggagaagaagtcagcttcatcaagccacattagctcttcctcctccaaggaagccaaggaaatgcctccacttggagaccttgctatctcatcgaatgaagctaagcaagtccagatcggctcagggaacaaaccagagaatgtaacgaatcgaaaaccggacactgcaagtcgctcaactgatacactgacccttgagaggaattcagtgaccgacaaggtataaatagcgattccctctattctctaggaactaaagacagtgttctcttccctcaaacacggcaaacaaacttactgatcgttgatcgcgtttgcatttaggattgaagatgtatttaatacgattgttttaagtttatgattacgtttgtgtgtatataatacatgcatcgacttttgtatttgtttatgtgtaaatgttttaaatttcatgatagtttattc

SEQ ID NO: 562 - protein, 354 aa, Arabidopsis thaliana
MGYLDLALSYSNQPQTVEAPASGGGLSQNGKFSYGYASSAGKRSSMEDFFETRIDGINGEIVGLFGVFDGHGGARAAEYVKRHLFSNLITHPKFISDTKSAITDAYNHTDSELLKSENSHNRDAGSTASTAILVGDRLVVANVGDSRAVISRGGKAIAVSRDHKPDQSDERERIENAGGFVMWAGTWRVGGVLAVSRAFGDRLLKQYVVADPEIQEEKIDDTLEFLILASDGLWDVFSNEAAVAMVKEVEDPEDSAKKLVGEAIKRGSADNITCVVVRFLEKKSASSSHISSSSSKEAKEMPPLGDLAISSNEAKQVQIGSGNKPENVTNRKPDTASRSTDTLTLERNSVTDKV

SEQ ID NO: 563 - protein, 309 aa, Arabidopsis thaliana
MEDFFETRIDGINGEIVGLFGVFDGHGGARAAEYVKRHLFSNLITHPKFISDTKSAITDAYNHTDSELLKSENSHNRDAGSTASTAILVGDRLVVANVGDSRAVISRGGKAIAVSRDHKPDQSDERERIENAGGFVMWAGTWRVGGVLAVSRAFGDRLLKQYVVADPEIQEEKIDDTLEFLILASDGLWDVFSNEAAVAMVKEVEDPEDSAKKLVGEAIKRGSADNITCVVVRFLEKKSASSSHISSSSSKEAKEMPPLGDLAISSNEAKQVQIGSGNKPENVTNRKPDTASRSTDTLTLERNSVTDKV

SEQ ID NO: 564 - DNA, 1291 bp, Arabidopsis thaliana
atagaaattttgatttgattttgatgaaaaatggaaccacaaattctttttctctatctctcactcttcattctctccctaaacttcttcttcacgaatcttaaaccaaggctagtccgcctcttccagccttctttagaatctcgtgtcaagaccgctcttttatcccgaaaggaagtagccgcgtttcttgattctcccattgtcgaagacgaagaaggcgaagaaagagaagaggaagaagaaggaggtatcgtttcaaatgccaactttacgtttgagtttgatccatacatgatgagcaaagccgaatcagtgaacaaagctctagaagaagcaattccagtcggagagccactcaagattcatgaagccatgcgatacgcgattcttgcggctggaaaacgtgttaggccaatactctgccttgcttcttgcgagctagtaggtggccaagaaaatgcggcaatgcccgccgcttgtgcggttgagatgatccacacgatgtctctaatcaaagacgatttgccttgtatggacaacgacgatttgcgtcgtggaaagcccacgacgcacaaagtctacggcgaaggagttgccattctctctggtggggctctcttgtctcttgcctttgagcacatgaccaccgcggaaatatcctcggagagaatggtttgggcggtgagagaattggctaggtctattgggacaagaggtttagtcgcgggacaagcgatggatataagcagtgaaggtttggacttaaacgaggtcggattagagcatttggagtttatccatgttcataaaaccgcggttttgttggaaactgccgcggttcttggcgccataattggtggtggatctgatgaagagattgaaagtgtgagaaagtttgcaaggtgcattggattgttgtttcaggtggtggatgatattttggacgagacgaagtcgtcggaggaattgggaaaaaccgccgggaaagatcagctcgccggaaagctaacgtatccaaagttgatagggttggagaaatcgaaagaatttgttaagagattgacgaaagatgcacggcaacatcttcaagggtttagttctgaaaaggttgctcctttagtagctcttactacttttattgctaatagaaataagtgattatatatttgttttgtttgtgtgtgttgggtttatgtatacatgctaaagtagtgtgttcccttatttttaagtgtaaccacattttaagatgtttattaatgaatatttaaaaatgtacataattttt

SEQ ID NO: 565 - protein, 376 aa, Arabidopsis thaliana
MEPQILFLYLSLFILSLNFFFTNLKPRLVRLFQPSLESRVKTALLSRKEVAAFLDSPIVEDEEGEEREEEEEGGIVSNANFTFEFDPYMMSKAESVNKALEEAIPVGEPLKIHEAMRYAILAAGKRVRPILCLASCELVGGQENAAMPAACAVEMIHTMSLIKDDLPCMDNDDLRRGKPTTHKVYGEGVAILSGGALLSLAFEHMTTAEISSERMVWAVRELARSIGTRGLVAGQAMDISSEGLDLNEVGLEHLEFIHVHKTAVLLETAAVLGAIIGGGSDEEIESVRKFARCIGLLFQVVDDILDETKSSEELGKTAGKDQLAGKLTYPKLIGLEKSKEFVKRLTKDARQHLQGFSSEKVAPLVALTTFIANRNK

SEQ ID NO: 566 - protein, 288 aa, Arabidopsis thaliana
MMSKAESVNKALEEAIPVGEPLKIHEAMRYAILAAGKRVRPILCLASCELVGGQENAAMPAACAVEMIHTMSLIKDDLPCMDNDDLRRGKPTTHKVYGEGVAILSGGALLSLAFEHMTTAEISSERMVWAVRELARSIGTRGLVAGQAMDISSEGLDLNEVGLEHLEFIHVHKTAVLLETAAVLGAIIGGGSDEEIESVRKFARCIGLLFQVVDDILDETKSSEELGKTAGKDQLAGKLTYPKLIGLEKSKEFVKRLTKDARQHLQGFSSEKVAPLVALTTFIANRNK

SEQ ID NO: 567 - protein, 287 aa, Arabidopsis thaliana
MSKAESVNKALEEAIPVGEPLKIHEAMRYAILAAGKRVRPILCLASCELVGGQENAAMPAACAVEMIHTMSLIKDDLPCMDNDDLRRGKPTTHKVYGEGVAILSGGALLSLAFEHMTTAEISSERMVWAVRELARSIGTRGLVAGQAMDISSEGLDLNEVGLEHLEFIHVHKTAVLLETAAVLGAIIGGGSDEEIESVRKFARCIGLLFQVVDDILDETKSSEELGKTAGKDQLAGKLTYPKLIGLEKSKEFVKRLTKDARQHLQGFSSEKVAPLVALTTFIANRNK

SEQ ID NO: 568 - DNA, 1414 bp, Arabidopsis thaliana
acggcaacttttgtggttagtcatataagaacaaccgcgttacaaacttctctcgtctttcctggaaatttctgtccacaaatattagtctttaattttcgaaacttctctcaggcgaattcaagtttcatagttttggtctagtttttgtccaccgatctatctctttagttgaaacttatcagaatggctcgtccacaagaccctccacgtggtttcttcccttttggaaaccccttcaaaaatctatcttcgaagaactcggtactctcctcaaagcttctcccactcctgaacaattttgagaccaacttagcatcttctattagtaagcttgtccctaaggaaaagagcgatatcctgactgtctcatggatgaaacaagctatggaatctctttgcgagacacataatggtatcaagacccttataaccgatcttgagcttcctgtatcagattgggaggataaatgggttgatgtctatcttgacattagtgtgaagcttcttgatctctgcaatgcctttagctctgagcttacccgtctcaaccaaggtcatctcttactccagtttgctctgcataacttggaggccaactctcctcagaatctgtcgaaagctcagtcatcactagacagttggaagcaacacattgtctccaagaacccgagaatagaaaattgccgtgcaatcttgagcagccttgttcagaccttgaatctccccaaggtgaaaaactcggccaaagggaaagtcttgatgagagctctatatggtgtaaaggttaagaccttatacatctctggtgtttttgctgcagcgttctcaggttcatcgcagaatctgatgtaccttacagtctcaaacgagcttccatgggcacaatcattcatggaagtgcagaacaccatgaacgcagaaatcaagaacatatttttgtcagacgggttaacggttctgaaagagctagaggcagttgcttcaggtgtcaagaaactctaccctgcgatccaacaaggatcaatagatcccatatcgctgcagccactgaaggactcggtcacagaattatcgaatgggatagatcttgtttcgaaagaagtggattgtttcttcaagattctgttatcggggagagacacattactagagaacctaaggtcgatgggtgcatcaaccctacaggcaacatcgccaaaaaaggctgccggaaaaaattacagaggattctgataaactataaatgtttgtacagatggttttacttcaagtgttccatcttcttggtattgaatgtattattaggtttttgtgcaatcgtagtcgtttgtatgagatgctttgaaagtagtagttgtataagtaaaggttttaccaacttatctatatatattatgaatatctttgaagc

SEQ ID NO: 569 - protein, 349 aa, Arabidopsis thaliana
MARPQDPPRGFFPFGNPFKNLSSKNSVLSSKLLPLLNNFETNLASSISKLVPKEKSDILTVSWMKQAMESLCETHNGIKTLITDLELPVSDWEDKWVDVYLDISVKLLDLCNAFSSELTRLNQGHLLLQFALHNLEANSPQNLSKAQSSLDSWKQHIVSKNPRIENCRAILSSLVQTLNLPKVKNSAKGKVLMRALYGVKVKTLYISGVFAAAFSGSSQNLMYLTVSNELPWAQSFMEVQNTMNAEIKNIFLSDGLTVLKELEAVASGVKKLYPAIQQGSIDPISLQPLKDSVTELSNGIDLVSKEVDCFFKILLSGRDTLLENLRSMGASTLQATSPKKAAGKNYRGF

SEQ ID NO: 570 - protein, 286 aa, Arabidopsis thaliana
MKQAMESLCETHNGIKTLITDLELPVSDWEDKWVDVYLDISVKLLDLCNAFSSELTRLNQGHLLLQFALHNLEANSPQNLSKAQSSLDSWKQHIVSKNPRIENCRAILSSLVQTLNLPKVKNSAKGKVLMRALYGVKVKTLYISGVFAAAFSGSSQNLMYLTVSNELPWAQSFMEVQNTMNAEIKNIFLSDGLTVLKELEAVASGVKKLYPAIQQGSIDPISLQPLKDSVTELSNGIDLVSKEVDCFFKILLSGRDTLLENLRSMGASTLQATSPKKAAGKNYRGF

SEQ ID NO: 571 - protein, 282 aa, Arabidopsis thaliana
MESLCETHNGIKTLITDLELPVSDWEDKWVDVYLDISVKLLDLCNAFSSELTRLNQGHLLLQFALHNLEANSPQNLSKAQSSLDSWKQHIVSKNPRIENCRAILSSLVQTLNLPKVKNSAKGKVLMRALYGVKVKTLYISGVFAAAFSGSSQNLMYLTVSNELPWAQSFMEVQNTMNAEIKNIFLSDGLTVLKELEAVASGVKKLYPAIQQGSIDPISLQPLKDSVTELSNGIDLVSKEVDCFFKILLSGRDTLLENLRSMGASTLQATSPKKAAGKNYRGF

SEQ ID NO: 572 - DNA, 1328 bp, Arabidopsis thaliana
agatctctcttaatttagtcttttgtcttcgtaattacaatggctccaggaactttgactgagctagccggagagtctaagctcaactctaaatttgtcagggacgaagatgaacggcccaaagtcgcttacaatgtgtttagcgacgaaatcccggtgatctctctcgccggtatcgatgacgtcgatggaaaaagaggagagatctgccgtcagatcgttgaggcttgtgagaattggggcatcttccaagtggtcgatcacggcgtcgatactaacttagtggcggatatgactcgtctcgctcgtgacttctttgctttacctccggaagacaagctccgtttcgacatgtccggtggtaaaaaaggaggattcatcgtctctagtcacctccagggagaggctgtgcaagattggagagagattgtaacgtatttctcgtacccggtgagaaacagagactactcacggtggccagataagccggaaggttgggtgaaagtgacggaggagtatagtgagaggcttatgagtttggcttgtaagcttcttgaggttttgtctgaagctatgggtcttgagaaagagtctcttaccaatgcatgcgtcgatatggaccaaaagattgttgttaattattacccaaaatgccctcagcctgatctcaccctcggactcaagcgtcacactgaccctggaaccattaccttgctgctacaagaccaagtcggtggattacaagccacacgtgacaatggcaagacatggattacggttcagcctgttgaaggagcgtttgtcgtcaatctcggcgaccacggccattttttgagcaatgggaggttcaagaatgctgatcatcaggccgtggtgaactctaactcgagcagattatccatagccacgttccagaaccccgcgccggatgccacagtgtatccactgaaagtaagagaaggagagaaggcaatattggaggagccaatcacgtttgccgagatgtataagagaaagatgggaagagatttggagcttgctcgcctcaagaagctggctaaagaggagcgtgaccacaaagaagttgacaagcctgtcgaccaaatcttcgcttagaatctttgtgttcttgcttacttgttgttgcgttggttctgttttgtacgttggtactgaaaattatgctaggctcggtgtgttttgtgtttatttatgttctttcgaatcataaagaaataatgataattgatgcacttgtctatgacaaaaacatcatactccacctgtatttgacgcgttgggtttatgtcaaaaagcattaatacttc

SEQ ID NO: 573 - protein, 358 aa, Arabidopsis thaliana
MAPGTLTELAGESKLNSKFVRDEDERPKVAYNVFSDEIPVISLAGIDDVDGKRGEICRQIVEACENWGIFQVVDHGVDTNLVADMTRLARDFFALPPEDKLRFDMSGGKKGGFIVSSHLQGEAVQDWREIVTYFSYPVRNRDYSRWPDKPEGWVKVTEEYSERLMSLACKLLEVLSEAMGLEKESLTNACVDMDQKIVVNYYPKCPQPDLTLGLKRHTDPGTITLLLQDQVGGLQATRDNGKTWITVQPVEGAFVVNLGDHGHFLSNGRFKNADHQAVVNSNSSRLSIATFQNPAPDATVYPLKVREGEKAILEEPITFAEMYKRKMGRDLELARLKKLAKEERDHKEVDKPVDQIFA

SEQ ID NO: 574 - protein, 274 aa, Arabidopsis thaliana
MTRLARDFFALPPEDKLRFDMSGGKKGGFIVSSHLQGEAVQDWREIVTYFSYPVRNRDYSRWPDKPEGWVKVTEEYSERLMSLACKLLEVLSEAMGLEKESLTNACVDMDQKIVVNYYPKCPQPDLTLGLKRHTDPGTITLLLQDQVGGLQATRDNGKTWITVQPVEGAFVVNLGDHGHFLSNGRFKNADHQAVVNSNSSRLSIATFQNPAPDATVYPLKVREGEKAILEEPITFAEMYKRKMGRDLELARLKKLAKEERDHKEVDKPVDQIFA

SEQ ID NO: 575 - protein, 254 aa, Arabidopsis thaliana
MSGGKKGGFIVSSHLQGEAVQDWREIVTYFSYPVRNRDYSRWPDKPEGWVKVTEEYSERLMSLACKLLEVLSEAMGLEKESLTNACVDMDQKIVVNYYPKCPQPDLTLGLKRHTDPGTITLLLQDQVGGLQATRDNGKTWITVQPVEGAFVVNLGDHGHFLSNGRFKNADHQAVVNSNSSRLSIATFQNPAPDATVYPLKVREGEKAILEEPITFAEMYKRKMGRDLELARLKKLAKEERDHKEVDKPVDQIFA

SEQ ID NO: 576 - DNA, 1023 bp, Arabidopsis thaliana
gtctgtctcctattggctaagaaaacagagagaatcggtatttttagcctttgctaagatattttgatcaaaaatcccacttttgagcggtcttatctttattctccacctcaaaggaccatttctcatggcttctgttccggtgagacctctacctcttcttcgccggaacatcacctcgacgacggcttcgaaatcatctccaatgctcgccaacgtttcgagccggcattctctcgggatctctacgtatgatgaatttttgaagcaaataaaaactccggcaactgtgaaccaccggcggcgagtaagtacggtggtggcgtcggcgggaaacttgacggcgccgtcgtgggattcgtggaagcctgataagacggcggcggctacggctcttttgctgagtgacgtcatatggcctgctgctggagcgtttgcggcaatggcattattgggaagaatggatcaaatgctatctccgaaaggcatttcaatgtcagttgcaccacttggcgcagtctccgccattcttttcatcaccccttctgctcctgctgctcggaaatacaatatatttttggctcaaataggttgtgctgcgattggggtggtagctttctccgtcttcggcccaggctggctcgcccggagtgtcgccctcgccgcttccatcgcttttatggtcattactcgtgccaatcaccctcctgcggcgagcttaccactaatgttcatagatggagcaaagttccatcacttgaatttctggtacgcattgttcccaggtgcagctgcttgtgtcatcctctgccttctccaatcgatcgtatgttacttgaaggaaaacatgaaattttgatgaatcaccaagcgacatgtacgatcgaattaatgatatatataatacatacatatcgatggaaatcttgtgaaaatatttgattcatatgtatacacttgatgaacgtatgtaaatgactaaataattattaagttcattcaatattatcgtggtcttctccg

SEQ ID NO: 577 - protein, 243 aa, Arabidopsis thaliana
MASVPVRPLPLLRRNITSTTASKSSPMLANVSSRHSLGISTYDEFLKQIKTPATVNHRRRVSTVVASAGNLTAPSWDSWKPDKTAAATALLLSDVIWPAAGAFAAMALLGRMDQMLSPKGISMSVAPLGAVSAILFITPSAPAARKYNIFLAQIGCAAIGVVAFSVFGPGWLARSVALAASIAFMVITRANHPPAASLPLMFIDGAKFHHLNFWYALFPGAAACVILCLLQSIVCYLKENMKF

SEQ ID NO: 578 - protein, 217 aa, Arabidopsis thaliana
MLANVSSRHSLGISTYDEFLKQIKTPATVNHRRRVSTVVASAGNLTAPSWDSWKPDKTAAATALLLSDVIWPAAGAFAAMALLGRMDQMLSPKGISMSVAPLGAVSAILFITPSAPAARKYNIFLAQIGCAAIGVVAFSVFGPGWLARSVALAASIAFMVITRANHPPAASLPLMFIDGAKFHHLNFWYALFPGAAACVILCLLQSIVCYLKENMKF

SEQ ID NO: 579 - protein, 175 aa, Arabidopsis thaliana
MACCWSVCGNGIIGKNGSNAISERHFNVSCTTWRSLRHSFHHPFCSCCSEIQYIFGSNRLCCDWGGSFLRLRPRLARPECRPRRFHRFYGHYSCQSPSCGELTTNVHRWSKVPSLEFLVRIVPRCSCLCHPLPSPIDRMLLEGKHEILMNHQATCTIELMIYIIHTYRWKSCENI

SEQ ID NO: 580 - DNA, 1657 bp, Arabidopsis thaliana
gaagacgacgaagtcgagagaaagaaataatggcggaggagacgatggagaacgaagagagggtgaagctgttcgtcggacaagttccgaagcacatgacggagattcagctcctcacattgtttcgagaattctccatcgtcaatgaagtcaacatcattaaagagaagacaacacgagctcctcgaggatgttgttttctgacatgtcctacaagggaagatgctgacaaggtgatcaatagttttcataacaagaagacattgcctggggcatctagtccgttgcaagttaagtatgcagatggcgagttggaaagactagagcacaaacttttcgtcggtatgcttccaaagaatgtctctgaaactgaagtccagtccttattctctgaatacggaaccattaaggatctacagattctaagagggtctctacaaactagcaaaggctgtctgtttctaaagtacgagtctaaagaacaagcggtcgcagctatggaagccctcaacggaagacatataatggagggagcaaatgttcctttgattgttaaatgggcagacacagaaaaggaaagacaagctcgaagacttctaaaagttcaatctcatgtctccagactcgatccgcaaaacccctccatgtttggagcattacctatgagttatgttcctccttacaatggatatggctatcatgtgcctggaacttatggctacatgctaccacctatccagactcaacatgcatttcacaatgtgatttcacctaaccaaggtaacggcagggcattgcagggaaccgctttgacagagtctgtcccaccacgtttggccccccgcagaaacttcccaacggctcttggaaattacggttaccatggtcttcaatatcctatggcatttcctagagggatgatacctcctcgccttcctctaaccacagtttcacctggaatttctaataacggcacatcgataccttcctcgcttcaaacagaaggaccagcaggtgcgaatctatttatttataacatacctcgggaattcgaggatcaagaactcgcggctacgtttcaaccttttggtaaggttctaagcgccaaggtgtttgtagacaaggccactggtataagcaaatgtttcggattcattagttatgactcacaggcagctgctcagaacgctattaacacaatgaacggttgccaattaagcggtaagaaattgaaagtccagcttaagagagacaacggtcaacagcagcaacaacaacagagtaaaaacccgttatttaacggtttattaaactcgtaaaaaccactgacatctcttcatcattaagagttcgctgtgcggttaacggcaaatccggttgagacactaagatggatcttgatggaactggagaacaaaaagttgatggccgtaattaactaacatttgccaagtctgatcatgtgggtcagaaattctcaatcactcagaaaagctgtatcttcatgcaaaaggattctcttccactcactcttcttctatttttctcttttctaaactttgtcaatttgtgacttatgtctatcattgaaaagttcatgtataaatgttatgattattaaccattataatttcatttattaatcttgttcattctc

SEQ ID NO: 581 - protein, 438 aa, Arabidopsis thaliana
RRRSREKEIMAEETMENEERVKLFVGQVPKHMTEIQLLTLFREFSIVNEVNIIKEKTTRAPRGCCFLTCPTREDADKVINSFHNKKTLPGASSPLQVKYADGELERLEHKLFVGMLPKNVSETEVQSLFSEYGTIKDLQILRGSLQTSKGCLFLKYESKEQAVAAMEALNGRHIMEGANVPLIVKWADTEKERQARRLLKVQSHVSRLDPQNPSMFGALPMSYVPPYNGYGYHVPGTYGYMLPPIQTQHAFHNVISPNQGNGRALQGTALTESVPPRLAPRRNFPTALGNYGYHGLQYPMAFPRGMIPPRLPLTTVSPGISNNGTSIPSSLQTEGPAGANLFIYNIPREFEDQELAATFQPFGKVLSAKVFVDKATGISKCFGFISYDSQAAAQNAINTMNGCQLSGKKLKVQLKRDNGQQQQQQQSKNPLFNGLLNS

SEQ ID NO: 582 - protein, 429 aa, Arabidopsis thaliana
MAEETMENEERVKLFVGQVPKHMTEIQLLTLFREFSIVNEVNIIKEKTTRAPRGCCFLTCPTREDADKVINSFHNKKTLPGASSPLQVKYADGELERLEHKLFVGMLPKNVSETEVQSLFSEYGTIKDLQILRGSLQTSKGCLFLKYESKEQAVAAMEALNGRHIMEGANVPLIVKWADTEKERQARRLLKVQSHVSRLDPQNPSMFGALPMSYVPPYNGYGYHVPGTYGYMLPPIQTQHAFHNVISPNQGNGRALQGTALTESVPPRLAPRRNFPTALGNYGYHGLQYPMAFPRGMIPPRLPLTTVSPGISNNGTSIPSSLQTEGPAGANLFIYNIPREFEDQELAATFQPFGKVLSAKVFVDKATGISKCFGFISYDSQAAAQNAINTMNGCQLSGKKLKVQLKRDNGQQQQQQQSKNPLFNGLLNS

SEQ ID NO: 583 - protein, 424 aa, Arabidopsis thaliana
MENEERVKLFVGQVPKHMTEIQLLTLFREFSIVNEVNIIKEKTTRAPRGCCFLTCPTREDADKVINSFHNKKTLPGASSPLQVKYADGELERLEHKLFVGMLPKNVSETEVQSLFSEYGTIKDLQILRGSLQTSKGCLFLKYESKEQAVAAMEALNGRHIMEGANVPLIVKWADTEKERQARRLLKVQSHVSRLDPQNPSMFGALPMSYVPPYNGYGYHVPGTYGYMLPPIQTQHAFHNVISPNQGNGRALQGTALTESVPPRLAPRRNFPTALGNYGYHGLQYPMAFPRGMIPPRLPLTTVSPGISNNGTSIPSSLQTEGPAGANLFIYNIPREFEDQELAATFQPFGKVLSAKVFVDKATGISKCFGFISYDSQAAAQNAINTMNGCQLSGKKLKVQLKRDNGQQQQQQQSKNPLFNGLLNS

SEQ ID NO: 584 - DNA, 797 bp, Arabidopsis thaliana
gaaaaagctgttgtcaagagaagaaggaagagaggagataaaaagccaaacaaatggcgttcaatatcataacacctggtcgtgtttattcagccacgtctctcactttcgtttccaccattaaagctgctttcgttaaacctcctttggcctctccgtctcgtcgtaacctccttcgtttctcatcatctcctttgtcatttccgtcgctccgtcgaggtttccacggtggtcgtattgtggcaatgggttcttctgctcctgaatcggtcaataagccggaagaagagtggcgtgcgattctttctcctgaacaatttaggattctcagacagaaaggcactgaatatccaggaactggagaatacaacaaagtattcgacgatggcatctattgttgtgcaggatgtggaactcctctctacaaatccaccaccaaattcgactctggttgtggctggccagctttctttgatggactccccggagctataacccgaacccctgatccagatgggagacgaatcgagatcacatgtgctgcttgtggaggacatcttggtcacgtttttaaaggagaaggtttccctactcctaccgatgagcgacactgtgtaaacagtatctctctcaagttcacaccagagaatccgaccctgtaataatatgatcacagaaaaaaagacgtgataatataggtgtgttgtgtgatgcttctgtctctctctcgtactgtgtttttgtcttttttctgtgagactaatgtttacttttgatggttaataataaggtcgttg

SEQ ID NO: 585 - protein, 202 aa, Arabidopsis thaliana
MAFNIITPGRVYSATSLTFVSTIKAAFVKPPLASPSRRNLLRFSSSPLSFPSLRRGFHGGRIVAMGSSAPESVNKPEEEWRAILSPEQFRILRQKGTEYPGTGEYNKVFDDGIYCCAGCGTPLYKSTTKFDSGCGWPAFFDGLPGAITRTPDPDGRRIEITCAACGGHLGHVFKGEGFPTPTDERHCVNSISLKFTPENPTL

SEQ ID NO: 586 - protein, 138 aa, Arabidopsis thaliana
MGSSAPESVNKPEEEWRAILSPEQFRILRQKGTEYPGTGEYNKVFDDGIYCCAGCGTPLYKSTTKFDSGCGWPAFFDGLPGAITRTPDPDGRRIEITCAACGGHLGHVFKGEGFPTPTDERHCVNSISLKFTPENPTL

SEQ ID NO: 587 - DNA, 648 bp, Arabidopsis thaliana
acttctcataaaaaaggtcatttcaaaaaaaaatcagaaaccgtcaaaaagccaccgttgatatttcttccttgttgcttcttcaatggcgtcgttcgacgaagcacctcccggaaaccccaaagccggtgaaaagatcttcagaaccaagtgcgctcagtgtcacaccgtcgagaaaggtgccggtcacaaacaaggaccgaatttgaatggattgtttggaagacaatctggaacaactccaggatattcttactctgctgctaacaaaagcatggctgtgaattgggaggagaagactctttacgattacttgttgaatcctaagaagtacatccctggaacaaaaatggtgtttcctggactgaaaaaaccgcaagatcgtgccgatctcatcgcttatttgaaggaaggtactgcttagacaggctcgtccagatatatgaagctggcatttttttttctcacagctaaataaaatcagaccaaaaatattatggtcatgaactgctttttgtatggtcttttattctttctttctttttacgttgttgaagaggctagttgcctcttataaagtggaatattcgttattgatgtgaagagctaagaaccaatttccaccacgatagtcatgagattttcctt

SEQ ID NO: 588 - protein, 112 aa, Arabidopsis thaliana
MASFDEAPPGNPKAGEKIFRTKCAQCHTVEKGAGHKQGPNLNGLFGRQSGTTPGYSYSAANKSMAVNWEEKTLYDYLLNPKKYIPGTKMVFPGLKKPQDRADLIAYLKEGTA

SEQ ID NO: 589 - DNA, 854 bp, Arabidopsis thaliana
ataacaaattgtgaagaatgggaagcgaaggaagatcgattgcgaggaagccaaggtttttgtgtctccatggatttcgtacgagcggagagataatgaagatacagcttcataaatggcctaaatctgtaattgatagactcgatctcgtgtttctcgatgcaccttttccttgtcaaggcaaatctgatgtcgaaggcatctttgatcctccttattacgagtggtttcaattcaacaaggaattcaccgagtatacgaatttcgagaaatgtttggagtacctggaggatcgtatgatcaagcttggtcctttcgatggtctcattgggttttcccagggtgcaattttgtctgggggtttaccaggactgcaagctaagggaattgcatttcagaaagtaccaaagattaagtttgttataatcattggaggagctaagctcaaatccgccaaattggccgagaatgcatattcgtcttccttggaaactctctccctccactttttaggagagactgattttctgaaaccttacggaactcagctgatagaatcgtacaagaatccggtggttgtccatcatcccaaaggccatactgtcccaaggcttgatgagaaaagcttggagaaagttaccgcatttatcgataccttagagcatctggtgatggaggaagacaagaatggtgaagaaaatactagtaagccaacaaaatagataagcttagaatgttatgtataacgaataattctttggataataatcgtgcaatgactgtaaataaatctggcaatgtttgcgaaaaaacaattattacaacacaaacaataatagacgattctttcgttc

SEQ ID NO: 590 - protein, 234 aa, Arabidopsis thaliana
MGSEGRSIARKPRFLCLHGFRTSGEIMKIQLHKWPKSVIDRLDLVFLDAPFPCQGKSDVEGIFDPPYYEWFQFNKEFTEYTNFEKCLEYLEDRMIKLGPFDGLIGFSQGAILSGGLPGLQAKGIAFQKVPKIKFVIIIGGAKLKSAKLAENAYSSSLETLSLHFLGETDFLKPYGTQLIESYKNPVVVHHPKGHTVPRLDEKSLEKVTAFIDTLEHLVMEEDKNGEENTSKPTK

SEQ ID NO: 591 - protein, 208 aa, Arabidopsis thaliana
MKIQLHKWPKSVIDRLDLVFLDAPFPCQGKSDVEGIFDPPYYEWFQFNKEFTEYTNFEKCLEYLEDRMIKLGPFDGLIGFSQGAILSGGLPGLQAKGIAFQKVPKIKFVIIIGGAKLKSAKLAENAYSSSLETLSLHFLGETDFLKPYGTQLIESYKNPVVVHHPKGHTVPRLDEKSLEKVTAFIDTLEHLVMEEDKNGEENTSKPTK

SEQ ID NO: 592 - protein, 141 aa, Arabidopsis thaliana
MIKLGPFDGLIGFSQGAILSGGLPGLQAKGIAFQKVPKIKFVIIIGGAKLKSAKLAENAYSSSLETLSLHFLGETDFLKPYGTQLIESYKNPVVVHHPKGHTVPRLDEKSLEKVTAFIDTLEHLVMEEDKNGEENTSKPTK

SEQ ID NO: 593 - DNA, 963 bp, Arabidopsis thaliana
aaaaactttcagtcaaatcttgagaacagaaagaaagtccacgcgaggacataagcgcgtgtgatttaaaatcgtcgtcgtcgtcttccacaccgactttaatctgattcttagaatcgccgtttggtttttaaccagagagattatctaccaaggaacgatgattattgaaagagctcgagttccgttgagccgatggcaacaagcggccgtggcgatgggatctgctctcggtgcgttggttgatcctcgtagagcggatctaatcgctgctctcggcgaaactaccggtaaaccagcttttgaaatggttcttgagagaatgaagaagagcgaagaaggaagagctatattattggagcgtcctcgagttgtgtcagagcaagtaggtcatgcttgggatctaccagaaaacacatttggagctgcatatgctaaattcatgggatctagaaacttctctcccgatgatcgtccgcccgtaagattcatggagacggatgaattggcttacgtagcgacacgggcacgcgaagttcacgacttatggcacactctgtttggccttcctacgaatcttatcggcgagtcgtctttgaaagttatcgagtttgagcaaatgtatcttccgatgtgtatgctctctgtgattggaggtactgtgaggttcaacgagaagcaaagatcaatgttcttgaagcattaccttccttgggctgttcgtgctggaagacaatgcactgacctcatgtgtgtgtactatgagcgtcactttagtgaagacttggagcaagttcgtagaaaatggggaatcatccctgctcctcaacatcctaaatgacggttctagtttaatctgttttcgaatcacttagttatgccaaatctcttataaatgtgtagtggattggattaaaagttgtactcgcatttgatggttaataagagacaagttgggaagtc

SEQ ID NO: 594 - protein, 226 aa, Arabidopsis thaliana
MIIERARVPLSRWQQAAVAMGSALGALVDPRRADLIAALGETTGKPAFEMVLERMKKSEEGRAILLERPRVVSEQVGHAWDLPENTFGAAYAKFMGSRNFSPDDRPPVRFMETDELAYVATRAREVHDLWHTLFGLPTNLIGESSLKVIEFEQMYLPMCMLSVIGGTVRFNEKQRSMFLKHYLPWAVRAGRQCTDLMCVYYERHFSEDLEQVRRKWGIIPAPQHPK

SEQ ID NO: 595 - protein, 207 aa, Arabidopsis thaliana
MGSALGALVDPRRADLIAALGETTGKPAFEMVLERMKKSEEGRAILLERPRVVSEQVGHAWDLPENTFGAAYAKFMGSRNFSPDDRPPVRFMETDELAYVATRAREVHDLWHTLFGLPTNLIGESSLKVIEFEQMYLPMCMLSVIGGTVRFNEKQRSMFLKHYLPWAVRAGRQCTDLMCVYYERHFSEDLEQVRRKWGIIPAPQHPK

SEQ ID NO: 596 - protein, 177 aa, Arabidopsis thaliana
MVLERMKKSEEGRAILLERPRVVSEQVGHAWDLPENTFGAAYAKFMGSRNFSPDDRPPVRFMETDELAYVATRAREVHDLWHTLFGLPTNLIGESSLKVIEFEQMYLPMCMLSVIGGTVRFNEKQRSMFLKHYLPWAVRAGRQCTDLMCVYYERHFSEDLEQVRRKWGIIPAPQHPK

SEQ ID NO: 597 - DNA, 1595 bp, Arabidopsis thaliana
acacaaaaaaaaaaaaccatcggacctgaaatctttgtaagctcttcctccttgctcaagcaaacctctttttatatatttgctctctctctctcagatccgattcaagctttccgatttgcgatggacggtggagcggaaggatctcagcagcctcaccttattctagccaacaagctcttcctcctcactcatccagatgttccagacatcgagaaagtccagctcaagtctgaggttttggatttcatcagatcccatggtatggctcctttgtacgaaaccctaattgcctcttcggtgctggatttggatcaaagcttgttagagtctatgcgggccgctaatgaagaggagcttaagaagctcgacgagaagattgcagatgcagaagaaaatttgggtgaaagtgaagttcgtgaagctcatcttgctaaggctctgtatttcatcaggattagtgataaggagaaagctttggagcagctaaaactcactgaagggaaaactgttgctgttggacaaaaaatggacgtggtgttttatacgttacaacttgcttttttctatatggactttgatctggtatcaaagagcattgacaaagcaaaaaaattgtttgaagagggtggtgactgggagaggaagaaccggctaaaggtctatgaaggtttgtactgcatgtccaccagaaattttaagaaggctgccagcttattcctggattctatatcaaccttcacaacatatgaaatttttccatatgagaccttcatattctacaccgtcctgacaagcatcataactttggacagagtttcccttaagcaaaaggtcgttgatgcacctgagatcttaaccgtgcttgggaagattccattcctttctgagtttctgaactccttgtatgagtgccagtacaaggcgtttttctcagcatttgctggaatggcggtgcagataaagtatgaccgttacttgtacccgcatttccggttctacatgagggaagtcagaacagtggtgtactctcagtttttggaatcttacaaaagtgtgacagttgaagcaatggcaaaggcctttggcgtttctgtcgatttcatagaccaggagttgtcgcgcttcattgctgctgggaagcttcactgtaagatagacaaggttgcaggtgttttggagacaaaccgtcctgatgcaaagaatgcactttaccaggcaacaatcaagcaaggggatttcttgctaaaccgaatccagaagctgtctcgtgtgatcgatctgtgagcatgctacatgtttctgtttcactctttcgtcaagctttgcaacttggaaactccgaacggtagaatcttaaggtctgagaaacgatatgaactttggattttgagatgaatggctgtagtttctttcatcaactctagttggtttgtcagtggtgaatttcccaagaacaaagagcaagtttaatctccaatgttcattttattcttcctcgcatatggcttttgaatctgttgttttcatcgcatctatctagtatctaagagaaaacgaccaccatacctcttacaaaataaagcttttgtttc

SEQ ID NO: 598 - protein, 428 aa, Arabidopsis thaliana
TQKKKTIGPEIFVSSSSLLKQTSFYIFALSLSDPIQAFRFAMDGGAEGSQQPHLILANKLFLLTHPDVPDIEKVQLKSEVLDFIRSHGMAPLYETLIASSVLDLDQSLLESMRAANEEELKKLDEKIADAEENLGESEVREAHLAKALYFIRISDKEKALEQLKLTEGKTVAVGQKMDVVFYTLQLAFFYMDFDLVSKSIDKAKKLFEEGGDWERKNRLKVYEGLYCMSTRNFKKAASLFLDSISTFTTYEIFPYETFIFYTVLTSIITLDRVSLKQKVVDAPEILTVLGKIPFLSEFLNSLYECQYKAFFSAFAGMAVQIKYDRYLYPHFRFYMREVRTVVYSQFLESYKSVTVEAMAKAFGVSVDFIDQELSRFIAAGKLHCKIDKVAGVLETNRPDAKNALYQATIKQGDFLLNRIQKLSRVIDL

SEQ ID NO: 599 - protein, 387 aa, Arabidopsis thaliana
MDGGAEGSQQPHLILANKLFLLTHPDVPDIEKVQLKSEVLDFIRSHGMAPLYETLIASSVLDLDQSLLESMRAANEEELKKLDEKIADAEENLGESEVREAHLAKALYFIRISDKEKALEQLKLTEGKTVAVGQKMDVVFYTLQLAFFYMDFDLVSKSIDKAKKLFEEGGDWERKNRLKVYEGLYCMSTRNFKKAASLFLDSISTFTTYEIFPYETFIFYTVLTSIITLDRVSLKQKVVDAPEILTVLGKIPFLSEFLNSLYECQYKAFFSAFAGMAVQIKYDRYLYPHFRFYMREVRTVVYSQFLESYKSVTVEAMAKAFGVSVDFIDQELSRFIAAGKLHCKIDKVAGVLETNRPDAKNALYQATIKQGDFLLNRIQKLSRVIDL

SEQ ID NO: 600 - protein, 340 aa, Arabidopsis thaliana
MAPLYETLIASSVLDLDQSLLESMRAANEEELKKLDEKIADAEENLGESEVREAHLAKALYFIRISDKEKALEQLKLTEGKTVAVGQKMDVVFYTLQLAFFYMDFDLVSKSIDKAKKLFEEGGDWERKNRLKVYEGLYCMSTRNFKKAASLFLDSISTFTTYEIFPYETFIFYTVLTSIITLDRVSLKQKVVDAPEILTVLGKIPFLSEFLNSLYECQYKAFFSAFAGMAVQIKYDRYLYPHFRFYMREVRTVVYSQFLESYKSVTVEAMAKAFGVSVDFIDQELSRFIAAGKLHCKIDKVAGVLETNRPDAKNALYQATIKQGDFLLNRIQKLSRVIDL

SEQ ID NO: 601 - DNA, 1623 bp, Arabidopsis thaliana
ccgagattacagagaaccccgtcccgtgtttaaaccctccggcgacaaagctcagatagagaaccgctccacccttgtcgttctctgcagccatgtacggcggagatgaagtgtcagctattgtggttgacttgggttcgcacacttgcaaggctggttacgccggtgaagatgctcccaaggccgttttcccttccgttattggggcagtagatggtgtagaggcaatggatgtggatgttgattctacaaagactaattcgaactctgaggattcgaagaccgagtctgaaaaggaaaagggcaaacgcaagctctatgtaggatctcaagccatgagctaccgcagagatcatatggaggttttgtcacctataaaagatggcatcgtttctgactgggatttggtggacaatatatgggaacatgctttcaagagttgtctgatgattgatcctacggagcatccaatgctgctagctgagcctcctttaaacactcaacagcagagagagaaggcggcagagctaatgtttgaaaagtacaaagttccggcactgtttatggctaagaaccctgttctcacgtcttttgctactgggcgtgctacttctttggttgttgactgcggtggaggatccacaaccatttcaccggtgcatgatggttatgttcttcagaaggctgttgtatcgtctccacttggaggggaatttctcactgactgcctactgaaaagcttggagagtaaaggaattaaaataagacctagatactctttcaagaggaaggaagtacgagcaggggaattccaggttgaagatgtggatattcctgacaccacggaaagctacaaactcttctgccagaggatgatagtgggtgatatcaaggattctatttgtcgagttcctgatactccctatgacgataaatcatattcaaacatccctactacgtcgtacgagcttcctgatggccagacgctcgagattggtgctgataggttcaaagttcctgatgtgatgttcaacccgtccatagtccagacgattcctggaatggagaagtatgctgatatgattccttccgttcgtgggttaccacacatggtcatggagagcatcaacaaatgtgatgtagacatccggagagagttgtatagtagcatactgcttgctggtggcacatcgtcaatgcaacagctgaaagaacgtctcgaaaaggacttgatcgaagagtctcctcactcagctagagttaaagtgttggcaagcggtaacacaacagaaagaagattcagtgtatggataggagggagtatattggcatcactaggctcatttcaacagatgtggttctccaagtctgagtatgaggaacatggagcttcctacattcagagaaaatgcccttaaagcaggcagtttcagattatgtggagtctgacaagacgaaacttggaaactaatgtgttattttcattgtgcatcgttgttccttgaagattattagtattccgcctgaaccttttagaatgagtgtcattaacaagcattatagtgctatttttaaaacataaaaacatgtggaagaagtttcgttgctttattagattttcgc

SEQ ID NO: 602 - protein, 441 aa, Arabidopsis thaliana
MYGGDEVSAIVVDLGSHTCKAGYAGEDAPKAVFPSVIGAVDGVEAMDVDVDSTKTNSNSEDSKTESEKEKGKRKLYVGSQAMSYRRDHMEVLSPIKDGIVSDWDLVDNIWEHAFKSCLMIDPTEHPMLLAEPPLNTQQQREKAAELMFEKYKVPALFMAKNPVLTSFATGRATSLVVDCGGGSTTISPVHDGYVLQKAVVSSPLGGEFLTDCLLKSLESKGIKIRPRYSFKRKEVRAGEFQVEDVDIPDTTESYKLFCQRMIVGDIKDSICRVPDTPYDDKSYSNIPTTSYELPDGQTLEIGADRFKVPDVMFNPSIVQTIPGMEKYADMIPSVRGLPHMVMESINKCDVDIRRELYSSILLAGGTSSMQQLKERLEKDLIEESPHSARVKVLASGNTTERRFSVWIGGSILASLGSFQQMWFSKSEYEEHGASYIQRKCP

SEQ ID NO: 603 - protein, 396 aa, Arabidopsis thaliana
MDVDVDSTKTNSNSEDSKTESEKEKGKRKLYVGSQAMSYRRDHMEVLSPIKDGIVSDWDLVDNIWEHAFKSCLMIDPTEHPMLLAEPPLNTQQQREKAAELMFEKYKVPALFMAKNPVLTSFATGRATSLVVDCGGGSTTISPVHDGYVLQKAVVSSPLGGEFLTDCLLKSLESKGIKIRPRYSFKRKEVRAGEFQVEDVDIPDTTESYKLFCQRMIVGDIKDSICRVPDTPYDDKSYSNIPTTSYELPDGQTLEIGADRFKVPDVMFNPSIVQTIPGMEKYADMIPSVRGLPHMVMESINKCDVDIRRELYSSILLAGGTSSMQQLKERLEKDLIEESPHSARVKVLASGNTTERRFSVWIGGSILASLGSFQQMWFSKSEYEEHGASYIQRKCP

SEQ ID NO: 604 - protein, 360 aa, Arabidopsis thaliana
MSYRRDHMEVLSPIKDGIVSDWDLVDNIWEHAFKSCLMIDPTEHPMLLAEPPLNTQQQREKAAELMFEKYKVPALFMAKNPVLTSFATGRATSLVVDCGGGSTTISPVHDGYVLQKAVVSSPLGGEFLTDCLLKSLESKGIKIRPRYSFKRKEVRAGEFQVEDVDIPDTTESYKLFCQRMIVGDIKDSICRVPDTPYDDKSYSNIPTTSYELPDGQTLEIGADRFKVPDVMFNPSIVQTIPGMEKYADMIPSVRGLPHMVMESINKCDVDIRRELYSSILLAGGTSSMQQLKERLEKDLIEESPHSARVKVLASGNTTERRFSVWIGGSILASLGSFQQMWFSKSEYEEHGASYIQRKCP

SEQ ID NO: 605 - DNA, 1549 bp, Arabidopsis thaliana
agttgtcgtcgtcatcttcaatttggacttccaacgccgacaccgtttaactccgatggttcccccgccgtctaatccgcagcaggttcagcagttcctctcctctgccctctcccagcgcggcccatcttcagtcccctacgaagagtccaacaagtggttgatccggcaacatctacttaacctaatctcttcttacccttccttagagcccaaaacggcatcgtttatgcacaacgatggtcgctccgtcaacctccttcaagcagatggtacgattccgatgccttttcatggagtcacctataacatacctgtgattatctggctcctcgagtcatatcctcgtcatcctccttgcgtctatgtgaatcccaccgctgatatgatcatcaagcgacctcacgcacatgtcactccttctggtctcgtttctcttccgtaccttcagaattgggtctaccctagctccaatctcgtagatctcgtctccgatctcagcgctgcttttgctcgtgatccgcctctttattctcgacgccgtcctcagccaccgccaccgtctcctcctacggtatacgattcgtctctgtcacgacctccttcggctgatcagtcattgcctagaccgttcccgccatcaccttacggcggaggagtaagtagggtgcaagtgcagcatgttcaccaccagcagcaatctgatgatgcggcggaggttttcaagagaaatgcgattaataagatggtggagatggttcatagcgatttggtttcgatgaggagagccagagaagctgaagcagaggagctgctgagcttgcaagctgggctgaagagaagagaggatgagcttaatatagggttgaaagagatggttgaggagaaagaaacacttgaacaacaattacagattatctccatgaacactgatattctagactcgtgggttagagagaaccaaggcaaaaccaagaatttagttgatttggatgtggataatgcttttgaatgtggtgacacactctctaagcagatgttagagtgtactgctttggatttagccattgaagatgctatttattccttggataagtcgtttcaagatggtgttgttccctttgatcagtatttgaggaatgtgaggttgttgtcgagagaacagttcttccaccgagccacgggttctaaagtcagggcggcacaaatggaggttcaggttgcagccatcgcaggtaggttacattcatgaatgaaattcagtgtttttgtttgcgggatactgtgtcacacaatgctggtttatatagtctgagattagcatctttgaggagtatttctgtggctatgcgtgtgatgatggttcctctttaagattgaattaaatgtctatagactatatatacacgtacactgttgtgcacatacatatttgaatggatcagggcctgagaatcgtctccttttgtgatctatgactacttttttacatgttggggatctttgtgataaacagtattattatctaatgaatcaatcaattggtttg

SEQ ID NO: 606 - protein, 416 aa, Arabidopsis thaliana
VVVVIFNLDFQRRHRLTPMVPPPSNPQQVQQFLSSALSQRGPSSVPYEESNKWLIRQHLLNLISSYPSLEPKTASFMHNDGRSVNLLQADGTIPMPFHGVTYNIPVIIWLLESYPRHPPCVYVNPTADMIIKRPHAHVTPSGLVSLPYLQNWVYPSSNLVDLVSDLSAAFARDPPLYSRRRPQPPPPSPPTVYDSSLSRPPSADQSLPRPFPPSPYGGGVSRVQVQHVHHQQQSDDAAEVFKRNAINKMVEMVHSDLVSMRRAREAEAEELLSLQAGLKRREDELNIGLKEMVEEKETLEQQLQIISMNTDILDSWVRENQGKTKNLVDLDVDNAFECGDTLSKQMLECTALDLAIEDAIYSLDKSFQDGVVPFDQYLRNVRLLSREQFFHRATGSKVRAAQMEVQVAAIAGRLHS

SEQ ID NO: 607 - protein, 398 aa, Arabidopsis thaliana
MVPPPSNPQQVQQFLSSALSQRGPSSVPYEESNKWLIRQHLLNLISSYPSLEPKTASFMHNDGRSVNLLQADGTIPMPFHGVTYNIPVIIWLLESYPRHPPCVYVNPTADMIIKRPHAHVTPSGLVSLPYLQNWVYPSSNLVDLVSDLSAAFARDPPLYSRRRPQPPPPSPPTVYDSSLSRPPSADQSLPRPFPPSPYGGGVSRVQVQHVHHQQQSDDAAEVFKRNAINKMVEMVHSDLVSMRRAREAEAEELLSLQAGLKRREDELNIGLKEMVEEKETLEQQLQIISMNTDILDSWVRENQGKTKNLVDLDVDNAFECGDTLSKQMLECTALDLAIEDAIYSLDKSFQDGVVPFDQYLRNVRLLSREQFFHRATGSKVRAAQMEVQVAAIAGRLHS

SEQ ID NO: 608 - protein, 340 aa, Arabidopsis thaliana
MHNDGRSVNLLQADGTIPMPFHGVTYNIPVIIWLLESYPRHPPCVYVNPTADMIIKRPHAHVTPSGLVSLPYLQNWVYPSSNLVDLVSDLSAAFARDPPLYSRRRPQPPPPSPPTVYDSSLSRPPSADQSLPRPFPPSPYGGGVSRVQVQHVHHQQQSDDAAEVFKRNAINKMVEMVHSDLVSMRRAREAEAEELLSLQAGLKRREDELNIGLKEMVEEKETLEQQLQIISMNTDILDSWVRENQGKTKNLVDLDVDNAFECGDTLSKQMLECTALDLAIEDAIYSLDKSFQDGVVPFDQYLRNVRLLSREQFFHRATGSKVRAAQMEVQVAAIAGRLHS

SEQ ID NO: 609 - DNA, 1551 bp, Arabidopsis thaliana
aattcgaacccttcaagattttcttctctctatctctctgtttctctctgtttctgagatgggtttgtttggaacgaagaagatcgggaagtatgagataggaagaacaatcggagaagggaatttcgcaaaagtgaaacttggttacgacacgaccaatggtacttacgtagctgtcaaaatcatagacaaggctttggttattcaaaagggtcttgagtctcaagtcaagagagagatacgaacgatgaagcttcttaaccatcccaacatcgtccaaatacacgaggtgattggaaccaagacaaagatctgtatagttatggaatacgtttcaggtggtcagctttcagacagacttggaagacagaaaatgaaagaatcagatgctagaaaacttttccaacaattgattgatgctgttgattgttgtcataacagaggagtttatcatagagatcttaagccacaaaacttgttactagattcaaagggtaatctcaaagtttctgactttggattaagtgcagttcctaaatcgggggatatgctctctacagcttgtggctctccatgttatatagcaccagagttgattatgaacaaaggctactcaggagcagcagtagatgtatggtcttgtggagtgattctatttgaattgcttgctggttatccacctttcgatgatcatacacttccggttttgtataagaagatactcagagcagattacacgttcccacctggattcactggagagcagaagaggctaatctttaacattcttgacccaaatcctctaagtcgtataacactagctgagataatcatcaaagattcttggttcaagataggttatacaccagtttatcatcaactttcagactcaatcaaggacaatgtcgcggagataaatgcagcaaccgcgtcatcaaatttcataaatgcttttcagataatagcaatgtctagtgatctagatttgtcaggtctcttcgaagaaaatgatgataagagatataaaacaagaattgggtccaagaacacagcacaagaaacaatcaagaagattgaagctgcagcaacttatgttagtttatcagttgagagaataaagcacttcaaggttaagattcagccaaaggagataagatcaagatcttcttatgacttattatcagcagaggtgatagaggtgactccaacaaattgtgttatagaaatatcgaaatccgcaggcgagttaagactatacatggagttttgccagagcttatcaagcttacttaccgcggaagtaagctaagatagagagccatagattctcaagtaaaaatgttaaaacagaggaagcaaatgaagcatatttttgcagattgaagttgaagtgtaaagaagacaatgaagagaagaaatccaaagaatttagttatgtcttggatcttggtgatcccaaagggttcttattcaggatgtaaaatgatagattggtttctaatcaaactcgtttataaaatagatatataaaaagctgaacaagttctattt

SEQ ID NO: 610 - protein, 435 aa, Arabidopsis thaliana
IRTLQDFLLSISLFLSVSEMGLFGTKKIGKYEIGRTIGEGNFAKVKLGYDTTNGTYVAVKIIDKALVIQKGLESQVKREIRTMKLLNHPNIVQIHEVIGTKTKICIVMEYVSGGQLSDRLGRQKMKESDARKLFQQLIDAVDCCHNRGVYHRDLKPQNLLLDSKGNLKVSDFGLSAVPKSGDMLSTACGSPCYIAPELIMNKGYSGAAVDVWSCGVILFELLAGYPPFDDHTLPVLYKKILRADYTFPPGFTGEQKRLIFNILDPNPLSRITLAEIIIKDSWFKIGYTPVYHQLSDSIKDNVAEINAATASSNFINAFQIIAMSSDLDLSGLFEENDDKRYKTRIGSKNTAQETIKKIEAAATYVSLSVERIKHFKVKIQPKEIRSRSSYDLLSAEVIEVTPTNCVIEISKSAGELRLYMEFCQSLSSLLTAEVS

SEQ ID NO: 611 - protein, 416 aa, Arabidopsis thaliana
MGLFGTKKIGKYEIGRTIGEGNFAKVKLGYDTTNGTYVAVKIIDKALVIQKGLESQVKREIRTMKLLNHPNIVQIHEVIGTKTKICIVMEYVSGGQLSDRLGRQKMKESDARKLFQQLIDAVDCCHNRGVYHRDLKPQNLLLDSKGNLKVSDFGLSAVPKSGDMLSTACGSPCYIAPELIMNKGYSGAAVDVWSCGVILFELLAGYPPFDDHTLPVLYKKILRADYTFPPGFTGEQKRLIFNILDPNPLSRITLAEIIIKDSWFKIGYTPVYHQLSDSIKDNVAEINAATASSNFINAFQIIAMSSDLDLSGLFEENDDKRYKTRIGSKNTAQETIKKIEAAATYVSLSVERIKHFKVKIQPKEIRSRSSYDLLSAEVIEVTPTNCVIEISKSAGELRLYMEFCQSLSSLLTAEVS

SEQ ID NO: 612 - protein, 353 aa, Arabidopsis thaliana
MKLLNHPNIVQIHEVIGTKTKICIVMEYVSGGQLSDRLGRQKMKESDARKLFQQLIDAVDCCHNRGVYHRDLKPQNLLLDSKGNLKVSDFGLSAVPKSGDMLSTACGSPCYIAPELIMNKGYSGAAVDVWSCGVILFELLAGYPPFDDHTLPVLYKKILRADYTFPPGFTGEQKRLIFNILDPNPLSRITLAEIIIKDSWFKIGYTPVYHQLSDSIKDNVAEINAATASSNFINAFQIIAMSSDLDLSGLFEENDDKRYKTRIGSKNTAQETIKKIEAAATYVSLSVERIKHFKVKIQPKEIRSRSSYDLLSAEVIEVTPTNCVIEISKSAGELRLYMEFCQSLSSLLTAEVS

SEQ ID NO: 613 - DNA, 1521 bp, Arabidopsis thaliana
gggagcctaaacaatggggagacgaaaccagagatgcttgctctcttcctctcttcttcttcgtatccaactctctctttcctctccagatcagtaactctaaacttagccagaacaacaacactctcagctctcacaatgtcgatgaacctaaagactcatgccttcgcaggcaatcccttgaagtcgaaaactccgaaatctaccgatccattctcacccacctccgctttcgaatctctgaaaaccctaattccagtaatccctaatcactcaacaccttcccctgattttaaagtccttccctttagcaagggtcgtccactggtgttctcaagcggtggagatgctaatacgacgccgatttggcatctgggttgggtcagcttggctgattgtaaggttttgttagcaagttgtggggttgatctgaatgaggactcactcgtgtatttaggacccaagttggaagaagatttggtgtattgggctgttgatttggcagaggatggtttcgtttctgaattgggaggtaggaagttgtgttttgttgagcttcgaaccctaatggtagctgctgattgggcggatcaacgtgctatggatgagttggctattgccggcaatgccagggcgttacttgaatggcacaacgtgtcacaattttgtggatcatgtggaagtaaaacttttccaaaggaagcaggaaggagaaaacaatgctcagacgaaacatgcagaaagagggtctatccccgtgttgatccggtggttataatgttagttattgatcgagaaaatgatcgcgcacttttaagcaggcaatctagatatgtaccgagaatgtggagttgtttagctggatttattgagccaggggaaagcttagaagaggctgtgaggcgggaaacatgggaagagacaggcattgaagtaggagatgttgtataccacagctctcagccttggcctgtgggaccaagtagcatgccatgccaattgatgctcggtttctttgctttcgccaagacgctcgacataaacgtagacaaagaagagttagaagatgctcaatggcacagtagagaagaggtgaagaaagcattggcggttgcagaatacaggaaggctcaaagaacagcagctgcaaaggtagagcagatctgtaaaggtgtggagagaagccagagtctatcaactgatttcaatcttgaaagcggtgagcttgctcctatgtttatcccggggccatttgccatcgcgcaccacctgatctcagcatgggtaaatcaggctcctgacgatgttcactcaaaacaacaagcgggtgtctctctctcaagtttgtagctagaaagatgaacttagatgcttagaaaccaaacgtttgctatggcttctatgcttattttgaattgctgagtcctaagtgtgtggacttcgctcgaagttatttctttgcaacgacgatttagatcaataaaaattaatcaaagattgacctcaataaatttgagtttt

SEQ ID NO: 614 - protein, 449 aa, Arabidopsis thaliana
GSLNNGETKPEMLALFLSSSSYPTLSFLSRSVTLNLARTTTLSALTMSMNLKTHAFAGNPLKSKTPKSTDPFSPTSAFESLKTLIPVIPNHSTPSPDFKVLPFSKGRPLVFSSGGDANTTPIWHLGWVSLADCKVLLASCGVDLNEDSLVYLGPKLEEDLVYWAVDLAEDGFVSELGGRKLCFVELRTLMVAADWADQRAMDELAIAGNARALLEWHNVSQFCGSCGSKTFPKEAGRRKQCSDETCRKRVYPRVDPVVIMLVIDRENDRALLSRQSRYVPRMWSCLAGFIEPGESLEEAVRRETWEETGIEVGDVVYHSSQPWPVGPSSMPCQLMLGFFAFAKTLDINVDKEELEDAQWHSREEVKKALAVAEYRKAQRTAAAKVEQICKGVERSQSLSTDFNLESGELAPMFIPGPFAIAHHLISAWVNQAPDDVHSKQQAGVSLSSL

SEQ ID NO: 615 - protein, 438 aa, Arabidopsis thaliana
MLALFLSSSSYPTLSFLSRSVTLNLARTTTLSALTMSMNLKTHAFAGNPLKSKTPKSTDPFSPTSAFESLKTLIPVIPNHSTPSPDFKVLPFSKGRPLVFSSGGDANTTPIWHLGWVSLADCKVLLASCGVDLNEDSLVYLGPKLEEDLVYWAVDLAEDGFVSELGGRKLCFVELRTLMVAADWADQRAMDELAIAGNARALLEWHNVSQFCGSCGSKTFPKEAGRRKQCSDETCRKRVYPRVDPVVIMLVIDRENDRALLSRQSRYVPRMWSCLAGFIEPGESLEEAVRRETWEETGIEVGDVVYHSSQPWPVGPSSMPCQLMLGFFAFAKTLDINVDKEELEDAQWHSREEVKKALAVAEYRKAQRTAAAKVEQICKGVERSQSLSTDFNLESGELAPMFIPGPFAIAHHLISAWVNQAPDDVHSKQQAGVSLSSL

SEQ ID NO: 616 - protein, 403 aa, Arabidopsis thaliana
MSMNLKTHAFAGNPLKSKTPKSTDPFSPTSAFESLKTLIPVIPNHSTPSPDFKVLPFSKGRPLVFSSGGDANTTPIWHLGWVSLADCKVLLASCGVDLNEDSLVYLGPKLEEDLVYWAVDLAEDGFVSELGGRKLCFVELRTLMVAADWADQRAMDELAIAGNARALLEWHNVSQFCGSCGSKTFPKEAGRRKQCSDETCRKRVYPRVDPVVIMLVIDRENDRALLSRQSRYVPRMWSCLAGFIEPGESLEEAVRRETWEETGIEVGDVVYHSSQPWPVGPSSMPCQLMLGFFAFAKTLDINVDKEELEDAQWHSREEVKKALAVAEYRKAQRTAAAKVEQICKGVERSQSLSTDFNLESGELAPMFIPGPFAIAHHLISAWVNQAPDDVHSKQQAGVSLSSL

SEQ ID NO: 617 - DNA, 1371 bp, Arabidopsis thaliana
gactgaaaacaaacgaccctaatggctcatgaggagaagcgcccatgggagttttctttatctcttccatgggagttgattgaagagatactctctcgtgtcccaccagaatctcttcttcgcttcaaaaccgtatcgaaacaatggaacgctctcttccgcgataagacgttcatcaataaccacaagatgacgtttcgattcatcttagcaaccaaatccaagatttattcggtaagcatcgatcccaagatagttgtgcgtgagttaaccttagatattcccggtttagaatctcatgagatacctaaaaaattggttgattgcgataagttattactatgtgacatggagaaaggagttgtgctttggaacccgtggctgagacatagtacatggatcgaccagggttcaaaccacactcgaatggagtcttatggcataggatacaacaataaggggagttacaagatctttgctttttgtgatcggaaggaaaaccacacccagagattgttgacaatccatgactctgcctctgatgcgtggaaagaccgcgagcctattgataatagtcagggaaaacaaattgttcataacatatacactaaaattagtggtgtatcattgaatggaaatttgtatttggttacttattttgaaacgactgatctcgtgtaccacctaattgaaatcaattcttcgagcgaaagcgtcgtgaagttttgtgatctaccatgtgggacgtcgaactttcttaaggatgctttcgtccttagggttttcgagggagatcgattttcattgttaaagcaatgccatgcaacaaagaagattgagatttgggtgagcaagtacaagattaataataatcttgatagagatgtggaatggataaagttcatggaagtttcaagtcctaacttgccggatttagtagatggattcgactctcagccaagttactttattgaagataaaaggctcgtcgtgtgctcgtgcaacgaaactggtcgggcttggatctatgttttcggagaaaataagttgatcagtaaaactcaaattgattctgtggtggatctttggccttcacactggacctttattcccagtttggtaccggttcctcgagctcaaagagaagaaccagcagaattacaagtttgattttagttacattttagcttcttgtttggttgttgagaaagctaaattttatttggatttcagtatttttattcacaaaccatcttctttgttgctgataattgattaatctccctttctttgttttgtagcttcttttggcaaaataaattcttaataatgtatcctttagataaatctagagagaatgtttaaggaccc

SEQ ID NO: 618 - protein, 382 aa, Arabidopsis thaliana
MAHEEKRPWEFSLSLPWELIEEILSRVPPESLLRFKTVSKQWNALFRDKTFINNHKMTFRFILATKSKIYSVSIDPKIVVRELTLDIPGLESHEIPKKLVDCDKLLLCDMEKGVVLWNPWLRHSTWIDQGSNHTRMESYGIGYNNKGSYKIFAFCDRKENHTQRLLTIHDSASDAWKDREPIDNSQGKQIVHNIYTKISGVSLNGNLYLVTYFETTDLVYHLIEINSSSESVVKFCDLPCGTSNFLKDAFVLRVFEGDRFSLLKQCHATKKIEIWVSKYKINNNLDRDVEWIKFMEVSSPNLPDLVDGFDSQPSYFIEDKRLVVCSCNETGRAWIYVFGENKLISKTQIDSVVDLWPSHWTFIPSLVPVPRAQREEPAELQV

SEQ ID NO: 619 - protein, 326 aa, Arabidopsis thaliana
MTFRFILATKSKIYSVSIDPKIVVRELTLDIPGLESHEIPKKLVDCDKLLLCDMEKGVVLWNPWLRHSTWIDQGSNHTRMESYGIGYNNKGSYKIFAFCDRKENHTQRLLTIHDSASDAWKDREPIDNSQGKQIVHNIYTKISGVSLNGNLYLVTYFETTDLVYHLIEINSSSESVVKFCDLPCGTSNFLKDAFVLRVFEGDRFSLLKQCHATKKIEIWVSKYKINNNLDRDVEWIKFMEVSSPNLPDLVDGFDSQPSYFIEDKRLVVCSCNETGRAWIYVFGENKLISKTQIDSVVDLWPSHWTFIPSLVPVPRAQREEPAELQV

SEQ ID NO: 620 - protein, 273 aa, Arabidopsis thaliana
MEKGVVLWNPWLRHSTWIDQGSNHTRMESYGIGYNNKGSYKIFAFCDRKENHTQRLLTIHDSASDAWKDREPIDNSQGKQIVHNIYTKISGVSLNGNLYLVTYFETTDLVYHLIEINSSSESVVKFCDLPCGTSNFLKDAFVLRVFEGDRFSLLKQCHATKKIEIWVSKYKINNNLDRDVEWIKFMEVSSPNLPDLVDGFDSQPSYFIEDKRLVVCSCNETGRAWIYVFGENKLISKTQIDSVVDLWPSHWTFIPSLVPVPRAQREEPAELQV

SEQ ID NO: 621 - DNA, 1191 bp, Arabidopsis thaliana
aacatgcctcctcatcattcatcatcacgatcaaaaatgccatagtacataaagtatccattaaaacgtagatctagtctcttcacaacacttcaactaataacgcaaaaatcagtttctctttgagtaagtgtttattacaattaaactaactcaggcaagtctatgatcatggcttcttctgctgctgcatcgatctctatgataactctaaggaacctctctcgcaatcatcaatctcaccaaagcacttttctcggtttctctagatccttccataaccaaaggatctcatctaacagtccaggtctctccacacgagcaagatccaccacttcctccactggaggtttcttcagaaccatttgcagcagcagtagcaatgactactccagaccaactaagatccaagagcttaacgtctacgagttcaacgaaggtgatcgaaacagtccagcggttttaaaactagggaaaaaaccagatcagctttgtctcggagatcttgtccccttcacaaacaaactctacacaggagatctcacaaaacgcataggaatcaccgcaggtctctgcgttttgatccaacatgttccagagaagaaaggtgatcgctttgaagcttcttacagtttctacttcggagattatggtcacatatcagttcaaggaccttatctcacttacgaggacacgtttcttgctatcaccggtggctccggtgtgtttgaaggagcttatggacaggtcaagcttcgtcagcttgtgtatcctacgaagctgttttacactttctacttgaaaggtgttgctgctgatttacctgtggagcttaccggaaaacatgttgagccgtcgaaggaagtgaaaccggcggctgaagctcaggcgactcagcccggcgctacgatcgctaactttactaattgaaatctaaatctttgtgggtgtctttgtcatggatcttattgggctgttgttcattgtgtttacattttaataatgggcctaaataatgagcctttgtattgggccgttctcgtaagcgtaatgtgtcccgtccctataagctggatttaagcgcgtgaactccaccttccgatatttttttttgatagattatatcaaatccatggatactttctatatttggaaagtttggcttagtaggctcgtggccatgtttgagct

SEQ ID NO: 622 - protein, 254 aa, Arabidopsis thaliana
MIMASSAAASISMITLRNLSRNHQSHQSTFLGFSRSFHNQRISSNSPGLSTRARSTTSSTGGFFRTICSSSSNDYSRPTKIQELNVYEFNEGDRNSPAVLKLGKKPDQLCLGDLVPFTNKLYTGDLTKRIGITAGLCVLIQHVPEKKGDRFEASYSFYFGDYGHISVQGPYLTYEDTFLAITGGSGVFEGAYGQVKLRQLVYPTKLFYTFYLKGVAADLPVELTGKHVEPSKEVKPAAEAQATQPGATIANFTN

SEQ ID NO: 623 - protein, 252 aa, Arabidopsis thaliana
MASSAAASISMITLRNLSRNHQSHQSTFLGFSRSFHNQRISSNSPGLSTRARSTTSSTGGFFRTICSSSSNDYSRPTKIQELNVYEFNEGDRNSPAVLKLGKKPDQLCLGDLVPFTNKLYTGDLTKRIGITAGLCVLIQHVPEKKGDRFEASYSFYFGDYGHISVQGPYLTYEDTFLAITGGSGVFEGAYGQVKLRQLVYPTKLFYTFYLKGVAADLPVELTGKHVEPSKEVKPAAEAQATQPGATIANFTN

SEQ ID NO: 624 - protein, 242 aa, Arabidopsis thaliana
MITLRNLSRNHQSHQSTFLGFSRSFHNQRISSNSPGLSTRARSTTSSTGGFFRTICSSSSNDYSRPTKIQELNVYEFNEGDRNSPAVLKLGKKPDQLCLGDLVPFTNKLYTGDLTKRIGITAGLCVLIQHVPEKKGDRFEASYSFYFGDYGHISVQGPYLTYEDTFLAITGGSGVFEGAYGQVKLRQLVYPTKLFYTFYLKGVAADLPVELTGKHVEPSKEVKPAAEAQATQPGATIANFTN

SEQ ID NO: 625 - DNA, 847 bp, Arabidopsis thaliana
ctcattttccaccattaaaaaacctctctactctctcctcaaaaactcaaaagagcaaaaaaaagagaagaagaatcaaaatcccacacaatggcaacacactcttccttcaccgcaacaacacctctctttctcatcgttcttctatccctatcctccgtctcagttctcggcgcatctcaccaccacgcaacggcgccggctccgtctgtagactgttcgactctcatactcaacatggctgactgtttatccttcgtttcgagcggaggcacggtggcgaaaccggaaggtacatgttgctctggtcttaagacggtgcttaaagctgactctcagtgtctatgtgaagcgtttaagagcagtgcttctcttggagttactttgaatatcactaaggcttctactcttcccgccgcatgcaagcttcacgctccttctatcgctacttgtggattgtctgttgctccaagtactgctccaggtcttgctccaggagtagctgctgctggacctgagacagccggatttctagctccaaatccttcttcagggaacgatggatcttctttgattccgacctcgttcacaactgtactcagtgccgtactgttcgttttgttcttctctagtgcgtaaaaaaaaacctgaatcttttttcaccagctagatttggctgtatgaaattgattaatggtttttattagggttaatctatgtatgttttggagtgttctgtttttagaccatatcggtttctctattactagcgtttactcttttagtttatgttattactttgtctcacaacattggtccttttattcgatctatcgcttattcctcc

SEQ ID NO: 626 - protein, 182 aa, Arabidopsis thaliana
MATHSSFTATTPLFLIVLLSLSSVSVLGASHHHATAPAPSVDCSTLILNMADCLSFVSSGGTVAKPEGTCCSGLKTVLKADSQCLCEAFKSSASLGVTLNITKASTLPAACKLHAPSIATCGLSVAPSTAPGLAPGVAAAGPETAGFLAPNPSSGNDGSSLIPTSFTTVLSAVLFVLFFSSA

SEQ ID NO: 627 - protein, 133 aa, Arabidopsis thaliana
MADCLSFVSSGGTVAKPEGTCCSGLKTVLKADSQCLCEAFKSSASLGVTLNITKASTLPAACKLHAPSIATCGLSVAPSTAPGLAPGVAAAGPETAGFLAPNPSSGNDGSSLIPTSFTTVLSAVLFVLFFSSA

SEQ ID NO: 628 - DNA, 797 bp, Arabidopsis thaliana
ggctccaaagagttttttttttggggcaatggcgtcgtcgctgcaaagctcggggatgttgacgaaagagcaaatggtttatctctttgatcgattcgattacttgacttcacaatctgatgtgaagaaacgaatctccgacgctgtggatgacaaacaggaagctgtagcggtaacaactgctattcaagaggagatattcttggagatggggattgacccgggatttggtattggctgcttgggaaagctgaactctgcatacgaaaacgataaagagttgatgattggtttctacaagtttctcgcaaaggaggagatggcatgtgaagaagctgagcttggacaagatggatttgaacagaaaatgaaagcactacaacaattacaagaacagcaactagagatgcttaagtatatgcgtaaattctctctggatgatcaatctgctatccttcaaaagcttcagaagcaattagaaaatgcgggttttgagccggaggcgtctcttttgtcaggagaggaaatggaggaagctggaagaagaagagtttcacctgtttttggaagcagatagcttttcagttctcacaagctacttcaatttctaatactcaagtcgctctctctattctcatgtcatctccatatacttaactctttaaacgtaaatgtacaagaaaaaaaccttgcctcatttgactctcaactgcattttcatgtgaagccatttttttataatgtatattggtagtaaactatatagttaataaaaaaaggaaaacaaaaaacaattt

SEQ ID NO: 629 - protein, 191 aa, Arabidopsis thaliana
APKSFFFGAMASSLQSSGMLTKEQMVYLFDRFDYLTSQSDVKKRISDAVDDKQEAVAVTTAIQEEIFLEMGIDPGFGIGCLGKLNSAYENDKELMIGFYKFLAKEEMACEEAELGQDGFEQKMKALQQLQEQQLEMLKYMRKFSLDDQSAILQKLQKQLENAGFEPEASLLSGEEMEEAGRRRVSPVFGSR

SEQ ID NO: 630 - protein, 182 aa, Arabidopsis thaliana
MASSLQSSGMLTKEQMVYLFDRFDYLTSQSDVKKRISDAVDDKQEAVAVTTAIQEEIFLEMGIDPGFGIGCLGKLNSAYENDKELMIGFYKFLAKEEMACEEAELGQDGFEQKMKALQQLQEQQLEMLKYMRKFSLDDQSAILQKLQKQLENAGFEPEASLLSGEEMEEAGRRRVSPVFGSR

SEQ ID NO: 631 - protein, 173 aa, Arabidopsis thaliana
MLTKEQMVYLFDRFDYLTSQSDVKKRISDAVDDKQEAVAVTTAIQEEIFLEMGIDPGFGIGCLGKLNSAYENDKELMIGFYKFLAKEEMACEEAELGQDGFEQKMKALQQLQEQQLEMLKYMRKFSLDDQSAILQKLQKQLENAGFEPEASLLSGEEMEEAGRRRVSPVFGSR

SEQ ID NO: 632 - DNA, 1077 bp, Arabidopsis thaliana
acaaccaatcccatctcttgtttcacttccgccctccatctttcttcgtgattgagagaatcttcaacgaaagaaagcaactttttttgggtgaaattcacagaacaaccaaggtttttcttcttcttcttcttctccagttcctacagaatcatgcctgacaagaacatcgtagaggacgttatcggtgatttggtggataacttcacggagactgttcagaagaacaaacatggttcctccttcttcgaacaagaagattccgtcagttctcgtttcaaccgtttgtttgatcgccagaagccaattcatcatgtcttaggcggtggcaaatctgctgatgtgttgttatggaggaacaagaagatctctgcaagtgttttgatgggagctaccgcaatttgggtgctttttgaatggatcaatttccatttcctgtctctcgtttgctatgccctcttgcttggtatgattgcacaattcgtttggtctaacgcctctggattcttaaaccgctcacagtctagagtgcctcgcctagttcttccaaaggatttctttgctgaagtcggtgtggccgttggaaaagaagttaaccgcggtttgttgtttcttcaggacttggcttgtaaagggaatttgaaacagttcctcatggctgtaatcggactatgggtagctgcaatggtcgggagctgttgcaatttcctaactgttttgtatatcgggtttgttggggcacacacaatgccggttctgtatgagagatacgaagacgaagtggatggttttatggattctatgatcatgaagtttcatagtcattacaagaagcttgatactgggtttctcagtagaatcccaagtggaaagtttggattaaagaagcgtgagtgactaaatcactcaagcattttcttattttaccttgtttgttgttagaacaatatggattatggtttgctaaatgaatgttttgagaatattattcattcatgtagattttgtgtatttccttactaaacaataccttgtccatgtatttgtcaataccttggttaataagagaatcatcat

SEQ ID NO: 633 - protein, 247 aa, Arabidopsis thaliana
MPDKNIVEDVIGDLVDNFTETVQKNKHGSSFFEQEDSVSSRFNRLFDRQKPIHHVLGGGKSADVLLWRNKKISASVLMGATAIWVLFEWINFHFLSLVCYALLLGMIAQFVWSNASGFLNRSQSRVPRLVLPKDFFAEVGVAVGKEVNRGLLFLQDLACKGNLKQFLMAVIGLWVAAMVGSCCNFLTVLYIGFVGAHTMPVLYERYEDEVDGFMDSMIMKFHSHYKKLDTGFLSRIPSGKFGLKKRE

SEQ ID NO: 634 - protein, 170 aa, Arabidopsis thaliana
MGATAIWVLFEWINFHFLSLVCYALLLGMIAQFVWSNASGFLNRSQSRVPRLVLPKDFFAEVGVAVGKEVNRGLLFLQDLACKGNLKQFLMAVIGLWVAAMVGSCCNFLTVLYIGFVGAHTMPVLYERYEDEVDGFMDSMIMKFHSHYKKLDTGFLSRIPSGKFGLKKRE

SEQ ID NO: 635 - protein, 142 aa, Arabidopsis thaliana
MIAQFVWSNASGFLNRSQSRVPRLVLPKDFFAEVGVAVGKEVNRGLLFLQDLACKGNLKQFLMAVIGLWVAAMVGSCCNFLTVLYIGFVGAHTMPVLYERYEDEVDGFMDSMIMKFHSHYKKLDTGFLSRIPSGKFGLKKRE

SEQ ID NO: 636 - DNA, 797 bp, Arabidopsis thaliana
aaattactacacgcagagctagacacacacttatatcaactgatcttctcccaaagcctgagaataaagaaaaacctccatctttttacatatatagataatcatcaaagaagatgaagatgatgaaggtgatgatgttgatcgtgatgatgatgatggtgatggtgatggtgagtgaaggaagtataatagagccaacatgtaaagagacaccagacttcaatctttgtgtgtctctccttaactccgatccacgtggttcctctgccgacacttctggcctcgctctcatcctcattgataaaatcaagggcctggcaacaaaaactttgaacgagatcaacggtctatataagaagagaccagaactaaaacgggctttggatgaatgtagtcgaagatacaaaacgatcttaaacgctgatgttcccgaagccattgaagctatctctaaaggagtccccaaattcggcgaagacggtgtgatcgacgccggtgtcgaagcttctgtttgtcaaggagggtttaatgggagttctccgttgactagtttgactaaatcaatgcaaaaaatctctaatgtgactagagccattgtgagaatgttgctttgatttaatcgtatgtttttatacaagcatgtgtttatcgatgtttaatgggattttaccattcataaaaatttataaaatttgaagataaagcatagatcttttagtttatttctcattcataaaaatgtgattttccctttttaaatttgtaaacaattgtttattttgggcaaattataaatt

SEQ ID NO: 637 - protein, 166 aa, Arabidopsis thaliana
MKMMKVMMLIVMMMMVMVMVSEGSIIEPTCKETPDFNLCVSLLNSDPRGSSADTSGLALILIDKIKGLATKTLNEINGLYKKRPELKRALDECSRRYKTILNADVPEAIEAISKGVPKFGEDGVIDAGVEASVCQGGFNGSSPLTSLTKSMQKISNVTRAIVRMLL

SEQ ID NO: 638 - protein, 164 aa, Arabidopsis thaliana
MMKVMMLIVMMMMVMVMVSEGSIIEPTCKETPDFNLCVSLLNSDPRGSSADTSGLALILIDKIKGLATKTLNEINGLYKKRPELKRALDECSRRYKTILNADVPEAIEAISKGVPKFGEDGVIDAGVEASVCQGGFNGSSPLTSLTKSMQKISNVTRAIVRMLL

SEQ ID NO: 639 - protein, 163 aa, Arabidopsis thaliana
MKVMMLIVMMMMVMVMVSEGSIIEPTCKETPDFNLCVSLLNSDPRGSSADTSGLALILIDKIKGLATKTLNEINGLYKKRPELKRALDECSRRYKTILNADVPEAIEAISKGVPKFGEDGVIDAGVEASVCQGGFNGSSPLTSLTKSMQKISNVTRAIVRMLL

SEQ ID NO: 640 - DNA, 928 bp, Arabidopsis thaliana
ataaatacgctttctacattttcggatcgttgaacaacatctctctctctctctctctaaacccattagagtaatttagctcctcatagattctcgagaagaacacttccatggcgactaaagtatatatcgtgtactactctatgtatggtcatgttgagaaattggctgaagaaataaggaaaggagctgcttctgttgaaggtgttgaagctaaactatggcaggtaccagagacgcttcacgaagaggcactctctaagatgagcgcaccaccaaagagtgaatccccaatcataaccccgaatgagctagctgaagctgatgggtttgtctttggtttcccaacaagatttggtatgatggctgctcagttcaaagcctttttggatgcaaccggtggactctggagggctcaggcactcgccggtaaaccagctggtatcttctacagcactggctctcaaggtggtggccaagaaaccacagcattgacggcaataactcagctggttcaccacgggatgttatttgtcccaatcggttacacatttggcgcgggaatgttcgaaatggagaatgtgaaaggtggaagcccatatggagctggaacatttgcaggagacggttcaaggcagccaacagagctggagctacagcaagcatttcaccaaggccagtacattgccagcatcaccaagaagctcaagggatctactgcttagagcttaaaaagattatggtatcaataagaaaaaaagaaaaaaacagtttggttctgcttttttttatattctttctctttgaatttgggggcttttgtgatttttcgggtttaattatcttaaaatacatgatattatttcacagcaataattcttatcttggttttacgtatagatgataatgtatgatttgtacttgtgtc

SEQ ID NO: 641 - protein, 204 aa, Arabidopsis thaliana [sequence omitted]

SEQ ID NO: 642 - protein, 193 aa, Arabidopsis thaliana
MYGHVEKLAEEIRKGAASVEGVEAKLWQVPETLHEEALSKMSAPPKSESPIITPNELAEADGFVFGFPTRFGMMAAQFKAFLDATGGLWRAQALAGKPAGIFYSTGSQGGGQETTALTAITQLVHHGMLFVPIGYTFGAGMFEMENVKGGSPYGAGTFAGDGSRQPTELELQQAFHQGQYIASITKKLKGSTA

SEQ ID NO: 643 - protein, 153 aa, Arabidopsis thaliana
MSAPPKSESPIITPNELAEADGFVFGFPTRFGMMAAQFKAFLDATGGLWRAQALAGKPAGIFYSTGSQGGGQETTALTAITQLVHHGMLFVPIGYTFGAGMFEMENVKGGSPYGAGTFAGDGSRQPTELELQQAFHQGQYIASITKKLKGSTA

SEQ ID NO: 644 - DNA, 933 bp, Arabidopsis thaliana
aacatttcgtgcgaaatttcaatttttttgcaatatcctttattgattgaccgaagatattttacaagcctttctccactaagcccttctctcttcttctcttggcctctcacttgaatctcccacaaagcgatcaatcacaaattccttcttctctctctctcttttcgtccctaagaatcaattatgaaaggagctaaatcaaagactgaaaccaggagctccaagctctctgtgaccaagaagccggctaaaggagcagggcgtggcaaagctgctgctaaggaccccaacaaaccaaagaggccagccagtgctttcttcgttttcatggaagatttccgtgagactttcaagaaggaaaaccccaagaacaagtctgtagctactgttggaaaagctgctggagacaagtggaagtccttgtctgattctgagaaagctccttatgttgctaaggctgagaaacgcaaggttgaatatgagaagaacattaaagcttacaacaagaaactggaggaaggtccaaaagaagatgaggaatctgacaagtcagtgtcagaggtcaatgacgaggatgatgctgaggatggtagtgaagaggaggaggacgatgactaagaagctgaatgttggtagcattagtatagatggctgcaaaaatctctctgtttttatctttacttgaaatgttaacggggctgattaaaatgggtctttctttttatctttttatatttccacaatctctcactaaagccctctgaatggagaaagtgaattgtagaatgtttagatggtgaaagagagacttgcagctctgtactctttgctttataaaacgatttagttttcttttctcagtttattatattgttgaattgatgatgatgttagctaaatctctttgtactttgtaaaagaaatggtccc

SEQ ID NO: 645 - protein, 144 aa, Arabidopsis thaliana
MKGAKSKTETRSSKLSVTKKPAKGAGRGKAAAKDPNKPKRPASAFFVFMEDFRETFKKENPKNKSVATVGKAAGDKWKSLSDSEKAPYVAKAEKRKVEYEKNIKAYNKKLEEGPKEDEESDKSVSEVNDEDDAEDGSEEEEDDD

SEQ ID NO: 646 - protein, 96 aa, Arabidopsis thaliana
MEDFRETFKKENPKNKSVATVGKAAGDKWKSLSDSEKAPYVAKAEKRKVEYEKNIKAYNKKLEEGPKEDEESDKSVSEVNDEDDAEDGSEEEEDDD

SEQ ID NO: 647 - protein, 79 aa, Arabidopsis thaliana
MLLRLRNARLNMRRTLKLTTRNWRKVQKKMRNLTSQCQRSMTRMMLRMVVKRRRTMTKKLNVGSISIDGCKNLSVFIFT

SEQ ID NO: 648 - DNA, 1835 bp, Arabidopsis thaliana
aatccattattattctatcgaacttatctttttaaaagcttccgcgttacgccatcacttctccaccatttaaatacctaaaccactttctttcaaatttcttattccataaaaagtaaattcacaacaaaaccaaaaaaaaaaaagagaagaagaattagcttacgtgttcatcacatctgcattacgcgcaaacgaaacagattcaaattctccggcgaagttttcttattcatcaatcaatctctggattcatcaatcatgccagagatcgagattgccgccggcagcggcgacaacaacgacgccttattcggtaaatatgagctcggaaagcttctcggatgcggcgcattcgccaaagtcttccacgcacgtgatcgtcgtaccggccaaagcgtcgccgtgaaaatcctcaacaagaaaaaactcctcacaaatccagctctagccaacaacatcaaacgcgagatctcaatcatgagaagattatctcatccaaacatcgtcaagctccacgaagtaatggcgacaaaatcaaagatcttcttcgcaatggagtttgttaaaggaggagaactattcaacaaaatctcaaaacatggacgtcttagcgaagatttaagccggagatatttccagcaactgatctccgccgttggttattgccacgctcgcggtgtttaccaccgcgatctcaaaccagagaatctattaatagacgaaaacggaaacttaaaagtttccgatttcggtctaagcgcgttaacggatcagatccgacccgatgggttgttacataccttgtgtggtactccggcgtacgttgcgccggagattctatctaaaaaaggatatgaaggtgctaaagttgatgtatggtcttgtggaatcgtcttgttcgttctcgtcgccggttatttaccgtttaacgatccgaatgtgatgaatatgtataagaagatttataaaggagagtatcgttttcctcgttggatgtctccagatctgaaacgattcgtttctcgtcttttagatattaatcctgagactagaatcaccattgatgagattttgaaagatccttggtttgttagaggaggttttaaacagatcaagttccacgatgacgagatcgaagatcagaaagtggaatcgtcactagaagctgtgaagagtttaaacgcgtttgatttgatttcttactcgtcgggattggatttgtcgggattgtttgctggttgtagtaattcgagtggtgaatcggagaggtttttatcggaaaagtcgccggagatgttggcggaggaagtggaggggtttgcgagagaggagaatctgaggatgaagaagaagaaggaggaagagtatgggtttgagatggaggggcaaaatgggaaatttggtatcgggatttgtatttcgcggttgaatgatttgcttgtggtggtggaggcacggcggagaggtggtgatggtgattgttataaggagatgtggaatggtaaactcagggttcaacttattcgcgtttgcgatcagacgtcgtcaacaaacgcggctatttaaaagaacgctatgaagttttctaccgtgctttcaattttaaaacgccaatcgcgtttcgttggttggatttggtttctactacttttgtttcggaattaaaaacagagaaaaaataataaaaattaatgtatgtatttaaatactgtaccaaattgtaggtatctattttgtgctttttgatcaatgtgttactatgtacaacaacaagtctaaaattgcatttgtagatacttcactcttttgtataatgtagaaaatgttcttct

SEQ ID NO: 649 - protein, 435 aa, Arabidopsis thaliana
MPEIEIAAGSGDNNDALFGKYELGKLLGCGAFAKVFHARDRRTGQSVAVKILNKKKLLTNPALANNIKREISIMRRLSHPNIVKLHEVMATKSKIFFAMEFVKGGELFNKISKHGRLSEDLSRRYFQQLISAVGYCHARGVYHRDLKPENLLIDENGNLKVSDFGLSALTDQIRPDGLLHTLCGTPAYVAPEILSKKGYEGAKVDVWSCGIVLFVLVAGYLPFNDPNVMNMYKKIYKGEYRFPRWMSPDLKRFVSRLLDINPETRITIDEILKDPWFVRGGFKQIKFHDDEIEDQKVESSLEAVKSLNAFDLISYSSGLDLSGLFAGCSNSSGESERFLSEKSPEMLAEEVEGFAREENLRMKKKKEEEYGFEMEGQNGKFGIGICISRLNDLLVVVEARRRGGDGDCYKEMWNGKLRVQLIRVCDQTSSTNAAI

SEQ ID NO: 650 - protein, 362 aa, Arabidopsis thaliana
MRRLSHPNIVKLHEVMATKSKIFFAMEFVKGGELFNKISKHGRLSEDLSRRYFQQLISAVGYCHARGVYHRDLKPENLLIDENGNLKVSDFGLSALTDQIRPDGLLHTLCGTPAYVAPEILSKKGYEGAKVDVWSCGIVLFVLVAGYLPFNDPNVMNMYKKIYKGEYRFPRWMSPDLKRFVSRLLDINPETRITIDEILKDPWFVRGGFKQIKFHDDEIEDQKVESSLEAVKSLNAFDLISYSSGLDLSGLFAGCSNSSGESERFLSEKSPEMLAEEVEGFAREENLRMKKKKEEEYGFEMEGQNGKFGIGICISRLNDLLVVVEARRRGGDGDCYKEMWNGKLRVQLIRVCDQTSSTNAAI

SEQ ID NO: 651 - protein, 347 aa, Arabidopsis thaliana
MATKSKIFFAMEFVKGGELFNKISKHGRLSEDLSRRYFQQLISAVGYCHARGVYHRDLKPENLLIDENGNLKVSDFGLSALTDQIRPDGLLHTLCGTPAYVAPEILSKKGYEGAKVDVWSCGIVLFVLVAGYLPFNDPNVMNMYKKIYKGEYRFPRWMSPDLKRFVSRLLDINPETRITIDEILKDPWFVRGGFKQIKFHDDEIEDQKVESSLEAVKSLNAFDLISYSSGLDLSGLFAGCSNSSGESERFLSEKSPEMLAEEVEGFAREENLRMKKKKEEEYGFEMEGQNGKFGIGICISRLNDLLVVVEARRRGGDGDCYKEMWNGKLRVQLIRVCDQTSSTNAAI

SEQ ID NO: 652 - DNA, 1378 bp, Arabidopsis thaliana
atgctagttccaaacaaacggtttcattatcttctccaattccaaatgtggtgtctaccatctgttcgaccaaatgtctctgagatgttcttcaagtccccaatgctcaaacccactgctagattctcctccacttcgtctccctatcttcctccttccttcagcgtcgccccgatgatggattggacagataatcattaccggacgcttgctcgtctcataacaaagcacgcttggctttacactgaaatgattgcagctgaaacccttgttcaccagcagaccaatttggacaggttcttagcgttttctccccaacaacatcctattgttctccaacttggtggtagcaatgtggaaaaccttgcaaaggctgctaagctttctgatgcttacggatacgacgaaattaatctcaactgcgggtgccccagtcctaaggtagccggtcatggatgctttggtgttagcctcatgctcaaacctaagcttgttggagaggcaatgtctgccattgctgccaataccaacgtccctgttactgtgaaatgtcgaattggtgtagacaatcatgattcgtatgatgagctctgtgactttatctacaaggtttctactctatcacctaccagacatttcattgtacattcacgcaaggcactgctcggtgggataagccctgctgataaccggagaatcccacctctaaattcaggtatgagtattactatgccctcgtgcgtgacttcccggacttgagattcactattaatggaggcattacttctgtttcaaaggtaaacgctgcactgaaggaaggagctcatggagtcatggtaggacgtgctgcatacaacaacccatggcagacgctaggacatgttgacactgcagtttatggtgtaccaagcagtggccttacacgccgacaggttcttgagcaatatcaagtatatggagattctgtgttaggaacacatggaaacgggaggcctaatgtgagggatttggtgaagcctctgctaaaccttttccattcagaaaatgcaaatagcttgtggaagcggagagcagacgcagctttcaaggagtgcaggagtgttggatcgttgctggaagaaagcttgagggcgatcccggactgtgtcttagattcacccatatctgggagtccagagagcggagacgaagatgtgttcgcagatgtgcacaatgtattgcccccaccatacgaagctggagaagaaatcatcttatgcgcttagttgtcgtttgtaatctgtgtttgtgattgtctctgtcgattaaaattgtaaattgaacggggcttacttcaagtggttgttagtcttgggctcgtgtatgggcttttttgttg

SEQ ID NO: 653 - protein, 252 aa, Arabidopsis thaliana
MLVPNKRFHYLLQFQMWCLPSVRPNVSEMFFKSPMLKPTARFSSTSSPYLPPSFSVAPMMDWTDNHYRTLARLITKHAWLYTEMIAAETLVHQQTNLDRFLAFSPQQHPIVLQLGGSNVENLAKAAKLSDAYGYDEINLNCGCPSPKVAGHGCFGVSLMLKPKLVGEAMSAIAANTNVPVTVKCRIGVDNHDSYDELCDFIYKVSTLSPTRHFIVHSRKALLGGISPADNRRIPPLNSGMSITMPSCVTSRT

SEQ ID NO: 654 - protein, 237 aa, Arabidopsis thaliana
MWCLPSVRPNVSEMFFKSPMLKPTARFSSTSSPYLPPSFSVAPMMDWTDNHYRTLARLITKHAWLYTEMIAAETLVHQQTNLDRFLAFSPQQHPIVLQLGGSNVENLAKAAKLSDAYGYDEINLNCGCPSPKVAGHGCFGVSLMLKPKLVGEAMSAIAANTNVPVTVKCRIGVDNHDSYDELCDFIYKVSTLSPTRHFIVHSRKALLGGISPADNRRIPPLNSGMSITMPSCVTSRT

SEQ ID NO: 655 - protein, 224 aa, Arabidopsis thaliana
MFFKSPMLKPTARFSSTSSPYLPPSFSVAPMMDWTDNHYRTLARLITKHAWLYTEMIAAETLVHQQTNLDRFLAFSPQQHPIVLQLGGSNVENLAKAAKLSDAYGYDEINLNCGCPSPKVAGHGCFGVSLMLKPKLVGEAMSAIAANTNVPVTVKCRIGVDNHDSYDELCDFIYKVSTLSPTRHFIVHSRKALLGGISPADNRRIPPLNSGMSITMPSCVTSRT

SEQ ID NO: 656 - DNA, 548 bp, Arabidopsis thaliana
aaaaaaaatcaaaactttagggtttcagagcaaactctgtcttcttcaagccgagagcgaaaaccctaagctcaattccgattttgcaactatgagtcgttcaggtcagcctccggatcttaagaagtacatggataagaagctccaaatcaagcttaatgctaaccgaatggttactggaactcttcgtgggtttgatcagttcatgaatcttgttgtggataacactgttgaggtgaacggtaacgacaaaaccgacatcgggatggtggtgattagaggaaacagcattgtcactgttgaagctcttgaaccagtgggcagatcttcttagctcgttatattcattggttatgatctttttgtactaagcactagctatgagaaatcttggtggtagattcgcagttacgatgaattgattctgtaagaagtctacatgaatactcttttcttgtactaaaaagattgcaatgaacccccaccgatgaatgtgatggcttgtacttttcactcttgatacaatgctcaaacctctattagtcatc

SEQ ID NO: 657 - protein, 110 aa, Arabidopsis thaliana
KKIKTLGFQSKLCLLQAESENPKLNSDFATMSRSGQPPDLKKYMDKKLQIKLNANRMVTGTLRGFDQFMNLVVDNTVEVNGNDKTDIGMVVIRGNSIVTVEALEPVGRSS

SEQ ID NO: 658 - protein, 80 aa, Arabidopsis thaliana
MSRSGQPPDLKKYMDKKLQIKLNANRMVTGTLRGFDQFMNLVVDNTVEVNGNDKTDIGMVVIRGNSIVTVEALEPVGRSS

SEQ ID NO: 659 - protein, 67 aa, Arabidopsis thaliana
MDKKLQIKLNANRMVTGTLRGFDQFMNLVVDNTVEVNGNDKTDIGMVVIRGNSIVTVEALEPVGRSS

SEQ ID NO: 660 - DNA, 946 bp, Arabidopsis thaliana
agtaagtcatcatcactcagatctagtagttccacaaactcacattgggtcggatcgttgaccagaaaaacacacagagaaaggagaaaaacatgaaggagttggcgcatccgtacgttccgagagatctgaacctacccggatacgtaccaatctcaatgtcaatgtcctccatcgtctctatctacctcggttcttccctccttgttgtctccctcgtctggcttctcttcgggaggaagaaagctaaacttgataagttgcttatgtgttggtggacattcactggtctcactcatgttattctcgagggctatttcgttttctcccctgagtttttcaaggacaacacttctgcttatcttgctgaagtttggaaagaatatagcaaaggtgattcgagatacgtaggtagagattctgcagttgtatctgttgaagggatcactgctgttatcgttggcccagcttctctcctagctatttatgccattgctaaggagaagtcgtatagctacgtgcttcagcttgcgatttcggtttgccagctctacggatgtttggtttatttcattactgctatcttggaaggagacaactttgccacaaactctttctactattactcctactacatcggggctaactgttggtgggtcttgataccttcactcatttctttccgttgctggaaaaagatttgtgcagctgctgccattgccaacaacaacgtcgagacaaagacgaagaagaaaacccgttgaagcaaggatcaaactctcttttatctcttcaggttactgctgctatagcaaatgaacatgagtctccttttgcggataatttatccattttaaaaactttagctatgttgtctgtctctcttacagcaataaacttgtgaggataatttatccatttttcatatgatatttgcgcttttgtt

SEQ ID NO: 661 - protein, 223 aa, Arabidopsis thaliana
MKELAHPYVPRDLNLPGYVPISMSMSSIVSIYLGSSLLVVSLVWLLFGRKKAKLDKLLMCWWTFTGLTHVILEGYFVFSPEFFKDNTSAYLAEVWKEYSKGDSRYVGRDSAVVSVEGITAVIVGPASLLAIYAIAKEKSYSYVLQLAISVCQLYGCLVYFITAILEGDNFATNSFYYYSYYIGANCWWVLIPSLISFRCWKKICAAAAIANNNVETKTKKKTR

SEQ ID NO: 662 - protein, 201 aa, Arabidopsis thaliana
MSMSSIVSIYLGSSLLVVSLVWLLFGRKKAKLDKLLMCWWTFTGLTHVILEGYFVFSPEFFKDNTSAYLAEVWKEYSKGDSRYVGRDSAVVSVEGITAVIVGPASLLAIYAIAKEKSYSYVLQLAISVCQLYGCLVYFITAILEGDNFATNSFYYYSYYIGANCWWVLIPSLISFRCWKKICAAAAIANNNVETKTKKKTR

SEQ ID NO: 663 - protein, 199 aa, Arabidopsis thaliana
MSSIVSIYLGSSLLVVSLVWLLFGRKKAKLDKLLMCWWTFTGLTHVILEGYFVFSPEFFKDNTSAYLAEVWKEYSKGDSRYVGRDSAVVSVEGITAVIVGPASLLAIYAIAKEKSYSYVLQLAISVCQLYGCLVYFITAILEGDNFATNSFYYYSYYIGANCWWVLIPSLISFRCWKKICAAAAIANNNVETKTKKKTR

SEQ ID NO: 664 - DNA, 963 bp, Arabidopsis thaliana
acctgaagagttgagagctgacgtattgggagcatttccttcacacaggagacaacagtcatcatcagatgttcccaaggagacttgtaagaaacaagatgaggaaccaatagatttaaagggcactgagaatgagattggattatcatttagctctctttggtttgggaatcctcctctttggacagagaagttcaaagttagtggcaattgtactatggaaaaactttcagcgatatacttcaaggttgctcagtcaaggcccatgttatccctagtcctgcaacacgctatttcagaaatgagtagttttcctgatgcagcaagtgccagtgatttggacaaagctatttacgatgtgtgtgaacttcttaaacagtacattaacctcaaggtaggaggtgatattgaggagatatatctctgcttccgacttctgaaaagattagcagcaaggagccagcttttcctacaagtctatgagatattgtctccctttattcaggcctcgatcagtgaacactatggaggaagcttgagtataccatgaaaggtcttcactgaggttggactgaagtctggctggatgctataaaagaatgtatacttgcaggacaatgtggattctgaagggcatcatggtgaacgcacacggacaatacacgaagcagcttaagcaaaccaaactcgggaagatttttgggcaatagaaggctagctgctgcaaatccgcgtgtgaaatggagtctcgaaagcacttattgttgcatttgcacaatgagatatggaagtgattcaaatctcaaagtgcagagccattaggagccactgcttttctctgttcatagaaatgtaactgaacttgataatcatttcttcccatgacacgagctaatatatcacctagttccttgttcatgaattgtctttatttttaaaaacgataatttattctctggatgt

SEQ ID NO: 665 - protein, 182 aa, Arabidopsis thaliana
PEELRADVLGAFPSHRRQQSSSDVPKETCKKQDEEPIDLKGTENEIGLSFSSLWFGNPPLWTEKFKVSGNCTMEKLSAIYFKVAQSRPMLSLVLQHAISEMSSFPDAASASDLDKAIYDVCELLKQYINLKVGGDIEEIYLCFRLLKRLAARSQLFLQVYEILSPFIQASISEHYGGSLSIP

SEQ ID NO: 666 - protein, 110 aa, Arabidopsis thaliana
MEKLSAIYFKVAQSRPMLSLVLQHAISEMSSFPDAASASDLDKAIYDVCELLKQYINLKVGGDIEEIYLCFRLLKRLAARSQLFLQVYEILSPFIQASISEHYGGSLSIP

SEQ ID NO: 667 - protein, 94 aa, Arabidopsis thaliana
MLSLVLQHAISEMSSFPDAASASDLDKAIYDVCELLKQYINLKVGGDIEEIYLCFRLLKRLAARSQLFLQVYEILSPFIQASISEHYGGSLSIP

SEQ ID NO: 668 - DNA, 589 bp, Arabidopsis thaliana
aaacacacaactaacaaacaaaaaaacacaaatcttggttcatttaaaatctctccaagaaacaaaatggcagcttccatgaaatttctctgcattcttggtctgattctcctcatcggaacagtcgttgacggtgcaggggagtgtggtagatcttcgccagacaatgaggcgatgaagctggctccatgtgctggtgcagctcaggacgctaactccgccgtgccaggaggttgctgtactcagattaagagattttctcaaaaccctaaatgtctctgcgccattcttctttccgacacggccaaagcctccggtgtcgatcctgaggttgcccttaccatccctaaacggtgcaatttcgctaaccgtcccgtcggttacaagtgtggagcatacacacttccataaaatgttgacgattagaaggatgaaggagataacattgggccttatgtggaagcttggagtttactactacgtctccatgtaccttataatatatgaataacgataatgtttatatgtgtatcagtgtgattgttgttattgaacctatatcaataaatatataaaaatgattccactc

SEQ ID NO: 669 - protein, 136 aa, Arabidopsis thaliana
KHTTNKQKNTNLGSFKISPRNKMAASMKFLCILGLILLIGTVVDGAGECGRSSPDNEAMKLAPCAGAAQDANSAVPGGCCTQIKRFSQNPKCLCAILLSDTAKASGVDPEVALTIPKRCNFANRPVGYKCGAYTLP

SEQ ID NO: 670 - protein, 114 aa, Arabidopsis thaliana
MAASMKFLCILGLILLIGTVVDGAGECGRSSPDNEAMKLAPCAGAAQDANSAVPGGCCTQIKRFSQNPKCLCAILLSDTAKASGVDPEVALTIPKRCNFANRPVGYKCGAYTLP

SEQ ID NO: 671 - protein, 110 aa, Arabidopsis thaliana
MKFLCILGLILLIGTVVDGAGECGRSSPDNEAMKLAPCAGAAQDANSAVPGGCCTQIKRFSQNPKCLCAILLSDTAKASGVDPEVALTIPKRCNFANRPVGYKCGAYTLP

SEQ ID NO: 672 - DNA, 3811 bp, Arabidopsis thaliana
gctggaactgatttttttcttctctctctctctctctcttccttctgggcttctagggtttgtcctctccagtccccgatttccgctttatccgatcggccgccgccgagattctagataaacctatggcaatggaggttacgcagttgctcattaatgctcagtcgattgatggaactgtacgtaagcacgcggaagaaagtcttaagcagtttcaggagcaaaaccttgcgggtttcttgttgtcgcttgctggagagcttgcgaatgatgagaagccagtagatagcaggaaattagctggtttagtccttaaaaatgctcttgatgctaaggaacaacacaggaagtatgagcttgttcagagatggttggctctagacatgtcaacaaagtcgcagatcagagctttcttgttgaagacactgtcggcacctgtgcctgatgttcgttcgactgcatctcaggtcattgctaaggttgcaggtattgagttaccacagaagcagtggcctgagctcatagtgtctcttctctcaaatattcaccagttacctgctcatgtcaagcaagccactttggagactcttggatacctatgtgaagaagtgtcacctgatgttgttgaacaggagcatgtaaataagatactcacagctgttgttcagggtatgaatgctgctgaaggtaatactgatgttagacttgctgcaacccgtgctttatacatggctctcggattcgcccaagcaaatttcaacaacgacatggagcgtgattatatcatgagagttgtgtgtgaagcaaccctgtcccctgaggtgaaaattaggcaggcagcttttgagtgtttggtatctatcgcttccacatactatgagaagttggcgcattacatgcaagatatattcaacatcacagctaaggctgtaagagaagatgacgagtctgttgctctacaggcaattgagttctggagttctatttgtgacgaagagattgacatcttagaagaatatggtggtgagttcgctggggattctgatgttccatgcttttattttactaagcaggctctccctggtcttgtgcctctactgctggagactcttctgaagcaagaagaagatcaagatttggatgaaggggcttggaatattgcaatggcaggtgggacatgcctcggtttggttgctagggcagttggagatgacattgttccacatgtcatgccgtttattgaagagaaaatatcaaagcctgattggagagagcgagaagctgcaacttatgcttttggttccattttggaaggcccttctgccgataagttgatggcaattgttaacgcagcgttaacatttatgctcaatgctctaacaaatgacccaagcaaccatgtgaaagacacaaccgcatggacccttggtcggatatttgagttccttcatggttcaacaatcgagacacctattattaatcaggcaaactgccagcagataatcacagtactcatccagagcatgaatgatgcgcctaatgttgccgagaaggcttgtggggctctgtacttccttgctcaaggctatgaggatatcggtcccagttctccgttaacacccttcttccaggaaattattaagtcacttttagctgttgcacacagagaggatgcaactgaatcacgcttgcggactgcagcatatgaggcattgaatgaagttgtcaggtgttcaactgatgaaacgtctaccatggttctgcaattagtaccagtgataatgatggagcttcacaatactttggaaggggaaaagctttcattggatgagagggagaaacaaaacgagttgcagggacttctatgtggatgcttgcaggtcatcatacagaaattaggatctgaaccaaccaagtctaagttcatggagtatgcagaccaaatgatgggacttttcctgagggtgtttggttgtagaagtgcaactgcacatgaggaagccatgcttgccattggtgctcttgcttatgcagcaggtcccaattttgccaaatacatgcctgagttttataagtacttggagatgggtcttcaaaactttgaagaataccaagtgtgtgctgttactgttggtgttgttggggatgtctgcagagcattggaggacaagattttaccttattgcgatgggattatgacacagcttctgaaagatttgtcgagcaaccaattgcaccgatcagtgaagccaccgatattctcctgttttggtgacatagcacttgctatcggtgaggattttgataagtactggaggtattcaatgccgatgcttcagagtgccgcagagttatctgctcactcggctggagctgatgatgaaatgacggagtacacaaactcattgagaaacggaatccttgaggcttattcaggcatatttcaaggtttcaagaactccgccaaaacccagctcctgattcctttcgcaccccatatcctccagtttttggacagtatatacatggagaaagacatggacgaggtggtgatgaagacagcgattggggtcttaggagatttagcagatacactagggagtcatgtgggtggtttgatacaacagtcagtgtcaagtaaagagttcttaaacgaatgtttgtcttctgaagaccacacaattaaagaagcagccgaatgggcgaagcatgccataacccgtgccatatctgtttgaaggctcttcttttgcctataagaaagaaaattccttttgctttttagtaaagtctgcatgcatctctgggtgggttgagtcggtcggggggaggggtagagctgcaacatccgagtcacatcagcatcatcagcatcagtttcatttgcatcatcagcataactggggtcagtcagggaatcgttgagtcgtggatgtggggaatgatgagttttggggtaaataatgaaactggaagagtcacgggtgaaagtttcccgggtaaggttaaatccccgggagtagaaagaggaggaagtgagtcatggtcgttttctggtgggttttgggacaaagttataccaaaaaaaaaaaggtttcatggaacatctcataatacattcttgttttttcttttctctcatatgttcttcaaccccttgaggagggagaggtctcaggtttttatcaagtgggggcattattagaggacaatcccttgattttttcttttgttttcttttattatttggttagttgcagtctttgcatcatcattttgtcttttgggggggtttgtatgtttgattaaaagcattattcacatttttatttttatataaagaagtttcacatgtctgtctatcttctctttgctatgatgcagtttagggggttttgcatatatacttgtgttttgtttgcaatcaagtttcaaatgtcacatacaggaacatttttattatatggtgtcatgtcttagggtcttaaagaggtccacatctattcattttactatggaactgtttacaatcgtttagaatccattatttgatttggctcgaactatatgggaaagggcacatgttaataggagaaaacgtcctgccttactctgcttccaaagagtcaagttaagagatcgaagaacatttcacattcacgctgtttatggaaacctcaattttgattgtatgtgttgcttttttttggttttccaaacgccaaatgcaactgataccgaacctatattttgaaaaatgttttcatgtgtatttgaaacattctagaccattcaagttatggtttaaact

SEQ ID NO: 673 - protein, 870 aa, Arabidopsis thaliana
MAMEVTQLLINAQSIDGTVRKHAEESLKQFQEQNLAGFLLSLAGELANDEKPVDSRKLAGLVLKNALDAKEQHRKYELVQRWLALDMSTKSQIRAFLLKTLSAPVPDVRSTASQVIAKVAGIELPQKQWPELIVSLLSNIHQLPAHVKQATLETLGYLCEEVSPDVVEQEHVNKILTAVVQGMNAAEGNTDVRLAATRALYMALGFAQANFNNDMERDYIMRVVCEATLSPEVKIRQAAFECLVSIASTYYEKLAHYMQDIFNITAKAVREDDESVALQAIEFWSSICDEEIDILEEYGGEFAGDSDVPCFYFTKQALPGLVPLLLETLLKQEEDQDLDEGAWNIAMAGGTCLGLVARAVGDDIVPHVMPFIEEKISKPDWREREAATYAFGSILEGPSADKLMAIVNAALTFMLNALTNDPSNHVKDTTAWTLGRIFEFLHGSTIETPIINQANCQQIITVLIQSMNDAPNVAEKACGALYFLAQGYEDIGPSSPLTPFFQEIIKSLLAVAHREDATESRLRTAAYEALNEVVRCSTDETSTMVLQLVPVIMMELHNTLEGEKLSLDEREKQNELQGLLCGCLQVIIQKLGSEPTKSKFMEYADQMMGLFLRVFGCRSATAHEEAMLAIGALAYAAGPNFAKYMPEFYKYLEMGLQNFEEYQVCAVTVGVVGDVCRALEDKILPYCDGIMTQLLKDLSSNQLHRSVKPPIFSCFGDIALAIGEDFDKYWRYSMPMLQSAAELSAHSAGADDEMTEYTNSLRNGILEAYSGIFQGFKNSAKTQLLIPFAPHILQFLDSIYMEKDMDEVVMKTAIGVLGDLADTLGSHVGGLIQQSVSSKEFLNECLSSEDHTIKEAAEWAKHAITRAISV

SEQ ID NO: 674 - protein, 868 aa, Arabidopsis thaliana
MEVTQLLINAQSIDGTVRKHAEESLKQFQEQNLAGFLLSLAGELANDEKPVDSRKLAGLVLKNALDAKEQHRKYELVQRWLALDMSTKSQIRAFLLKTLSAPVPDVRSTASQVIAKVAGIELPQKQWPELIVSLLSNIHQLPAHVKQATLETLGYLCEEVSPDVVEQEHVNKILTAVVQGMNAAEGNTDVRLAATRALYMALGFAQANFNNDMERDYIMRVVCEATLSPEVKIRQAAFECLVSIASTYYEKLAHYMQDIFNITAKAVREDDESVALQAIEFWSSICDEEIDILEEYGGEFAGDSDVPCFYFTKQALPGLVPLLLETLLKQEEDQDLDEGAWNIAMAGGTCLGLVARAVGDDIVPHVMPFIEEKISKPDWREREAATYAFGSILEGPSADKLMAIVNAALTFMLNALTNDPSNHVKDTTAWTLGRIFEFLHGSTIETPIINQANCQQIITVLIQSMNDAPNVAEKACGALYFLAQGYEDIGPSSPLTPFFQEIIKSLLAVAHREDATESRLRTAAYEALNEVVRCSTDETSTMVLQLVPVIMMELHNTLEGEKLSLDEREKQNELQGLLCGCLQVIIQKLGSEPTKSKFMEYADQMMGLFLRVFGCRSATAHEEAMLAIGALAYAAGPNFAKYMPEFYKYLEMGLQNFEEYQVCAVTVGVVGDVCRALEDKILPYCDGIMTQLLKDLSSNQLHRSVKPPIFSCFGDIALAIGEDFDKYWRYSMPMLQSAAELSAHSAGADDEMTEYTNSLRNGILEAYSGIFQGFKNSAKTQLLIPFAPHILQFLDSIYMEKDMDEVVMKTAIGVLGDLADTLGSHVGGLIQQSVSSKEFLNECLSSEDHTIKEAAEWAKHAITRAISV

SEQ ID NO: 675 - protein, 784 aa, Arabidopsis thaliana
MSTKSQIRAFLLKTLSAPVPDVRSTASQVIAKVAGIELPQKQWPELIVSLLSNIHQLPAHVKQATLETLGYLCEEVSPDVVEQEHVNKILTAVVQGMNAAEGNTDVRLAATRALYMALGFAQANFNNDMERDYIMRVVCEATLSPEVKIRQAAFECLVSIASTYYEKLAHYMQDIFNITAKAVREDDESVALQAIEFWSSICDEEIDILEEYGGEFAGDSDVPCFYFTKQALPGLVPLLLETLLKQEEDQDLDEGAWNIAMAGGTCLGLVARAVGDDIVPHVMPFIEEKISKPDWREREAATYAFGSILEGPSADKLMAIVNAALTFMLNALTNDPSNHVKDTTAWTLGRIFEFLHGSTIETPIINQANCQQIITVLIQSMNDAPNVAEKACGALYFLAQGYEDIGPSSPLTPFFQEIIKSLLAVAHREDATESRLRTAAYEALNEVVRCSTDETSTMVLQLVPVIMMELHNTLEGEKLSLDEREKQNELQGLLCGCLQVIIQKLGSEPTKSKFMEYADQMMGLFLRVFGCRSATAHEEAMLAIGALAYAAGPNFAKYMPEFYKYLEMGLQNFEEYQVCAVTVGVVGDVCRALEDKILPYCDGIMTQLLKDLSSNQLHRSVKPPIFSCFGDIALAIGEDFDKYWRYSMPMLQSAAELSAHSAGADDEMTEYTNSLRNGILEAYSGIFQGFKNSAKTQLLIPFAPHILQFLDSIYMEKDMDEVVMKTAIGVLGDLADTLGSHVGGLIQQSVSSKEFLNECLSSEDHTIKEAAEWAKHAITRAISV

SEQ ID NO: 676 - DNA, 611 bp, Arabidopsis thaliana
actcggtcccatcatgcaagtagataaacactgaatcaccaaatcttgtttgagatttagaaaaaaaggaagctccaagagatggcaagagttgttaaaatcgattctgcagagtcatggaatttctatgtgagtcaagccaagaatcagaattgtcccattgtggctcatttcactgcattatggtgtattccttctgtgtttatgaactccttcttcgaagagcttgcgtttaactataaggatgctctgtttctaatagttgatgttgatgaagttaaggaagtggcaagtcaactagaggtaaaggcgatgccaactttcttgttcttgaaggatggtaatgcgatggacaaactcgtgggcgcaaaccctgatgagattaagaaacgggtcgatggtttcgttcagtcctcacgtgttgttcatattgcttaagagagatttatagatacgagcagaatactaaataaagtttgtgtgaagtgtaattagtttgtaactttggtatttggtttgtgtgaaatatcaagtgtaagtgtaaatttttataaaagcaagttctgttataaacaagaactggatttatttaattttggttcttaacaggg

SEQ ID NO: 677 - protein, 118 aa, Arabidopsis thaliana
MARVVKIDSAESWNFYVSQAKNQNCPIVAHFTALWCIPSVFMNSFFEELAFNYKDALFLIVDVDEVKEVASQLEVKAMPTFLFLKDGNAMDKLVGANPDEIKKRVDGFVQSSRVVHIA

SEQ ID NO: 678 - protein, 77 aa, Arabidopsis thaliana
MNSFFEELAFNYKDALFLIVDVDEVKEVASQLEVKAMPTFLFLKDGNAMDKLVGANPDEIKKRVDGFVQSSRVVHIA

SEQ ID NO: 679 - DNA, 802 bp, Arabidopsis thaliana
gtggcggcctttaaaataaaattgccgccgacgactattgtaagtcactcggctaagtaagaatggcgggagtggcttgccagatatctatcagctcatcttcgacctttaggagggttaatcaatggccacggtgcttctctggttcgccggagaagaaaacaccagctgttttgaagtgggcggttagtggagttactgaatttctccggttgatctccggtgctccgtcttcaacctccatcgctacaaataaggatcgatcaaagaatgaggttactgctggagatgtcgatgatgtgatggggattttgagatcagattatcgaaatttctacttcgtcactggagtcttgacttctgcaatttactcggatgattgcatcttcgaggatccgactatcagcttccagggtacagagctgtatgaacgcaacttgaagttactggttccgttcctcgaagatgcatccattgaactgcaaaatatggagaagagtgagtcgtcccaaagaaactatatactagcgacgtggaagctaagaacttacctgaagctgccatggagaccattgatatcgatcaacgggaatacggtttatgatctggataaagacttcaaaattgtgaggcatgtcgagagctggaatgtctctgcgctagaagcaatcgggcagatattcaccgtcaagtcttttcccttccgtgactaagagtcttaagcactaaaatttatacatttggccatggcccaaacaatataatgtctaccaagtatagttgttaatatgaaaattcacct

SEQ ID NO: 680 - protein, 216 aa, Arabidopsis thaliana
MAGVACQISISSSSTFRRVNQWPRCFSGSPEKKTPAVLKWAVSGVTEFLRLISGAPSSTSIATNKDRSKNEVTAGDVDDVMGILRSDYRNFYFVTGVLTSAIYSDDCIFEDPTISFQGTELYERNLKLLVPFLEDASIELQNMEKSESSQRNYILATWKLRTYLKLPWRPLISINGNTVYDLDKDFKIVRHVESWNVSALEAIGQIFTVKSFPFRD

SEQ ID NO: 681 - protein, 136 aa, Arabidopsis thaliana
MGILRSDYRNFYFVTGVLTSAIYSDDCIFEDPTISFQGTELYERNLKLLVPFLEDASIELQNMEKSESSQRNYILATWKLRTYLKLPWRPLISINGNTVYDLDKDFKIVRHVESWNVSALEAIGQIFTVKSFPFRD

SEQ ID NO: 682 - DNA, 914 bp, Arabidopsis thaliana
aaatggcgtcgtcgaagcacgaagactatggcatcccttacacacctcttccatcatcacaaccatctcaatccgtaatccttctaactccttatcgccgtcaccgtcgtccttcacttctccgtaacctccgttgttctctcctcttcaccgccgtaatcctcctcctctccgccgccgtttacttactctacccttcagatccagacatcactgtctcacgaatcaatctcaaccacataagcgtcgttgattctcataaaatcgctttagatctctcgttttcgctcacaatcaaagttcgaaaccgagatttcttctcacttgattacgattcgcttgttgtttcgattgggtatagaggaagagagttaggtcttgttaagtctaaaggtggacatcttaaagctcgtgatagctcttatattgatgctacgcttgagcttgatggtcttgaggttgttcatgatgttatttatttgattggtgatttggctaaaggtgttattccttttgatactattgctcaagttcaaggtgatcttggtgttctcttgttcaatatcccaattcagggtaaagtgtcgtgtgaggtgtatgttaatgttaacaaccagaaaatttcacaccaagattgtcatcgtaagtgaagtgcaatcctgagctggatgagagatgaagaaaccagataacatacgttgacatgttttgagttctggagaaatgatttgtgagtttttgtatagataaaatactcttaatgttaaaactgaaagatagaatgagaaagatgaaccactactttctgtaattaaagttctttcttaattcctcagatgtgtacaagtgtttgcttttatgttgtagacatgaataaaccactcaataaaccatgtaattcgaagtcttcaaag

SEQ ID NO: 683 - protein, 215 aa, Arabidopsis thaliana
MASSKHEDYGIPYTPLPSSQPSQSVILLTPYRRHRRPSLLRNLRCSLLFTAVILLLSAAVYLLYPSDPDITVSRINLNHISVVDSHKIALDLSFSLTIKVRNRDFFSLDYDSLVVSIGYRGRELGLVKSKGGHLKARDSSYIDATLELDGLEVVHDVIYLIGDLAKGVIPFDTIAQVQGDLGVLLFNIPIQGKVSCEVYVNVNNQKISHQDCHRK

SEQ ID NO: 684 - DNA, 728 bp, Arabidopsis thaliana
ctactagattaactattatacaatcaagcttcgtctccgcaagaacaagactcaattacgtctccaagacaaatcattctgggttcgcttgtcgttctctttcaaaacccagaaacttgagtctctctgtttattctatgggttcttctagttcttctccgaaaccagacaacgtccaagaggctgagaagaatgagtttgcttctctaagtgaaaatgaatggaagaaacggctaacaccagaacagtactacatcactagacagaagggcacagagagagctttcactggggagtattggaactcaaagacccctggagtatataattgtgtatgttgcgacacacctctatttgattcatcaacaaagtttgatagtggaacagggtggccatcttactaccaaccaattggaaacaatgtgaagacaaagctagacctctctatcatcttcatgcctagacaagaagttgtctgtgctgtttgtaacgcccatcttggtcatgtctttgacgacggtccacgcccaaccggaaaacgatattgcctcaacagtgctgctctgaaacttaacgcattggagaaaacaagagattgagagtttctggtacaaggatttgttcatattacataatatactgtatcattatatccactgtatttcctcgtattaagtcgttgtatgtaagtcaactataatccatcaaaaggtttaaactttgagttg

SEQ ID NO: 685 - protein, 198 aa, Arabidopsis thaliana
TRLTIIQSSFVSARTRLNYVSKTNHSGFACRSLSKPRNLSLSVYSMGSSSSSPKPDNVQEAEKNEFASLSENEWKKRLTPEQYYITRQKGTERAFTGEYWNSKTPGVYNCVCCDTPLFDSSTKFDSGTGWPSYYQPIGNNVKTKLDLSIIFMPRQEVVCAVCNAHLGHVFDDGPRPTGKRYCLNSAALKLNALEKTRD

SEQ ID NO: 686 - protein, 153 aa, Arabidopsis thaliana
MGSSSSSPKPDNVQEAEKNEFASLSENEWKKRLTPEQYYITRQKGTERAFTGEYWNSKTPGVYNCVCCDTPLFDSSTKFDSGTGWPSYYQPIGNNVKTKLDLSIIFMPRQEVVCAVCNAHLGHVFDDGPRPTGKRYCLNSAALKLNALEKTRD

SEQ ID NO: 687 - DNA, 699 bp, Arabidopsis thaliana
atggaaaacactgtgggtctttatgtaattgacgtatatatcaaaccaccaattcctaaattttcctcattgctgaaagattcagaaacgcgtttcctttttctcgtagtggcgagaggggagacatgtaatctcaatctcaccccctttataatttctctatatctctctcttctctcacacaattcttcgtttcccagaatcttacgaaccctaaaacttctcattcttcgtcacacattgagatcatattccaattcaaaaaaatatgtgtccgatgaggttcttattggtgttcttctcagctgtactcgccggatatttcgcatggaagacggtgagttcttcgccggaattcgattcaccggacgaattgaatgagaaacaagaactcaatctcaaaaagaagatggagaatgggttttgggtgttcgtcgatatggctagcggaagatacctttggaggaatctcaaggaaatgagagagaaatctcaatgaagatgatgatgaacgaatacgaaaagatttcatcttttttttttttggtttcttctttgtgcagaaagtgtaagaaacaataataatgatactttacgagtttagtattcatttgttctaatctttctcctgaattttgtaacttttgattcattgatttgtaatcttggaaaaagaataacaaagagtttgtaaccttc

SEQ ID NO: 688 - protein, 126 aa, Arabidopsis thaliana
MENTVGLYVIDVYIKPPIPKFSSLLKDSETRFLFLVVARGETCNLNLTPFIISLYLSLLSHNSSFPRILRTLKLLILRHTLRSYSNSKKYVSDEVLIGVLLSCTRRIFRMEDGEFFAGIRFTGRIE

SEQ ID NO: 689 - protein, 76 aa, Arabidopsis thaliana
MCPMRFLLVFFSAVLAGYFAWKTVSSSPEFDSPDELNEKQELNLKKKMENGFWVFVDMASGRYLWRNLKEMREKSQ

SEQ ID NO: 690 - protein, 73 aa, Arabidopsis thaliana
MRFLLVFFSAVLAGYFAWKTVSSSPEFDSPDELNEKQELNLKKKMENGFWVFVDMASGRYLWRNLKEMREKSQ

SEQ ID NO: 691 - DNA, 781 bp, Arabidopsis thaliana
gagataataaagagagaagcaaaaaagaatttttatagaaagaaaggaaaaatcagaaaaggagagaaaaattaaaaaagtctctcttttctctttttcttcttcgtctcccatattctccgatcaaaaatatatttctctctcactttccttggttttctcggcggcttcttcttctcctatttctccctcaaatcgttttctccagttttcttgggataaatcttcctcctttctgcagacgccatgtcggacaaaggtcgtcccttgccaaaatttggtgaatgggatgtgaatgatccagcatcagcagaaggttttacagtgatattcaacaaagctagggatgagaaaaagaccggtggcaaaccgggatcacccggtaaatccagtgagggtcatgttaaatctggaggaggagatcctagtaaacctcagcctaaaaaatggctctgctgcatgcaagctccagctgtggactcttgacagacacaaagatggatttgcttgctgctaaaaaaaaagtcacagtgcttacacatctaaaagcaatggttctttttatgttttattgtcgtctttcttgaaattacccacacacacaaaaaaaaaaggttcctaagatgatttggagctcacccacctttagtatcacgattatgattccttcttctttgaagttgtttcttcttcttaaaatgctgtaaaatcgtgtctccattttattggaaaaaaaaaaggaagaaaaacgaaaaaaaacacagttactgtgtctatatgg

SEQ ID NO: 692 - protein, 79 aa, Arabidopsis thaliana
MSDKGRPLPKFGEWDVNDPASAEGFTVIFNKARDEKKTGGKPGSPGKSSEGHVKSGGGDPSKPQPKKWLCCMQAPAVDS

SEQ ID NO: 693 - protein, 56 aa, Arabidopsis thaliana
MRKRPVANRDHPVNPVRVMLNLEEEILVNLSLKNGSAACKLQLWTLDRHKDGFACC

SEQ ID NO: 694 - protein, 46 aa, Arabidopsis thaliana
MALLHASSSCGLLTDTKMDLLAAKKKVTVLTHLKAMVLFMFYCRLS

SEQ ID NO: 695 - DNA, 848 bp, Arabidopsis thaliana
gatagattttacaccaccgaagccgaaaaaatgccggcggcgaagaggactcccaaggttaaccgtaaccctgacctaatcaggggagttggaaaatattcgaggtctcagatgtaccacaagagaggtttgtgggctatcaaggccaagaacggtggcgttttccctcgtcacgatgctcagccaaaggtcgacgctccggttgagaagcctgccaagttttatccggcggaagacgtcaagaagccgcttgttaacagacgcaagcctaagcctaccaagctaaaagccagcatcactccaggaactgtgttgatcattcttgctggtagattcaagggtaagagagttgtcttcctcaagcaactttcttctggtttgcttcttgtaacaggaccattcaagattaatggtgttccattgagacgtgttaaccaagcctatgtgattggaacctccacaaagattgacatttctggagtcaacactgagaaattcgatgacaagtattttggaaaggttgctgagaagaagaagaagaaaacagaaggcgaattcttcgaagctgagaaagaggagaagaaggagatcccacaggagaagaaggaagaccagaaaaccgttgatgctgctctgatcaaatccattgaagctgtcccagagctcaaggtttaccttggagccaggttctcattgagtcaaggaatgaaaccacatgagcttgttttctagatttcgtattgtttctcaaattttaagaatatctgtttccctgagtattttcatctttaatcgtccttggatcttaaagactattttctctgattttatatatcaaattttcgagt

SEQ ID NO: 696 - protein, 243 aa, Arabidopsis thaliana
DRFYTTEAEKMPAAKRTPKVNRNPDLIRGVGKYSRSQMYHKRGLWAIKAKNGGVFPRHDAQPKVDAPVEKPAKFYPAEDVKKPLVNRRKPKPTKLKASITPGTVLIILAGRFKGKRVVFLKQLSSGLLLVTGPFKINGVPLRRVNQAYVIGTSTKIDISGVNTEKFDDKYFGKVAEKKKKKTEGEFFEAEKEEKKEIPQEKKEDQKTVDAALIKSIEAVPELKVYLGARFSLSQGMKPHELVF

SEQ ID NO: 697 - protein, 233 aa, Arabidopsis thaliana
MPAAKRTPKVNRNPDLIRGVGKYSRSQMYHKRGLWAIKAKNGGVFPRHDAQPKVDAPVEKPAKFYPAEDVKKPLVNRRKPKPTKLKASITPGTVLIILAGRFKGKRVVFLKQLSSGLLLVTGPFKINGVPLRRVNQAYVIGTSTKIDISGVNTEKFDDKYFGKVAEKKKKKTEGEFFEAEKEEKKEIPQEKKEDQKTVDAALIKSIEAVPELKVYLGARFSLSQGMKPHELVF

SEQ ID NO: 698 - protein, 206 aa, Arabidopsis thaliana
MYHKRGLWAIKAKNGGVFPRHDAQPKVDAPVEKPAKFYPAEDVKKPLVNRRKPKPTKLKASITPGTVLIILAGRFKGKRVVFLKQLSSGLLLVTGPFKINGVPLRRVNQAYVIGTSTKIDISGVNTEKFDDKYFGKVAEKKKKKTEGEFFEAEKEEKKEIPQEKKEDQKTVDAALIKSIEAVPELKVYLGARFSLSQGMKPHELVF

SEQ ID NO: 699 - DNA, 1042 bp, Arabidopsis thaliana
aattaggttaaaaggaccaagctaagtttattggcgggaacctgtttcgcgagacggatgatctggaactggatagtaacatcatcgaaaacttcagtgaagcacgaaacttttacgccgtttccgtctctttctacgtcgtcggattctccgatttggtcggcgatgttcacctgagcaacggatcgaagaacttggtcgtattcagtctccattgtctcccaagtccgagaaaaaccggctcaagtttttagatggtataaatctcaattgcgaaattcctctttctccgtcgttgctcttctccggcgatacgagcatctctgatccgagcaatttcacttcctgaattttccgaatctgatccctgatggatagtggaacgataaacattaagaaatgggtagtgatatatccagtctatattaactcaaagaaaactgtagctgagggaagaagaatcagtgtgagtaagtcatgtgagaacccgaattgcatcgagattagtgattgttgcaagcatttgaaactccctagtgccgtcgagattgacaaagcatacccgcgagatttcatgcaagtagggagagtgagggtgcaattgaaaagagaagatggtactttactcaatccagccattacttcaaggaagcatctgatgcagaaaattgcagagttggtaccaagacatccagagagagtaaagaagcaggaagctcagaaagcgaagaagcaggaacctcaggccacaacttcaacctctggaacttcttcaaagtcaggcaaaggtggcaagaagaagagataaaacaagccaagccctccctctctctcatcagattttatggcttttaatctctttaactttctgagaagaacacaaaggtgtttgcaggtgtaacaatgtttcaaatagaacatcgtctctttcaaccctaagctactttgttttcaccattctacttcttctttttggcatcatccattgacattagacaagaaagaatgcctaaaaagggaacataaagatattgtaattcac

SEQ ID NO: 700 - protein, 145 aa, Arabidopsis thaliana
MDSGTINIKKWVVIYPVYINSKKTVAEGRRISVSKSCENPNCIEISDCCKHLKLPSAVEIDKAYPRDFMQVGRVRVQLKREDGTLLNPAITSRKHLMQKIAELVPRHPERVKKQEAQKAKKQEPQATTSTSGTSSKSGKGGKKKR

SEQ ID NO: 701 - protein, 77 aa, Arabidopsis thaliana
MQVGRVRVQLKREDGTLLNPAITSRKHLMQKIAELVPRHPERVKKQEAQKAKKQEPQATTSTSGTSSKSGKGGKKKR

SEQ ID NO: 702 - DNA, 772 bp, Arabidopsis thaliana
actctcccactacctaaaaagaaactgcctaagactaagctgaagaagaagaaagaaagaaacagagaagacataaaaatgagaggagacaaggaagaagagaaggcgaagcttgcacttgtgttagctgcaaagtcaagatcgttgttgtacacttcatcgcctgcgagtccacgtgtgtttgcttctccgattcacactcttgcctctgttccgttttgttgggaagaccaaccaggcaagcccaagcaccctcttcgtcctctttcttaccccaagtgtcttgatttgccacctcgtttgctccttcctggtgagttcacgcaaatgcccttgcccgagaggaaacatgggctcttgaggttcttgaggaggaaagggagaggggatgttgttgtgaggggtaattatgtctttctgtcggagaatcagagagcaggagataatatcaacgagaacaacatgaagatcatgaagtttaacagatcagggagttaccatggtggtggttctgttaaaggatctcacttttggggaagtttatgcaagggattgaagctagcaatgccatggaagaacaagaagatgagaagtggaagtgtttaagcctgttttcaatatgcattatctatctatctattgagggatcaagatgatgaaaaagagctattaagagtgtatgtaagattagcaattttactgtaatttaatatctgtgtgatatgcatatataatgttgttaagactcatgagccatggcaagaaaagtttc

SEQ ID NO: 703 - protein, 201 aa, Arabidopsis thaliana
TLPLPKKKLPKTKLKKKKERNREDIKMRGDKEEEKAKLALVLAAKSRSLLYTSSPASPRVFASPIHTLASVPFCWEDQPGKPKHPLRPLSYPKCLDLPPRLLLPGEFTQMPLPERKHGLLRFLRRKGRGDVVVRGNYVFLSENQRAGDNINENNMKIMKFNRSGSYHGGGSVKGSHFWGSLCKGLKLAMPWKNKKMRSGSV

SEQ ID NO: 704 - protein, 175 aa, Arabidopsis thaliana
MRGDKEEEKAKLALVLAAKSRSLLYTSSPASPRVFASPIHTLASVPFCWEDQPGKPKHPLRPLSYPKCLDLPPRLLLPGEFTQMPLPERKHGLLRFLRRKGRGDVVVRGNYVFLSENQRAGDNINENNMKIMKFNRSGSYHGGGSVKGSHFWGSLCKGLKLAMPWKNKKMRSGSV

SEQ ID NO: 705 - DNA, 1386 bp, Arabidopsis thaliana
  misc_feature (1310)..(1310): n is a, c, g, or t
ataaaccatttaaatttgatcaaaccctcacaagattgatcaatcaattctcgagtctctgtttcggtcacataaccgaaaggaaacttttttagtcagaaagaaagatttttggagttgaaagcaacataagagattaatggatggttcagctggtccaagagatggaggagctatgaagccggtgattttgagagtttgtgttgctattgtattatcagcaactggtttgattttggctaggtttgtgtctcggaatgaagataacgaggtaacttcttctacaagtaatccagagtcttcttcatcacctagcagagaaaacgacgaggaagaagaagcagagagtccgaatcagcagaagcaagagattctcagcttaaaatccagattcgaggagcttcaaaggaaggaatacgagatggagttgcatttcgagcggttttgtaacttgaaagatcaagaagtcatgcttattgagcataaaagcatattgagtcttgagaaagctcaattagatttcttccgtaaagaagttttagcgatggaggaagaacacaagaggggtcaagctttggtgattgtgtatctcaaacttgtgggagaaatccaagagttgagatcagagaatgggttgcttgaggggaaagcaaagaagcttagaagaaaatcaaagcagttataccgtgttgtcaacgagagcaggaagattattggcgtggaaaaagagttcttgaagtgtgttgatgaattggagacgaagaataacattgtgaaggaacttgaaggtaaagtcaaagacatggaagcttacgttgatgtgttgcaagaggaaaaggaagaattattcatgaagtcgtcaaattcaacatcagagatggtgagtgtagaagattatagaaggatagtagaagagtacgaggaattaaagaaggattatgcgaatggagtgaaggaagtgattaacctgagatggagcaatgcttgtttgagacacgaggtgatgagaaatggaaccaactttggggaaatcgtgttttctccaaatggaaacttgcatgagctgggtttggaggatgatcaagtggataatgctctggcattgatgagagtagctaatgagcaacatgaagagaatcatcatcagcatgaatcttcgaggaggaagagattgatgaagaagttgaagaaatgggttgaaggaaatgagaaaggaaaatcaaaagcagaagaagcagaagaagcggaaggcactatttgacagtggaacctgaagaagaacgaacatttcattcaagaaggtcttgttntagtgtgtaatagcattgctttacaaaagaagcatgttcatgaattattcatcatttctccacaactaacatagtc

SEQ ID NO: 706 - protein, 373 aa, Arabidopsis thaliana
MDGSAGPRDGGAMKPVILRVCVAIVLSATGLILARFVSRNEDNEVTSSTSNPESSSSPSRENDEEEEAESPNQQKQEILSLKSRFEELQRKEYEMELHFERFCNLKDQEVMLIEHKSILSLEKAQLDFFRKEVLAMEEEHKRGQALVIVYLKLVGEIQELRSENGLLEGKAKKLRRKSKQLYRVVNESRKIIGVEKEFLKCVDELETKNNIVKELEGKVKDMEAYVDVLQEEKEELFMKSSNSTSEMVSVEDYRRIVEEYEELKKDYANGVKEVINLRWSNACLRHEVMRNGTNFGEIVFSPNGNLHELGLEDDQVDNALALMRVANEQHEENHHQHESSRRKRLMKKLKKWVEGNEKGKSKAEEAEEAEGTI

SEQ ID NO: 707 - protein, 361 aa, Arabidopsis thaliana
MKPVILRVCVAIVLSATGLILARFVSRNEDNEVTSSTSNPESSSSPSRENDEEEEAESPNQQKQEILSLKSRFEELQRKEYEMELHFERFCNLKDQEVMLIEHKSILSLEKAQLDFFRKEVLAMEEEHKRGQALVIVYLKLVGEIQELRSENGLLEGKAKKLRRKSKQLYRVVNESRKIIGVEKEFLKCVDELETKNNIVKELEGKVKDMEAYVDVLQEEKEELFMKSSNSTSEMVSVEDYRRIVEEYEELKKDYANGVKEVINLRWSNACLRHEVMRNGTNFGEIVFSPNGNLHELGLEDDQVDNALALMRVANEQHEENHHQHESSRRKRLMKKLKKWVEGNEKGKSKAEEAEEAEGTI

SEQ ID NO: 708 - protein, 279 aa, Arabidopsis thaliana
MELHFERFCNLKDQEVMLIEHKSILSLEKAQLDFFRKEVLAMEEEHKRGQALVIVYLKLVGEIQELRSENGLLEGKAKKLRRKSKQLYRVVNESRKIIGVEKEFLKCVDELETKNNIVKELEGKVKDMEAYVDVLQEEKEELFMKSSNSTSEMVSVEDYRRIVEEYEELKKDYANGVKEVINLRWSNACLRHEVMRNGTNFGEIVFSPNGNLHELGLEDDQVDNALALMRVANEQHEENHHQHESSRRKRLMKKLKKWVEGNEKGKSKAEEAEEAEGTI

SEQ ID NO: 709 - DNA, 935 bp, Arabidopsis thaliana
atcttttgggagaggagaaagaaaaagaaaatgggaagagggagagtagaattgaagaggatagagaacaagatcaataggcaagtgacgtttgcaaagagaaggaatggtcttttgaagaaagcatacgagctttcagttctatgtgatgcagaagttgctctcatcatcttctcaaatagaggaaagctgtacgagttttgcagtagttcgagcatgcttcggacactggagaggtaccaaaagtgtaactatggagcaccagaacccaatgtgccttcaagagaggccttagcagttgaacttagtagccagcaggagtatctcaagcttaaggagcgttatgacgccttacaaagaacccaaaggaatctgttgggagaagatcttggacctctaagtacaaaggagcttgagtcacttgagagacagcttgattcttccttgaagcagatcagagctctcaggacacagtttatgcttgaccagctcaacgatcttcagagtaaggaacgcatgctgactgagacaaataaaactctaagactaaggttagctgatgggtatcagatgccactccagctgaaccctaaccaagaagaggttgatcactacggtcgtcatcatcatcaacaacaacaacactcccaagctttcttccagcctttggaatgtgaacccattcttcagatcgggtatcaggggcaacaagatggaatgggagcaggaccaagtgtgaataattacatgttgggttggttaccttatgacaccaactctatttgaatctttctcacttaatcaatccctctcttttttttttgacatttttaagatgatgtttctattttattacctctctcatgttttctgtcttgtgtgcatgtgtgtgtgtaatgtttatgcccttctattattcaataattttttcgact

SEQ ID NO: 710 - protein, 261 aa, Arabidopsis thaliana
IFWERRKKKKMGRGRVELKRIENKINRQVTFAKRRNGLLKKAYELSVLCDAEVALIIFSNRGKLYEFCSSSSMLRTLERYQKCNYGAPEPNVPSREALAVELSSQQEYLKLKERYDALQRTQRNLLGEDLGPLSTKELESLERQLDSSLKQIRALRTQFMLDQLNDLQSKERMLTETNKTLRLRLADGYQMPLQLNPNQEEVDHYGRHHHQQQQHSQAFFQPLECEPILQIGYQGQQDGMGAGPSVNNYMLGWLPYDTNSI

SEQ ID NO: 711 - protein, 251 aa, Arabidopsis thaliana
MGRGRVELKRIENKINRQVTFAKRRNGLLKKAYELSVLCDAEVALIIFSNRGKLYEFCSSSSMLRTLERYQKCNYGAPEPNVPSREALAVELSSQQEYLKLKERYDALQRTQRNLLGEDLGPLSTKELESLERQLDSSLKQIRALRTQFMLDQLNDLQSKERMLTETNKTLRLRLADGYQMPLQLNPNQEEVDHYGRHHHQQQQHSQAFFQPLECEPILQIGYQGQQDGMGAGPSVNNYMLGWLPYDTNSI

SEQ ID NO: 712 - protein, 189 aa, Arabidopsis thaliana
MLRTLERYQKCNYGAPEPNVPSREALAVELSSQQEYLKLKERYDALQRTQRNLLGEDLGPLSTKELESLERQLDSSLKQIRALRTQFMLDQLNDLQSKERMLTETNKTLRLRLADGYQMPLQLNPNQEEVDHYGRHHHQQQQHSQAFFQPLECEPILQIGYQGQQDGMGAGPSVNNYMLGWLPYDTNSI

SEQ ID NO: 713 - DNA, 3009 bp, Arabidopsis thaliana
atagctttttgcgaaactcctcctctctctcacaattgaatcaggacgatccaattgaatcgctatttttcttctccttcgtatgcctgatccctgattggtttattaagcgtcactgttgttggattttgaggaagatgaaagcaaacaatgtctaggctaagtaaagacattgattcagcgtttcaaggtgttggaaccaaaagtggcttggagatttggtgcgtttataataaacagcttatttctatccctaagtcttcttttggaaaatttcactctggaaatgcataccttgttcttagaacgtttttgcggaagatcgaatctccccagtatgacattcactattggctaggaattgatgcaaatgaggtggattcaattttggcatcagacaaagcattagatttagatgccgcacttggatgttgtacggtgcaataccgtgaagttcaaggtcaagagactgagaagtttctctcttacttcaaaccttgtattatacctgttgaaggcaagtattccccaaaaactggaattgctggcgagacataccaagtcaccttgctaaggtgcaagggagatcatgttgttcgtgttaaagaggtgccttttcttcggtcatcactgaaccatgacgatgtcttcattctggatactgcgtcaaaggtttttctttttgctggttgtaactcaagcactcaggaaaaagctaaagcgatggaggttgtggaatatataaaggataacaagcatgacggaagatgtgaggtcgcgactatcgaggatggaaaattttcaggtgattcagatgctggggaattctggtctttctttggtggttatgctcccattcccaagctttcatcttctaccacccaagaacaaactcagactccatgtgcagaattgttctggatagatactaagggaaatctacatccaactggaacaagttctttggacaaggacatgcttgagaagaacaaatgctacatgctggactgtcacagtgaagtatttgtttggatgggaagaaacacatcacttacagaaaggaagacatccatttcttcctcagaagaatttctacgaaaggagggacgctcgacgaccacaagtttagtacttctaacagaaggattagaaaatgccagattcaggtcattttttaacaaatggccttcagaccggtggagtctagccttctacaatgaaggtcgagaaaaagtggctgcgttgttcaaacaaaaaggatatgacgttgaggagcttcctgatgaagaagatgaccctctctacacaaactgccgagacaacctcaaggtttggcgtgtagatggtgatgacgtctcgcttctctctattcctgaccagacaaagctattcaccggcgattgctatcttgtgcagtataaatatacttataaagaaagaaccgaacatcttttatatgtatggatcggttgtgaaagcatacagcaagatagagctgatgccataaccaatgctagtgccattgttggtacaaccaagggtgaatctgtactgtgtcatatatatcagggaaacgaaccttctcggttttttccaatgttccagtcactggttgtttttaagggcggtttgagtagacggtacaaagtgcttctagcagagaaggaaaagataggggaagaatataatgagaacaaggcttctcttttccgtgttgtaggaacaagcccaagaaacatgcaagcaatccaagtgaatctagttgcaacctccttgaactcatcctactcttacattttacaatatggagcttctgccttcacttggattgggaaactttcatcagactctgatcatgaagttcttgacagaatgctatatttccttgatacatcttgtcaacctacatacatcagggaaggaaatgaaacagacacattttggaatttgcttggtggtaagtcagagtacccaaaagaaaaggaaatgagaaaacaaatagaagaaccacatttatttacatgttcatgcagttcaggtaatgatgtactcaaggtgaaagaaatatacaattttgtgcaagatgatttaactactgaagatgtatttctattggactgccaaagtgaagtatatgtctggattggatcaaactcaaacataaagtcgaaggaagaagctcttactcttggtctgaaattcctagagatggatatactggaagaaggtctaaccatgaggactcctgtatatgttgtcacagaaggccacgagccaccatttttcacccgtttctttgagtgggttcctgaaaaggcaaacatgcatggtaattcatttgaaaggaagcttgctagtttgaaaggaaagaagacaagcactaagagatctagtggaagccagtatagatcacagtcaaaggataatgcatcacgtgatttacaaagtcgatctgtgagctcaaacggatcggagcgaggagtatcaccttgctccagcgaaaagcttttgagtttgagctctgcagaagacatgacaaacagcagtaactcaactccagttgtcaaaaagcttttctcagaatctcttttagtggatcctaatgatggagtggcgagacaagagtcgagttccaagtcggacatttctaaacagaagccacgcgttggaatcaatagcgatcttagtagtctagagtcacttgcatattcatatgaacagctcagagttgattctcagaagccagtgacggatatagatgcaacaagaagagaggcgtacttaacagagaaagagtttgaagagagatttggaatggcgaaatctgagttctatgcacttccaaagtggaaacagaataaactcaaaatatctcttcatcttttctaaaaacctagagtaagatctttgcaacaaagctatttttttgggtcttaccaaatgtaaaaactgtaatgtttttgtttattgcaatgacctcctgatatataagtttgaggctagcctgtt

SEQ ID NO: 714 - protein, 912 aa, Arabidopsis thaliana
MSRLSKDIDSAFQGVGTKSGLEIWCVYNKQLISIPKSSFGKFHSGNAYLVLRTFLRKIESPQYDIHYWLGIDANEVDSILASDKALDLDAALGCCTVQYREVQGQETEKFLSYFKPCIIPVEGKYSPKTGIAGETYQVTLLRCKGDHVVRVKEVPFLRSSLNHDDVFILDTASKVFLFAGCNSSTQEKAKAMEVVEYIKDNKHDGRCEVATIEDGKFSGDSDAGEFWSFFGGYAPIPKLSSSTTQEQTQTPCAELFWIDTKGNLHPTGTSSLDKDMLEKNKCYMLDCHSEVFVWMGRNTSLTERKTSISSSEEFLRKEGRSTTTSLVLLTEGLENARFRSFFNKWPSDRWSLAFYNEGREKVAALFKQKGYDVEELPDEEDDPLYTNCRDNLKVWRVDGDDVSLLSIPDQTKLFTGDCYLVQYKYTYKERTEHLLYVWIGCESIQQDRADAITNASAIVGTTKGESVLCHIYQGNEPSRFFPMFQSLVVFKGGLSRRYKVLLAEKEKIGEEYNENKASLFRVVGTSPRNMQAIQVNLVATSLNSSYSYILQYGASAFTWIGKLSSDSDHEVLDRMLYFLDTSCQPTYIREGNETDTFWNLLGGKSEYPKEKEMRKQIEEPHLFTCSCSSGNDVLKVKEIYNFVQDDLTTEDVFLLDCQSEVYVWIGSNSNIKSKEEALTLGLKFLEMDILEEGLTMRTPVYVVTEGHEPPFFTRFFEWVPEKANMHGNSFERKLASLKGKKTSTKRSSGSQYRSQSKDNASRDLQSRSVSSNGSERGVSPCSSEKLLSLSSAEDMTNSSNSTPVVKKLFSESLLVDPNDGVARQESSSKSDISKQKPRVGINSDLSSLESLAYSYEQLRVDSQKPVTDIDATRREAYLTEKEFEERFGMAKSEFYALPKWKQNKLKISLHLF

SEQ ID NO: 715 - protein, 721 aa, Arabidopsis thaliana
MEVVEYIKDNKHDGRCEVATIEDGKFSGDSDAGEFWSFFGGYAPIPKLSSSTTQEQTQTPCAELFWIDTKGNLHPTGTSSLDKDMLEKNKCYMLDCHSEVFVWMGRNTSLTERKTSISSSEEFLRKEGRSTTTSLVLLTEGLENARFRSFFNKWPSDRWSLAFYNEGREKVAALFKQKGYDVEELPDEEDDPLYTNCRDNLKVWRVDGDDVSLLSIPDQTKLFTGDCYLVQYKYTYKERTEHLLYVWIGCESIQQDRADAITNASAIVGTTKGESVLCHIYQGNEPSRFFPMFQSLVVFKGGLSRRYKVLLAEKEKIGEEYNENKASLFRVVGTSPRNMQAIQVNLVATSLNSSYSYILQYGASAFTWIGKLSSDSDHEVLDRMLYFLDTSCQPTYIREGNETDTFWNLLGGKSEYPKEKEMRKQIEEPHLFTCSCSSGNDVLKVKEIYNFVQDDLTTEDVFLLDCQSEVYVWIGSNSNIKSKEEALTLGLKFLEMDILEEGLTMRTPVYVVTEGHEPPFFTRFFEWVPEKANMHGNSFERKLASLKGKKTSTKRSSGSQYRSQSKDNASRDLQSRSVSSNGSERGVSPCSSEKLLSLSSAEDMTNSSNSTPVVKKLFSESLLVDPNDGVARQESSSKSDISKQKPRVGINSDLSSLESLAYSYEQLRVDSQKPVTDIDATRREAYLTEKEFEERFGMAKSEFYALPKWKQNKLKISLHLF

SEQ ID NO: 716 - protein, 637 aa, Arabidopsis thaliana
MLEKNKCYMLDCHSEVFVWMGRNTSLTERKTSISSSEEFLRKEGRSTTTSLVLLTEGLENARFRSFFNKWPSDRWSLAFYNEGREKVAALFKQKGYDVEELPDEEDDPLYTNCRDNLKVWRVDGDDVSLLSIPDQTKLFTGDCYLVQYKYTYKERTEHLLYVWIGCESIQQDRADAITNASAIVGTTKGESVLCHIYQGNEPSRFFPMFQSLVVFKGGLSRRYKVLLAEKEKIGEEYNENKASLFRVVGTSPRNMQAIQVNLVATSLNSSYSYILQYGASAFTWIGKLSSDSDHEVLDRMLYFLDTSCQPTYIREGNETDTFWNLLGGKSEYPKEKEMRKQIEEPHLFTCSCSSGNDVLKVKEIYNFVQDDLTTEDVFLLDCQSEVYVWIGSNSNIKSKEEALTLGLKFLEMDILEEGLTMRTPVYVVTEGHEPPFFTRFFEWVPEKANMHGNSFERKLASLKGKKTSTKRSSGSQYRSQSKDNASRDLQSRSVSSNGSERGVSPCSSEKLLSLSSAEDMTNSSNSTPVVKKLFSESLLVDPNDGVARQESSSKSDISKQKPRVGINSDLSSLESLAYSYEQLRVDSQKPVTDIDATRREAYLTEKEFEERFGMAKSEFYALPKWKQNKLKISLHLF

SEQ ID NO: 717 - DNA, 921 bp, Arabidopsis thaliana
aaaaaaaattagggtcgccttcttcttcttcttctctgacatcggaagaatcttcagtgccgagaaagataaacaaaatggcggcaatcagaacgatgacgaacatgattctacgcgagttcatccatcatccacttctccttcactcttcatcgaaatcgtgtcaatctcttttaccatgtctccgtctcactcccctaatttctccaattcactctaattcccggctcgtatccgtccgatgtgcggcatcgacctccggtggaagcggtggtgatcggaaagtctcttcacggttgtcgcaggtgcaacagatgcttcatgaagccgaagagagagctagttccgctggcaatgagcctactcctcaaatcactctagacaatgttacacttaactttgctagaagtggtggtcctggaggccagaatgtgaacaaattgaataccaaagtagatatgcgcttcaatgttaagaacgcgtattggctgagtgacaggatcagagagaaaatcttactgacggagaagaatcggatcaacaaggatggtgaacttgtgatatcttctaccaaaaccagaacgcagaaaggtaacatcgacgatgcacttgaaaaactacaggcgataattgatgcggcttcatatgttccacctccaccatcagaagaacaaaagaagaaaatagtaaagctcgctgcgaaagctgacaataaacgacttaaaagcaaaaaagttctgtcagacaagaaatctgcgagaagaagccgcggtagttacgatgattaaacttaaaaccatacaatggagtccaggttgattctaaagcttttaacttaaaatgattgttattttcttggaatttaatgtaacacaacaatcaaatcatccaataaaaattgcagtatattggattttatgc

SEQ ID NO: 718 - protein, 261 aa, Arabidopsis thaliana
KKLGSPSSSSSLTSEESSVPRKINKMAAIRTMTNMILREFIHHPLLLHSSSKSCQSLLPCLRLTPLISPIHSNSRLVSVRCAASTSGGSGGDRKVSSRLSQVQQMLHEAEERASSAGNEPTPQITLDNVTLNFARSGGPGGQNVNKLNTKVDMRFNVKNAYWLSDRIREKILLTEKNRINKDGELVISSTKTRTQKGNIDDALEKLQAIIDAASYVPPPPSEEQKKKIVKLAAKADNKRLKSKKVLSDKKSARRSRGSYDD

SEQ ID NO: 719 - protein, 236 aa, Arabidopsis thaliana
MAAIRTMTNMILREFIHHPLLLHSSSKSCQSLLPCLRLTPLISPIHSNSRLVSVRCAASTSGGSGGDRKVSSRLSQVQQMLHEAEERASSAGNEPTPQITLDNVTLNFARSGGPGGQNVNKLNTKVDMRFNVKNAYWLSDRIREKILLTEKNRINKDGELVISSTKTRTQKGNIDDALEKLQAIIDAASYVPPPPSEEQKKKIVKLAAKADNKRLKSKKVLSDKKSARRSRGSYDD

SEQ ID NO: 720 - protein, 230 aa, Arabidopsis thaliana
MTNMILREFIHHPLLLHSSSKSCQSLLPCLRLTPLISPIHSNSRLVSVRCAASTSGGSGGDRKVSSRLSQVQQMLHEAEERASSAGNEPTPQITLDNVTLNFARSGGPGGQNVNKLNTKVDMRFNVKNAYWLSDRIREKILLTEKNRINKDGELVISSTKTRTQKGNIDDALEKLQAIIDAASYVPPPPSEEQKKKIVKLAAKADNKRLKSKKVLSDKKSARRSRGSYDD

SEQ ID NO: 721 - DNA, 746 bp, Arabidopsis thaliana
catcgactgctccttggtggatctgcgagttttcaataaaccaccggagtgaggaagaagcagacgacgacgacgaagatgagttcatcgactgttcgtgatttgcagagagacctagaaaacaaggctaatgatctcggcaaaatccagaaagatatcgggaagaatcatcagctgagaaagaagtatacgatccaactcggtgagaatgagctcgtgcttaaggagttagatttgctggaagaagatgctaacgtctacaaattgattggtccggtgttagtgaagcaggatttggctgaagctaatgcaaatgttcgtaaacgaattgagtacatctctgctgaattgaaacggcttgatgcaattcttcaagatatggaagaaaaacaaaacaacaagagagaaacgataatgaagttacaacaaaggctacaaactatccaggcaggaaaagcaaaggcttgattgagctactcagttgcaaccacacttgttaaaccctttccactgtgctcggccttgtctcaatggtgtcatattcagttactgagggttcttgtggtttcagtttattgggtgattgatgtctctttgtgtcactaatctttttttgttgacaactagacttaagtgtgtaacttatacatgatcttgtcgccctttatgaagttatgagtttggagatttacaaaaaaaatattgtgtgtgtgcgcctaatttggtcttcatacatacttcaagcc

SEQ ID NO: 722 - protein, 129 aa, Arabidopsis thaliana
MSSSTVRDLQRDLENKANDLGKIQKDIGKNHQLRKKYTIQLGENELVLKELDLLEEDANVYKLIGPVLVKQDLAEANANVRKRIEYISAELKRLDAILQDMEEKQNNKRETIMKLQQRLQTIQAGKAKA

SEQ ID NO: 723 - DNA, 888 bp, Arabidopsis thaliana
atccttataacctttcttctcctcttctccttcttcctcttatgcaaacatatatttacataaacacacacatatatatagtaagagagagagagagagatctagcaagatagtgaaagcttcataatcaatggaaggggttgacaacacaaatcctatgttaaccctagaagaaggcgaaaacaacaatcctttttcttccttagatgacaaaacattaatgatgatggctccttcgttaatcttttcgggcgatgtaggtccatcttcttcttcttgtactccagcaggttatcatctatctgctcagctggagaactttcgaggaggtggaggagagatggcaggattagtgagtaataatagcaataatagtgatcataataagaattgcaacaaaggaaaagggaagagaacttcggcaatgcagaggatagctttccatacaaggagtgatgatgatgttcttgatgatggttatcgttggcgaaagtacggtcagaaatctgtcaagaacaatgctcatcccaggagctattatagatgtacataccacacatgcaacgtgaagaaacaagtgcaaagactggcaaaagatccaaacgttgtcgtaacaacctacgaaggtgttcataatcatccttgtgagaagctcatggagactcttagccctctccttaagcaacttcagttcctctcaagagtttctgatctgtaattattgaatgttaattagtggtgtaatacattaattatgctttaatctctccattgaccctcaatctccaaagagacaaatgtatagaataaatctcataacatacatgctttaggtttattgagacattgatctatgttttgctttaatttgattcgtctaattgtccc

SEQ ID NO: 724 - protein, 195 aa, Arabidopsis thaliana
MEGVDNTNPMLTLEEGENNNPFSSLDDKTLMMMAPSLIFSGDVGPSSSSCTPAGYHLSAQLENFRGGGGEMAGLVSNNSNNSDHNKNCNKGKGKRTSAMQRIAFHTRSDDDVLDDGYRWRKYGQKSVKNNAHPRSYYRCTYHTCNVKKQVQRLAKDPNVVVTTYEGVHNHPCEKLMETLSPLLKQLQFLSRVSDL

SEQ ID NO: 725 - protein, 186 aa, Arabidopsis thaliana
MLTLEEGENNNPFSSLDDKTLMMMAPSLIFSGDVGPSSSSCTPAGYHLSAQLENFRGGGGEMAGLVSNNSNNSDHNKNCNKGKGKRTSAMQRIAFHTRSDDDVLDDGYRWRKYGQKSVKNNAHPRSYYRCTYHTCNVKKQVQRLAKDPNVVVTTYEGVHNHPCEKLMETLSPLLKQLQFLSRVSDL

SEQ ID NO: 726 - protein, 165 aa, Arabidopsis thaliana
MMMAPSLIFSGDVGPSSSSCTPAGYHLSAQLENFRGGGGEMAGLVSNNSNNSDHNKNCNKGKGKRTSAMQRIAFHTRSDDDVLDDGYRWRKYGQKSVKNNAHPRSYYRCTYHTCNVKKQVQRLAKDPNVVVTTYEGVHNHPCEKLMETLSPLLKQLQFLSRVSDL

SEQ ID NO: 727 - DNA, 628 bp, Arabidopsis thaliana
ttgtcctcttctcaaacatatctcaacttattgtttgaatataaaaagagatatcaaaaagaagagaagaccaaaaacaaaacaaaaatctctaataaaaatggcttccaaagctatcttcttctctttctttgtcgtctccgccgtgtgtttgtcttctctggcaggtttcgccgccgctgatgctgacgacttcgatcgtttccagattcaaggatcagtttactgtgacacttgccgtgtccaattcgttacccgtctcagcaaattcctcgaaggcgcgaaagtgaagttggagtgcaggagcagaacaaacggaaccataacattgaccaaagaagctgttaccgacaaaacaggaagctacaaaatggaagtaaccggtgaccacgaggaagaagtttgcgagcttgttttggtccaatcaccagacagtggttgcagtgatgtcagcacagaggcttacttacgtaacgccgctaagatcagtttaacggcgaatgacggaatcgtctcccacgagacacgtattgttaaccctctcggtttcatggttcagactccattggctgattgtcctgctgccttcaaggagcttggtattgtccctgacgtaacattctaagcg

SEQ ID NO: 728 - protein, 207 aa, Arabidopsis thaliana
CPLLKHISTYCLNIKRDIKKKRRPKTKQKSLIKMASKAIFFSFFVVSAVCLSSLAGFAAADADDFDRFQIQGSVYCDTCRVQFVTRLSKFLEGAKVKLECRSRTNGTITLTKEAVTDKTGSYKMEVTGDHEEEVCELVLVQSPDSGCSDVSTEAYLRNAAKISLTANDGIVSHETRIVNPLGFMVQTPLADCPAAFKELGIVPDVTF

SEQ ID NO: 729 - protein, 174 aa, Arabidopsis thaliana
MASKAIFFSFFVVSAVCLSSLAGFAAADADDFDRFQIQGSVYCDTCRVQFVTRLSKFLEGAKVKLECRSRTNGTITLTKEAVTDKTGSYKMEVTGDHEEEVCELVLVQSPDSGCSDVSTEAYLRNAAKISLTANDGIVSHETRIVNPLGFMVQTPLADCPAAFKELGIVPDVTF

SEQ ID NO: 730 - DNA, 658 bp, Arabidopsis thaliana
aggaatcggacaaaaaccaagtgaaaccagaaaccctcagactgaaattggtattggccggtggaggatgggagcagagacaaacggagttgcagagaaagtcgacgacttgctggaggctgctagatacaatgatattgatgatctcagaaccttggcctctgatggtctctctcttcactctcgtgattcacaaggccgaacagccctgcatatggccgcagcgaatggacatatgactatagtggagtatcttatcagtgaaggagtggatatcaacgctcttaacgatgagaacaatgctcctctacattgggcatgcttgaatggccatgtcgaggtggtaaagagattgatcttggctggagcaagtctaagtcttttgaatcggtacgagagaactccaatggatgaagctattggtgcggagaagatggagattatagatgctattaacacaactgttgcccaaatggaacttgaaaataccagtatgacatgacttttcagacaacttcatcctcagcatcctaaatgttttctctctgtctctctgaattaaagatgagtttttgtattgtgggattgttgatttgatacctagtctagttgttagaactggaatcatatgaattcaaaatctttggttgcaatatcc

SEQ ID NO: 731 - protein, 166 aa, Arabidopsis thaliana
GIGQKPSETRNPQTEIGIGRWRMGAETNGVAEKVDDLLEAARYNDIDDLRTLASDGLSLHSRDSQGRTALHMAAANGHMTIVEYLISEGVDINALNDENNAPLHWACLNGHVEVVKRLILAGASLSLLNRYERTPMDEAIGAEKMEIIDAINTTVAQMELENTSMT

SEQ ID NO: 732 - protein, 144 aa, Arabidopsis thaliana
MGAETNGVAEKVDDLLEAARYNDIDDLRTLASDGLSLHSRDSQGRTALHMAAANGHMTIVEYLISEGVDINALNDENNAPLHWACLNGHVEVVKRLILAGASLSLLNRYERTPMDEAIGAEKMEIIDAINTTVAQMELENTSMT

SEQ ID NO: 733 - protein, 95 aa, Arabidopsis thaliana
MAAANGHMTIVEYLISEGVDINALNDENNAPLHWACLNGHVEVVKRLILAGASLSLLNRYERTPMDEAIGAEKMEIIDAINTTVAQMELENTSMT

SEQ ID NO: 734 - DNA, 823 bp, Arabidopsis thaliana
attttttcacaattcatatcctgtctgatgaacagtagctgttagactctctctctttctctcttctctgttcttcttcatcttctctagccgaatccatccttcagatactactctgtaatttcactacaatcatctcagccaaatgggttcggaagaagagaaggtcgttgttcccagaaactttagattattggaagagctagaaagaggtgagaaaggaattggagatgggacagtgagttatggaatggatgatgctgatgatattttgatgcaatcttggactggtaccattcttggtcctcataatactgcgtatgaagggaaaatctttcagctgaagctattctgtggaaaggattatccggaaagtccacctactgtgaggtttcagagtcgtataaacatggcttgtgtcaatcctgagaatggagtggttgatccgagtcacttccctatgctttccaactggagaagagaattcacaatggaggatctactgattcagcttaaaaaagaaatgatgtcatcgcagaaccgcaagttagctcaacccttggaaggtaatgaggaaggcaggacagacccaaagggactagtggtgaaatgttgcgtgatgtgaaaagaggtaatgaggaatttataagaatttaagagacaaaacaatgtatataaacagcatttgaagggctttgagattggcctaagaaccctttcttctataggccttcttaatcctaccatttgattatgtattatgtaatatttgagaatatattcaccaaaaacaggtgcccttaataaacctccactcttcttc

SEQ ID NO: 735 - protein, 159 aa, Arabidopsis thaliana
MGSEEEKVVVPRNFRLLEELERGEKGIGDGTVSYGMDDADDILMQSWTGTILGPHNTAYEGKIFQLKLFCGKDYPESPPTVRFQSRINMACVNPENGVVDPSHFPMLSNWRREFTMEDLLIQLKKEMMSSQNRKLAQPLEGNEEGRTDPKGLVVKCCVM

SEQ ID NO: 736 - protein, 124 aa, Arabidopsis thaliana
MDDADDILMQSWTGTILGPHNTAYEGKIFQLKLFCGKDYPESPPTVRFQSRINMACVNPENGVVDPSHFPMLSNWRREFTMEDLLIQLKKEMMSSQNRKLAQPLEGNEEGRTDPKGLVVKCCVM

SEQ ID NO: 737 - protein, 116 aa, Arabidopsis thaliana
MQSWTGTILGPHNTAYEGKIFQLKLFCGKDYPESPPTVRFQSRINMACVNPENGVVDPSHFPMLSNWRREFTMEDLLIQLKKEMMSSQNRKLAQPLEGNEEGRTDPKGLVVKCCVM

SEQ ID NO: 738 - DNA, 1045 bp, Arabidopsis thaliana
aaaaaaccaaaaaaaagaaaggagagaggccgacttggggtataagccagagttcttcttctttttcaagcttcttcttctcatcagtcatcaccggaatctaatttatactcgcaaaactcagcgattcgtttcgtttctgacaagtttccaattctacagcaatggatctcaatctcgatgcacctcactccatgggaacgaccatcatcggcgtcacttacaatggaggtgtcgtcctcggagccgactcacgtaccagcaccggtatgtacgtagcgaatcgagcttctgataagattacacaactgacagataatgtctacgtctgccgctctggatcggctgctgattctcaagttgtatctgactatgtccgctacttccttcaccagcatacaattcagcatggacaacccgcaactgttaaggtttctgccaaccttatcaggatgctcgcatataataacaagaacatgctccaaactggtctcatcgttggaggatgggataaatatgagggtgggaagatctacgggatcccactcggtggaactgtagtcgagcaaccgtttgccattggaggctctggttcgagctatctctacgggttcttcgaccaggcttggaaagataacatgaccaaagaagaagcagagcaacttgttgtgaaggcggtttcactagccatcgcccgtgatggagccagtggtggtgtcgtacggactgtcataatcaactcagagggagtgacgagaaacttttaccctggagataagttgcagctttggcacgaagaattggagccccaaaactcactcttagacattctgaacgctgctggtcctgaaccaatggccatgtgatctgcaaacaacgatcattatcttactctgttgggcaaacattttagatatttcattacagtttccagtgtctttaagactttaaactctgtttgaggttctgttgtaatgaatgacccgatctttctgttttaaacggatatcgtgtttcttatggctatggttttaattcctctgtc

SEQ ID NO: 739 - protein, 233 aa, Arabidopsis thaliana
MDLNLDAPHSMGTTIIGVTYNGGVVLGADSRTSTGMYVANRASDKITQLTDNVYVCRSGSAADSQVVSDYVRYFLHQHTIQHGQPATVKVSANLIRMLAYNNKNMLQTGLIVGGWDKYEGGKIYGIPLGGTVVEQPFAIGGSGSSYLYGFFDQAWKDNMTKEEAEQLVVKAVSLAIARDGASGGVVRTVIINSEGVTRNFYPGDKLQLWHEELEPQNSLLDILNAAGPEPMAM

SEQ ID NO: 740 - protein, 223 aa, Arabidopsis thaliana
MGTTIIGVTYNGGVVLGADSRTSTGMYVANRASDKITQLTDNVYVCRSGSAADSQVVSDYVRYFLHQHTIQHGQPATVKVSANLIRMLAYNNKNMLQTGLIVGGWDKYEGGKIYGIPLGGTVVEQPFAIGGSGSSYLYGFFDQAWKDNMTKEEAEQLVVKAVSLAIARDGASGGVVRTVIINSEGVTRNFYPGDKLQLWHEELEPQNSLLDILNAAGPEPMAM

SEQ ID NO: 741 - protein, 198 aa, Arabidopsis thaliana
MYVANRASDKITQLTDNVYVCRSGSAADSQVVSDYVRYFLHQHTIQHGQPATVKVSANLIRMLAYNNKNMLQTGLIVGGWDKYEGGKIYGIPLGGTVVEQPFAIGGSGSSYLYGFFDQAWKDNMTKEEAEQLVVKAVSLAIARDGASGGVVRTVIINSEGVTRNFYPGDKLQLWHEELEPQNSLLDILNAAGPEPMAM

SEQ ID NO: 742 - DNA, 576 bp, Arabidopsis thaliana
ggattaacctgaatagatcggatcctcggaaatcaggcgaagaagacgactaaatttctcctgggattagagagagaggaaggaaaaatggcgtcggggtgggggataacgggaaacaaagggaggtgttacgatttctggatggatttcagcgaatgtatgtctcattgcagagagcccaaagactgtactcttcttcgtgaagactacctcgagtgtcttcaccattccaaagagttccaacgaagaaacaggatatacaaagaagaacaacgtaaactaagagctgcatcaaggaaaggcgaagaaaccggggatgggactcatactcatcactagtcgagattttcctcctatctccaaagtttgcatctttcgaagaataaacaaaagtttcttgaagatttctgtatcttgtgtgccaaacttcatttgatcgtattcagtttgcttttgcaatggatttttttgtctttgctttgtctattacctttgaccgagttgtaatatgcctttggctactcgtcaaacacagactccttctttaatggtaataattactcctacagttatatt

SEQ ID NO: 743 - protein, 83 aa, Arabidopsis thaliana
MASGWGITGNKGRCYDFWMDFSECMSHCREPKDCTLLREDYLECLHHSKEFQRRNRIYKEEQRKLRAASRKGEETGDGTHTHH

SEQ ID NO: 744 - protein, 65 aa, Arabidopsis thaliana
MDFSECMSHCREPKDCTLLREDYLECLHHSKEFQRRNRIYKEEQRKLRAASRKGEETGDGTHTHH

SEQ ID NO: 745 - protein, 59 aa, Arabidopsis thaliana
MSHCREPKDCTLLREDYLECLHHSKEFQRRNRIYKEEQRKLRAASRKGEETGDGTHTHH

SEQ ID NO: 746 - DNA, 914 bp, Arabidopsis thaliana
tgagataagttccgtggttatcccattaaccttctttctacacaacacaaaactatatataaagatcatacatgtaataacgtcctgcaactattacaatcattctcgcttgaattaacgtggacgtcattgtttttggattgttaatcaaaggcggcgttacttttttttaatataattgtttctttaggatctttgtctctggaaaatgaaggaagacgcaggaaaccctttgcatctcacgtcactgaaccatgtctctgtcttgtgccgatccgtcgacgaatctatgaatttttaccaaaaggtgttagggttcatcccgatacgaagacctgaatccttaaattttgaaggcgcttggttgtttggtcacgggattggaatacacctcctgtgtgccccagaaccagagaaacttcccaagaaaactgcgattaatcccaaggataatcacatctctttccagtgtgagagtatgggagtagtggagaagaagctggaggaaatggggatagattatgtaagggcattagtagaagaaggagggatccaagtggaccagctcttcttccatgaccctgatggcttcatgatcgagatttgcaactgcgatagcctccccgtagtccccctcgtaggagaaatggctcggtcctgctcaagagtcaaactccaccagatggtgcagccacaaccgcagactcagatccaccaagtggtctacccttaattataaacagctcacttcttctttatattgtgtgtgtttgtgtattggtgtgcttggttttgggtgtaatatacaataagagaccgatgtgaatcagcgaatgtgattcccttcgaggaaatgaccattctctttgctccacaagcttatataatataatcaagggaaatcatgttttact

SEQ ID NO: 747 - protein, 174 aa, Arabidopsis thaliana
MKEDAGNPLHLTSLNHVSVLCRSVDESMNFYQKVLGFIPIRRPESLNFEGAWLFGHGIGIHLLCAPEPEKLPKKTAINPKDNHISFQCESMGVVEKKLEEMGIDYVRALVEEGGIQVDQLFFHDPDGFMIEICNCDSLPVVPLVGEMARSCSRVKLHQMVQPQPQTQIHQVVYP

SEQ ID NO: 748 - protein, 147 aa, Arabidopsis thaliana
MNFYQKVLGFIPIRRPESLNFEGAWLFGHGIGIHLLCAPEPEKLPKKTAINPKDNHISFQCESMGVVEKKLEEMGIDYVRALVEEGGIQVDQLFFHDPDGFMIEICNCDSLPVVPLVGEMARSCSRVKLHQMVQPQPQTQIHQVVYP

SEQ ID NO: 749 - DNA, 952 bp, Arabidopsis thaliana
gcgaaagaataaaagtgtgacaaattaagaagagagaaatggggaaagacggagaaggagacaagaagcgagaaacaatggcggtgatgagcttaatgaaggatcaacagaatccaattcaacagtttcaagtcaaattcaaggagattgagactggtttcaagtcgtggttatcaaaacagaagttaccggtggaagccgccgttgtcacggccatgggtggtgttcagggagcttttatcggtggtttaatgggaactttatctcctgaaatgcctcaggctggtattgaccctcaagctatggcttcgctaaagcaaactcaggctcttgttggtgggcctttggttcaagctcggaactttgctgctataactggtgttaatgctggtattgcttgtgttatgaaacggattagaggcaaggaggatttagaatctgctgtggtcgcagcattcggatctggagttgcatattctcttgtgagcgcaggattacaaggacagcctatgaatgcaatcaccactgctgctggtttcgctgtttttcaaggagtgtttttcaagttgggtgaaaggttctctaaaccaagtgttgaagatccatattacacccggggaagatctatgttgttgaaactgggtctagagaagtatgagaagaacttcaagaaaggtttattagctgacccaactctgccattgctcactgatagcgcgctaagagacgtgagcatcccgcctggaccaaggctactgatacttgatcacatccaaagggaccctgagctaaagggcaagcggggaagtcgtggttgagacttgagagcctctctccttcttctgcagaatctttgttgttgtaagatgttataaggatctcaagcacctattattcttaaatattattggttgatgttgctagcaagaaaaattgaatacaaccttaaaag

SEQ ID NO: 750 - protein, 259 aa, Arabidopsis thaliana
MGKDGEGDKKRETMAVMSLMKDQQNPIQQFQVKFKEIETGFKSWLSKQKLPVEAAVVTAMGGVQGAFIGGLMGTLSPEMPQAGIDPQAMASLKQTQALVGGPLVQARNFAAITGVNAGIACVMKRIRGKEDLESAVVAAFGSGVAYSLVSAGLQGQPMNAITTAAGFAVFQGVFFKLGERFSKPSVEDPYYTRGRSMLLKLGLEKYEKNFKKGLLADPTLPLLTDSALRDVSIPPGPRLLILDHIQRDPELKGKRGSRG

SEQ ID NO: 751 - protein, 246 aa, Arabidopsis thaliana
MAVMSLMKDQQNPIQQFQVKFKEIETGFKSWLSKQKLPVEAAVVTAMGGVQGAFIGGLMGTLSPEMPQAGIDPQAMASLKQTQALVGGPLVQARNFAAITGVNAGIACVMKRIRGKEDLESAVVAAFGSGVAYSLVSAGLQGQPMNAITTAAGFAVFQGVFFKLGERFSKPSVEDPYYTRGRSMLLKLGLEKYEKNFKKGLLADPTLPLLTDSALRDVSIPPGPRLLILDHIQRDPELKGKRGSRG

SEQ ID NO: 752 - protein, 243 aa, Arabidopsis thaliana
MSLMKDQQNPIQQFQVKFKEIETGFKSWLSKQKLPVEAAVVTAMGGVQGAFIGGLMGTLSPEMPQAGIDPQAMASLKQTQALVGGPLVQARNFAAITGVNAGIACVMKRIRGKEDLESAVVAAFGSGVAYSLVSAGLQGQPMNAITTAAGFAVFQGVFFKLGERFSKPSVEDPYYTRGRSMLLKLGLEKYEKNFKKGLLADPTLPLLTDSALRDVSIPPGPRLLILDHIQRDPELKGKRGSRG

SEQ ID NO: 753 - DNA, 632 bp, Arabidopsis thaliana
attccccatcgcacagacccgcctaagaatccgagagagaagaagagataatgcagatcttcgtcaaaaccctcaccggcaaaactataaccctagaggttgagagcagcgacaccatcgacaatgttaaagccaaaatccaggacaaatagggcataccacctgatcaacagaggctgatttttgctggtaagcaattggaagatggccggaccttagctgactacaacatccagaaagagtctactcttcatcttgtcctcaggctcagaggtggaaccatgatcaaggtgaagacactcactggaaaagaaatcgagattgatatcgaaccaaccgacactattgatcggatcaaagaacgtgttgaagagaaagaaggcatccctcctgttcaacaaaggctcatctatgccggaaaacagcttgctgatgacaaaacggccaaagattatgcgatagagggaggctctgttcttcatttggttcttgctcttaggggtggtcttctctgatctgaataaataagcttttcaacaaacatctttcccctcactattgtcctccttttgtggaattcatgacacacaaaaattgctatgggaaattggaatattatgatgttttttctc

SEQ ID NO: 754 - protein, 77 aa, Arabidopsis thaliana
MIKVKTLTGKEIEIDIEPTDTIDRIKERVEEKEGIPPVQQRLIYAGKQLADDKTAKDYAIEGGSVLHLVLALRGGLL

SEQ ID NO: 755 - DNA, 972 bp, Arabidopsis thaliana
acatcatcaacttcatcaattcatcacctttgtctctctttcaagcttctctgtgtgtgatctccgttggtcaacaacaactacaacagcttattgagcagagatggatcatcaatttggatatggtgttgaagttactgggttatctccatctgttactcataatgatcttatcgatttcttctctttctctggtactatccaagatattgatattgtcaggtcgggtgagcaagcttgtactgcttatgtgatgtttaaggattcttattctcaagaaactgctgttttactcactggcgcaacgatattggatcagcgtgtttgtataactcgttggggacaacatcacgaagagttcgatttctggaatgcgacttcgcgaggttttgaagatgaatcggactcacaacattatgctcaacgaagcgagttcaacgctggagaagcagtgacaaaagctcaagaagtggtgaaaataatgcttgccacaggattcgtgctaggcaaagacgctttaagcaaagctaaagcctttgatgaatcccacggcgtatcagctgcagcggtggctagagtatctcaactagaacagaggattggtcttactgacaaaatctttaccggacttgaagctgttagaatgactgaccaaaggtatcatgtttcagatacagctaaatcagctgtctttgccacaggaagaaccgcggcagcagctgcaactagtgttgtcaatagcagttacttctccagcggagctctttggctgtctggtgcattagagagagctgctaaagccgcatctgatctcggtacccgcggctcaaggcagtgaatagaccaatggcccgattcagaaccgtattcgtctgtgaatatatatgatgcaaagctgatcatgaataactggctcatgaagtgtgataagaccaaattttatcaaaacgaataccatatagaaatctatct

SEQ ID NO: 756 - protein, 244 aa, Arabidopsis thaliana
MDHQFGYGVEVTGLSPSVTHNDLIDFFSFSGTIQDIDIVRSGEQACTAYVMFKDSYSQETAVLLTGATILDQRVCITRWGQHHEEFDFWNATSRGFEDESDSQHYAQRSEFNAGEAVTKAQEVVKIMLATGFVLGKDALSKAKAFDESHGVSAAAVARVSQLEQRIGLTDKIFTGLEAVRMTDQRYHVSDTAKSAVFATGRTAAAAATSVVNSSYFSSGALWLSGALERAAKAASDLGTRGSRQ

SEQ ID NO: 757 - protein, 194 aa, Arabidopsis thaliana
MFKDSYSQETAVLLTGATILDQRVCITRWGQHHEEFDFWNATSRGFEDESDSQHYAQRSEFNAGEAVTKAQEVVKIMLATGFVLGKDALSKAKAFDESHGVSAAAVARVSQLEQRIGLTDKIFTGLEAVRMTDQRYHVSDTAKSAVFATGRTAAAAATSVVNSSYFSSGALWLSGALERAAKAASDLGTRGSRQ

SEQ ID NO: 758 - DNA, 686 bp, Arabidopsis thaliana
atcaaccgaaacttttattcaaagagatctatacaaacagaactcaccaatcttatctctttccttctccaccttgctttccaatctcaagctttaactctccctgaaaatgatgataaacgcaaagaagctcatgaagttggccaagaaatggcaacaaagagcagccctcaagagaaaaagaatttcatttcagagatcaagtattactactagcagccaaacagctgtagaaaagggttgtttcgtggtttacacggctgataagatccgtttttcatttcccttaagttacctaagcaacactattatccaagagctcttgaaaatatctgaagaagagttcggtctcccgacggaaggaccaatcacattgccattcgattcggcctttttagagtatctcatcaatctgatccaaagacgaatggatgaagatacagaaaaggctctgttattgtcaatctcaagtgctagaagctcttttcaaccacaacaacattgtagtgctactcaacagttgcttgtgttttagagtttcgcaaatttctgtattttgtagagtttatagattagacagcttaattgtttcagaatacaaactattcttatttggtctctcatttaagttgtctcataaaaattcaaaaatgaccttccatataaatggaaactttatcccaact

SEQ ID NO: 759 - protein, 141 aa, Arabidopsis thaliana
MMINAKKLMKLAKKWQQRAALKRKRISFQRSSITTSSQTAVEKGCFVVYTADKIRFSFPLSYLSNTIIQELLKISEEEFGLPTEGPITLPFDSAFLEYLINLIQRRMDEDTEKALLLSISSARSSFQPQQHCSATQQLLVF

SEQ ID NO: 760 - protein, 140 aa, Arabidopsis thaliana
MINAKKLMKLAKKWQQRAALKRKRISFQRSSITTSSQTAVEKGCFVVYTADKIRFSFPLSYLSNTIIQELLKISEEEFGLPTEGPITLPFDSAFLEYLINLIQRRMDEDTEKALLLSISSARSSFQPQQHCSATQQLLVF

SEQ ID NO: 761 - protein, 133 aa, Arabidopsis thaliana
MKLAKKWQQRAALKRKRISFQRSSITTSSQTAVEKGCFVVYTADKIRFSFPLSYLSNTIIQELLKISEEEFGLPTEGPITLPFDSAFLEYLINLIQRRMDEDTEKALLLSISSARSSFQPQQHCSATQQLLVF

SEQ ID NO: 762 - DNA, 908 bp, Arabidopsis thaliana
acatcataagtcttcataccttcggattcttcaatctcttctacacatcatgaacggtccagtcccctccagccgctcctggtcggtgagcgaggagtcgctgagaaggtacgtggggttcgcgagtgagagctgcatccaagagctcttatcttcctctgaggccggacgctttgggaacgcttccaatgggtggaagatggtgaggcatgactcgaacggtgtcgagatttcaaaacgcgactcgggatcgctacacgcgtttcgaagccgcaggatcctcacatcagtctccccagagcagttcatcacggttgcaaatgcgatagacgcggccaagcaatgggaaggcgacctggtggaggcaacacacattagagacatagatgaaaatctgagcgtaatccgtttaaggtttggcgaaaactcgaaaccgctctttaggaacagagagttcattatctacgaaagacgtgagaccatgcaagacggtactctcgtggtggcggttgcgtcgctaccaaaggagatggcagaaggattggagccaacagagaaaaagaaaaacaattatattagagggtttttggttgagtcgggttgggttttggagaagcttgaagatacctcttgcatgattacttatgttgttcagttggatcctgcaggatggttgccaaagtgttttgtgaacagactaaacacaaagttagtaatgataattgataaccttagaaaggttgctcaagcttatctaccctcttttcctcctccttagctctctctttctttgtctccttctttttgtttgtaaacatatttttccaaaagagtgaagtgatcgtaattaagaggcaattactcctccctcttttctactctctaaataaagtaataaaccttaatcg

SEQ ID NO: 763 - protein, 258 aa, Arabidopsis thaliana
HHKSSYLRILQSLLHIMNGPVPSSRSWSVSEESLRRYVGFASESCIQELLSSSEAGRFGNASNGWKMVRHDSNGVEISKRDSGSLHAFRSRRILTSVSPEQFITVANAIDAAKQWEGDLVEATHIRDIDENLSVIRLRFGENSKPLFRNREFIIYERRETMQDGTLVVAVASLPKEMAEGLEPTEKKKNNYIRGFLVESGWVLEKLEDTSCMITYVVQLDPAGWLPKCFVNRLNTKLVMIIDNLRKVAQAYLPSFPPP

SEQ ID NO: 764 - protein, 242 aa, Arabidopsis thaliana
MNGPVPSSRSWSVSEESLRRYVGFASESCIQELLSSSEAGRFGNASNGWKMVRHDSNGVEISKRDSGSLHAFRSRRILTSVSPEQFITVANAIDAAKQWEGDLVEATHIRDIDENLSVIRLRFGENSKPLFRNREFIIYERRETMQDGTLVVAVASLPKEMAEGLEPTEKKKNNYIRGFLVESGWVLEKLEDTSCMITYVVQLDPAGWLPKCFVNRLNTKLVMIIDNLRKVAQAYLPSFPPP

SEQ ID NO: 765 - protein, 192 aa, Arabidopsis thaliana
MVRHDSNGVEISKRDSGSLHAFRSRRILTSVSPEQFITVANAIDAAKQWEGDLVEATHIRDIDENLSVIRLRFGENSKPLFRNREFIIYERRETMQDGTLVVAVASLPKEMAEGLEPTEKKKNNYIRGFLVESGWVLEKLEDTSCMITYVVQLDPAGWLPKCFVNRLNTKLVMIIDNLRKVAQAYLPSFPPP

SEQ ID NO: 766 - DNA, 749 bp, Arabidopsis thaliana
actctcctttctcaattaatataagccaatcaccatcaaaatatcatttgagaactccagaaacctgcttcaatggcgatcgacaagcttccacttcttctctttctctccatactcctctgcctaaatcgccctgttcttagcgacaccgatgaagaggacattcttctcacaggaatcaacagctacagaacaacacagaatctaacaatcttaagcaagaacgaaaacgcagaatgcctagctgacgaaatcgcagaccaattcaagaacaaaccttgtaccaacgacactggctcagccacagtacctggaactgagccacagttcgcaaactaccctcagattctagcaaaatgccacttgaacgtctcagacacgagagacggctcgattatgcctgcatgtgttcctcgtttagaatcaaacctcgtcctcacaaacttcaccaagtcacaatactcaatgagtttgaacgattccaagtttacagggattggtattggtaaagaagatgattggatcgttgtagtcctcactaccaacacaccagaaggaagctattctacagctactcctacaaaacaagagtctaatggcttcacctttggtgttggtctcgttagttatttagtcattttcatgtactcttccttttgtttctttctcttttgagatatcaaatgttttgatgagttatcaaacactctttcctttagactatcaagaataaattttgttaaagattg

SEQ ID NO: 767 - protein, 200 aa, Arabidopsis thaliana
MAIDKLPLLLFLSILLCLNRPVLSDTDEEDILLTGINSYRTTQNLTILSKNENAECLADEIADQFKNKPCTNDTGSATVPGTEPQFANYPQILAKCHLNVSDTRDGSIMPACVPRLESNLVLTNFTKSQYSMSLNDSKFTGIGIGKEDDWIVVVLTTNTPEGSYSTATPTKQESNGFTFGVGLVSYLVIFMYSSFCFFLF

SEQ ID NO: 768 - DNA, 949 bp, Arabidopsis thaliana
aggggtgactctcgaacacgatgctctgaagactgaaaaaggcgtaaacttttttcacctggctagggttcttggtcgtcgttaactggcatctagtatggctttctgcactaaacttggcggtcactggaaacaaggggtaaatgttccagtgtcatcaatgctcggttctcttcgctacatgtccacaaaactttatattggtggcctgtcccctggaactgacgagcactccttgaaggacgctttctctagcttcaatggagtgacagaggcaagagtcatgacaaacaaagtgaccgggaggtctagaggttatggatttgttaacttcataagcgaggattctgccaactctgctatttcagcaatgaatggacaggagctgaatgggtttaacataagtgtgaacgttgcaaaagattggccaagtttgccattgtctttggatgagagtatagaagaagctgagaagaaagaaaataagatgatgagccgatctgtatggaaagatccattcgttgatgcgttcctgatgaagaagaagaatgcagctctgaacaggaaaatatggtcaaggagatcgacgattcttcccgagtatgttgattcggcggtgagaatctacaacggcaaaactcatgtgcgttgtaagatcacagaggggaaagttgggcataaattcggagagtttgcgtttacaagaaaagtgaagaagcatgctaaagcaaagtagcatctttgagaatgaattggtcagctgcttgaaaggattgtgttgaaaagccaaaaacgaatcaaatcaataaattctcaataggtaaaactcattagctcacatgatcatgtagacgaatattgagctttagaaagtctttagttttcttgtcgatttcgtatttttggaccacaaaagtgccaatgttattttggaattcgattaacaaat

SEQ ID NO: 769 - protein, 212 aa, Arabidopsis thaliana
MAFCTKLGGHWKQGVNVPVSSMLGSLRYMSTKLYIGGLSPGTDEHSLKDAFSSFNGVTEARVMTNKVTGRSRGYGFVNFISEDSANSAISAMNGQELNGFNISVNVAKDWPSLPLSLDESIEEAEKKENKMMSRSVWKDPFVDAFLMKKKNAALNRKIWSRRSTILPEYVDSAVRIYNGKTHVRCKITEGKVGHKFGEFAFTRKVKKHAKAK

SEQ ID NO: 770 - protein, 191 aa, Arabidopsis thaliana
MLGSLRYMSTKLYIGGLSPGTDEHSLKDAFSSFNGVTEARVMTNKVTGRSRGYGFVNFISEDSANSAISAMNGQELNGFNISVNVAKDWPSLPLSLDESIEEAEKKENKMMSRSVWKDPFVDAFLMKKKNAALNRKIWSRRSTILPEYVDSAVRIYNGKTHVRCKITEGKVGHKFGEFAFTRKVKKHAKAK

SEQ ID NO: 771 - protein, 184 aa, Arabidopsis thaliana
MSTKLYIGGLSPGTDEHSLKDAFSSFNGVTEARVMTNKVTGRSRGYGFVNFISEDSANSAISAMNGQELNGFNISVNVAKDWPSLPLSLDESIEEAEKKENKMMSRSVWKDPFVDAFLMKKKNAALNRKIWSRRSTILPEYVDSAVRIYNGKTHVRCKITEGKVGHKFGEFAFTRKVKKHAKAK

SEQ ID NO: 772 - DNA, 783 bp, Arabidopsis thaliana
attttgcacacataaccctaatttggtctcttactctaacccgagagataatggctcctacacaaaatctcttccttgtcgctattgccttcgccgtcattttcaccgcctccaccgtacatggtcgtcataatggtgcagaagatatcgtgcattcctcctgcgaacacgcgagctatccatcactatgcgtccgtactctttcgtcatactccggtccaaccatcaccaaccgccgcgatctagctcaagccgccataaaaatcagcctctcccacgctcaaagcgccgcgaagaaactcgcggtggtgcgagactcggtggggaagaagaagcaagagaaagcggcgcttgtggactgtgtggagatgattggagactctgtggacgagctaagccgtacgctcggcgttttgaagcacctccgtgtctctggcggttcagctaaagagttccggtggcagatgagcaatgcacagacgtgggctagcgcggcacttacggatgacgacacgtgtctcgatgggtttcaagggatggacgacggtgaaatcaaaacggaggtgaagcagtggatgacgaaagtggccagggttacgagcaacgcgctttacatggtcaaccagctagatgagacacgtggcaaaccccacgacgtacatctttgatgttaatgcactagatcgttttaatggacggtctttattgtgtgtgttggtttttcgttcatgtgttttaagtgtgagattatctatcgctacgatatatagaaatgagtttttg

SEQ ID NO: 773 - protein, 221 aa, Arabidopsis thaliana
FAHITLIWSLTLTREIMAPTQNLFLVAIAFAVIFTASTVHGRHNGAEDIVHSSCEHASYPSLCVRTLSSYSGPTITNRRDLAQAAIKISLSHAQSAAKKLAVVRDSVGKKKQEKAALVDCVEMIGDSVDELSRTLGVLKHLRVSGGSAKEFRWQMSNAQTWASAALTDDDTCLDGFQGMDDGEIKTEVKQWMTKVARVTSNALYMVNQLDETRGKPHDVHL

SEQ ID NO: 774 - protein, 205 aa, Arabidopsis thaliana
MAPTQNLFLVAIAFAVIFTASTVHGRHNGAEDIVHSSCEHASYPSLCVRTLSSYSGPTITNRRDLAQAAIKISLSHAQSAAKKLAVVRDSVGKKKQEKAALVDCVEMIGDSVDELSRTLGVLKHLRVSGGSAKEFRWQMSNAQTWASAALTDDDTCLDGFQGMDDGEIKTEVKQWMTKVARVTSNALYMVNQLDETRGKPHDVHL

SEQ ID NO: 775 - DNA, 723 bp, Arabidopsis thaliana
gatcgacaaatagggtttagaatccacacacccaaatcggaaggcgaagaaaatggaaggatgggatccgaacacgaagtcgacgttaacgcgaataccgcttctgacgacaaaggcgggtccaagagacggcgcggcatggacgcagaggctgaaagaggagtacaagtctctgattgcgtatacccaaatgaacaagtccaacgacaatgactggttccgtatctccgcttccaatcctgagggcacgcgttggactggcaagtgttggtatgttcacaaccttctcaaatacgaattcgatctccagttcgatatcccgattacctatccagccactgctcctgagcttgagctgcctgagattgacggcaagactcaaaagatgtatcgaggtgggaagatatgtttgactgtgcatttcaagcctctatgggccaaaaactgtcctcggtttggtatagcacatgcactttgtttggggctcgctccgtggttagctgcagagattccaattcttgtggactccggcgcgattaagcacaaagatgacgcagccacatctgcggaatcttaaatctatgtaacctttctatcaatctcagaaatgttgaggtgtttatcagtaatagctgaactcagaaatgactgaggtggatgcgtctaccctataaatacacttacatgaaacccaataaagatttaagctattgcaatgttttt

SEQ ID NO: 776 - protein, 174 aa, Arabidopsis thaliana
MEGWDPNTKSTLTRIPLLTTKAGPRDGAAWTQRLKEEYKSLIAYTQMNKSNDNDWFRISASNPEGTRWTGKCWYVHNLLKYEFDLQFDIPITYPATAPELELPEIDGKTQKMYRGGKICLTVHFKPLWAKNCPRFGIAHALCLGLAPWLAAEIPILVDSGAIKHKDDAATSAES

SEQ ID NO: 777 - protein, 128 aa, Arabidopsis thaliana
MNKSNDNDWFRISASNPEGTRWTGKCWYVHNLLKYEFDLQFDIPITYPATAPELELPEIDGKTQKMYRGGKICLTVHFKPLWAKNCPRFGIAHALCLGLAPWLAAEIPILVDSGAIKHKDDAATSAES

SEQ ID NO: 778 - DNA, 564 bp, Arabidopsis thaliana
accccaacaacacatcctccagggcttcatcgcgcgatctgcgactcctctctctctctgttctgagaaacgacgacgagaagaagaagatttagctgacgaaaactacaacaacaatggtgaaggttttgacttactttgggatgacattggccgctttcgccttttggcaatccatggacaaagttcatgtctggatcgctcttcatcaagacgagaagcaagaaagaatggagaaggaagcggaggtaaggcgagttagagcagagctgctacggaaagctagagaggaggatccacttgcctgatcttcttctgcagtcatgcttttgggtgtcttaatcatatcaattcacttctcctgcacattttgtctttactgttatggaccaaaattgagtttgcataaagtgacattaccatatatgcttttgaatgtgggatgatgatgaataattgtgtcttttgttgttcttcttaactaatgaaacaactagtggagaagtttcagcatcttgctctggttatgttttcctcttaactatgtatcattgagttcgtgtt

SEQ ID NO: 779 - protein, 86 aa, Arabidopsis thaliana
PQQHILQGFIARSATPLSLCSEKRRREEEDLADENYNNNGEGFDLLWDDIGRFRLLAIHGQSSCLDRSSSRREARKNGEGSGGKAS

SEQ ID NO: 780 - protein, 63 aa, Arabidopsis thaliana
MVKVLTYFGMTLAAFAFWQSMDKVHVWIALHQDEKQERMEKEAEVRRVRAELLRKAREEDPLA

SEQ ID NO: 781 - protein, 54 aa, Arabidopsis thaliana
MTLAAFAFWQSMDKVHVWIALHQDEKQERMEKEAEVRRVRAELLRKAREEDPLA

SEQ ID NO: 782 - DNA, 695 bp, Arabidopsis thaliana
atggaagttagagacttcattttttacactgcaaacgccgtttcgagacttccggcgaagaagacgaacgcaaagatgcagattttcgtgaaaacgctaaccggcaagaccatcaccctcgaggtcgagagcagtgacaccatcgacaatgtcaaggccaagatccaggacaaagaaggaattcctccggaccagcagaggttgatcttcgccggaaaacagcttgaagatggtcgtaccttggctgactacaacatccagaaagagtcgactttgcatcttgttctgaggcttaggggaggtatcattgagccttcattgatgatgttggctcgtaagtataaccaagacaaaatgatttgtcgcaagtgttatgctcgtctccacccaagagctgtgaactgcaggaagaagaagtgtggccatagcaaccagttgaggccaaagaagaagatcaagtgatcttttgttcaccaaaagcttatttacgttatttttgtgtttgctttgagaaagactcctctattgttctgacacaaaccttgtttcagtgaattttgattttacgattattgtttagtaaatctgatttttggctttttttcttcatcaattctaaaatctcttgcaaagtttcttcaaattagagttctgcaatccgaaatataaatttaagagccccattattcatctgt

SEQ ID NO: 783 - protein, 153 aa, Arabidopsis thaliana
MEVRDFIFYTANAVSRLPAKKTNAKMQIFVKTLTGKTITLEVESSDTIDNVKAKIQDKEGIPPDQQRLIFAGKQLEDGRTLADYNIQKESTLHLVLRLRGGIIEPSLMMLARKYNQDKMICRKCYARLHPRAVNCRKKKCGHSNQLRPKKKIK

SEQ ID NO: 784 - protein, 128 aa, Arabidopsis thaliana
MQIFVKTLTGKTITLEVESSDTIDNVKAKIQDKEGIPPDQQRLIFAGKQLEDGRTLADYNIQKESTLHLVLRLRGGIIEPSLMMLARKYNQDKMICRKCYARLHPRAVNCRKKKCGHSNQLRPKKKIK

SEQ ID NO: 785 - DNA, 1093 bp, Arabidopsis thaliana
aattaacaaactcggccgtcgtcatgtctctccgtaaaaccctaaccgccgtgaatcaatcttcgttaccgccggattctttaatctccgccggtaatctcactgtttcagaggtctctggttcatcttctagaatcagatttcgtcctcgtaaaatcaggaaagtttcgtcagatccgtcgccgaggatcattatcaccgcgtctcctcctctatcaacaaaatcgactgttgatatcgctctacgtcacttacaaagctccgatgaacttctcggagcattaatcacaacgcacaacgatcctccactgttcgactcaagtaatactccgtttctctccttagcgagatcaatcctataccaacaactcgcgacgaaagcagcgaaatgtatctacgatcgattcatctctctattcaacggtggagaagcaggtgttgttcctgaatctgtgatctcactctccgccgttgatcttcgtaagatcggtgtctccgggagaaaagctagttacctccacgatctagctgataaatacaacaacggtgtgctttctgatgaattgattctgaaaatgagtgatgaagagttgattgataggttaactttggttaaaggaattggagtgtggactgttcatatgtttatgatcttctcgttgcatagacctgatgtgttgcctgtgggagatcttggtgtgaggaaaggtgtgaaagatctttatggtttgaaaaatcttccaggtccattgcaaatggagcagctttgtgagaaatggcgtccttataggtctgttggttcatggtacatgtggagactaatcgagtctcgtaagaccaaatagcacctgcctgtaatcgggcagttaatatgatcctgtgacgaagaagcttttccatgcccatcacttcctttccaagtttcacttgctggtaatctgagttattttgtgtctgtaaattatggagcacgtaagaaaaatccttcttgtattttaactgtattccacggattatatttctgtgactgttgtaaacatgtatcatgtatggggtttcatttgacttggatattgagaagcatggcttattt

SEQ ID NO: 786 - protein, 280 aa, Arabidopsis thaliana
LTNSAVVMSLRKTLTAVNQSSLPPDSLISAGNLTVSEVSGSSSRIRFRPRKIRKVSSDPSPRIIITASPPLSTKSTVDIALRHLQSSDELLGALITTHNDPPLFDSSNTPFLSLARSILYQQLATKAAKCIYDRFISLFNGGEAGVVPESVISLSAVDLRKIGVSGRKASYLHDLADKYNNGVLSDELILKMSDEELIDRLTLVKGIGVWTVHMFMIFSLHRPDVLPVGDLGVRKGVKDLYGLKNLPGPLQMEQLCEKWRPYRSVGSWYMWRLIESRKTK

SEQ ID NO: 787 - protein, 273 aa, Arabidopsis thaliana
MSLRKTLTAVNQSSLPPDSLISAGNLTVSEVSGSSSRIRFRPRKIRKVSSDPSPRIIITASPPLSTKSTVDIALRHLQSSDELLGALITTHNDPPLFDSSNTPFLSLARSILYQQLATKAAKCIYDRFISLFNGGEAGVVPESVISLSAVDLRKIGVSGRKASYLHDLADKYNNGVLSDELILKMSDEELIDRLTLVKGIGVWTVHMFMIFSLHRPDVLPVGDLGVRKGVKDLYGLKNLPGPLQMEQLCEKWRPYRSVGSWYMWRLIESRKTK

SEQ ID NO: 788 - DNA, 1287 bp, Arabidopsis thaliana
tggttatataacactaatcaggagtgaaatttcatccacaaaaattccttataaattcacgaccaaacacacacatttctttaattccataaaaacaaaaacaaaaatataatgtggacttctaaaaccataagcttcactctcttcatcacaacaacacttctcgggtcctgcaacgcatctgcaaaggccaaaacgcaaccgctattcccagcgattctaatctttggtgattcaacagtcgacacaggcaacaataattacccttcacaaacaatcttcagagctaaacatgttccttacggaattgatctcccaaaccactcacctaacggaagattctcaaacgggaaaattttctccgacataatcgcaaccaaactcaacatcaaacagtttgttcctcctttcttacaaccaaatctcaccgaccaagaaattgtaaccggagtctgtttcgcatcagcaggtgccggttacgatgaccaaaccagtctcacgacacaagcgattcgtgtctcggaacaaccaaatatgttcaagagttacattgctcgtcttaagagtatcgtaggagacaagaaagccatgaagatcataaacaatgctttggtggttgtgagtgcagggcctaatgatttcatcttgaattattacgaggttccctcatggcgtcgcatgtatcctagcatttctgattaccaagattttgttcttagtaggcttaacaatttcgtgaaggagctttacagcctaggttgccggaaaattttggtcggaggtttaccgccaatgggatgtttaccgattcaaatgactgctcaattccgcaacgtcctaaggttttgcttggaacaagagaacagagactctgttttatacaatcagaaacttcagaagctcttacctcagacacaagcatctcttacaggaagcaagatcctttactctgatgtctatgaccctatgatggagatgctccaaaaccctagcaaatacggatttaaagagacgacgagaggatgttgtggaacagggttcttggagacgaacttcatgtgtaatgcttattcttccatgtgtcagaatcgctcggagtttctgttctttgactcgattcatccatctgaagctacctacaattacattggtaatgttctggatactaagattcgtgggtggcttaaggcttaagttatcaagatttgcaaagattgaacaaaattatctgtttcataatgtgactatttgtggacttcgtttgtttatcaactattaactttggcc

SEQ ID NO: 789 - protein, 360 aa, Arabidopsis thaliana
MWTSKTISFTLFITTTLLGSCNASAKAKTQPLFPAILIFGDSTVDTGNNNYPSQTIFRAKHVPYGIDLPNHSPNGRFSNGKIFSDIIATKLNIKQFVPPFLQPNLTDQEIVTGVCFASAGAGYDDQTSLTTQAIRVSEQPNMFKSYIARLKSIVGDKKAMKIINNALVVVSAGPNDFILNYYEVPSWRRMYPSISDYQDFVLSRLNNFVKELYSLGCRKILVGGLPPMGCLPIQMTAQFRNVLRFCLEQENRDSVLYNQKLQKLLPQTQASLTGSKILYSDVYDPMMEMLQNPSKYGFKETTRGCCGTGFLETNFMCNAYSSMCQNRSEFLFFDSIHPSEATYNYIGNVLDTKIRGWLKA

SEQ ID NO: 790 - protein, 219 aa, Arabidopsis thaliana
MFKSYIARLKSIVGDKKAMKIINNALVVVSAGPNDFILNYYEVPSWRRMYPSISDYQDFVLSRLNNFVKELYSLGCRKILVGGLPPMGCLPIQMTAQFRNVLRFCLEQENRDSVLYNQKLQKLLPQTQASLTGSKILYSDVYDPMMEMLQNPSKYGFKETTRGCCGTGFLETNFMCNAYSSMCQNRSEFLFFDSIHPSEATYNYIGNVLDTKIRGWLKA

SEQ ID NO: 791 - protein, 201 aa, Arabidopsis thaliana
MKIINNALVVVSAGPNDFILNYYEVPSWRRMYPSISDYQDFVLSRLNNFVKELYSLGCRKILVGGLPPMGCLPIQMTAQFRNVLRFCLEQENRDSVLYNQKLQKLLPQTQASLTGSKILYSDVYDPMMEMLQNPSKYGFKETTRGCCGTGFLETNFMCNAYSSMCQNRSEFLFFDSIHPSEATYNYIGNVLDTKIRGWLKA

SEQ ID NO: 792 - DNA, 1140 bp, Arabidopsis thaliana
gtgtcactgttgctgttgccttggttgggttcggtttaaagttcgtggccaaacagtaaccttgagtcttgccgtcctctgtcatctatccacgcctgaacccgaaaaactctgaaagctgagctctggtaatggcgggtttagcaatttcacctcctctcggtctttccttctcttctcgaactcgaaaccctaaacccacttcctttctatctcacaatcaaaggaatcctataagacgtatagtttctgctctacagagtccatatggagattctctgaaagctggactttctagtaatgtttctggatccccaataaagattgacaacaaggctccaagatttggagtgatagaggcgaaaaagggaaaccccccagtaatgccttcagtgatgacccctggaggacctttagacctctcttctgtgttattccgtaaccgcataatcttcatcgggcaaccaattaacgcacaggttgctcagcgagtcatatctcagcttgtaacccttgcatctattgatgataaatccgacatcctgatgtacttgaattgtcccggtggcagtacttactccgtcctagcaatttatgactgtatgtcttggataaagcctaaagttggaacagtggcgtttggagtagctgcaagccaaggagcacttcttcttgctggaggtgaaaaaggaatgcgctatgcaatgccaaatactcgtgtcatgatacatcaaccacaaactggatgcggaggacatgtagaggacgtgaggagacaggtcaatgaagccatcgaagcccgacaaaaaattgacaggatgtatgcagctttcactggacaacctctggagaaagtgcagcaatacactgaaagagatcgtttcttatcagcatctgaggcgcttgagttcgggctcattgatggtctattggaaacagaatactgaagcagcatacaggacaatgcacaacaacagctcattgcaatgttcaaagcttccattttcatttgaatatgaacggttgtaactgatatttgtgcataaatcagtttggttttcttggttttattgtctactaaacagaatgagaaaactaaactgtttatttttttactgaaaaatctgaaagttgtgttcc

SEQ ID NO: 793 - protein, 271 aa, Arabidopsis thaliana
MAGLAISPPLGLSFSSRTRNPKPTSFLSHNQRNPIRRIVSALQSPYGDSLKAGLSSNVSGSPIKIDNKAPRFGVIEAKKGNPPVMPSVMTPGGPLDLSSVLFRNRIIFIGQPINAQVAQRVISQLVTLASIDDKSDILMYLNCPGGSTYSVLAIYDCMSWIKPKVGTVAFGVAASQGALLLAGGEKGMRYAMPNTRVMIHQPQTGCGGHVEDVRRQVNEAIEARQKIDRMYAAFTGQPLEKVQQYTERDRFLSASEALEFGLIDGLLETEY

SEQ ID NO: 794 - protein, 187 aa, Arabidopsis thaliana
MPSVMTPGGPLDLSSVLFRNRIIFIGQPINAQVAQRVISQLVTLASIDDKSDILMYLNCPGGSTYSVLAIYDCMSWIKPKVGTVAFGVAASQGALLLAGGEKGMRYAMPNTRVMIHQPQTGCGGHVEDVRRQVNEAIEARQKIDRMYAAFTGQPLEKVQQYTERDRFLSASEALEFGLIDGLLETEY

SEQ ID NO: 795 - protein, 183 aa, Arabidopsis thaliana
MTPGGPLDLSSVLFRNRIIFIGQPINAQVAQRVISQLVTLASIDDKSDILMYLNCPGGSTYSVLAIYDCMSWIKPKVGTVAFGVAASQGALLLAGGEKGMRYAMPNTRVMIHQPQTGCGGHVEDVRRQVNEAIEARQKIDRMYAAFTGQPLEKVQQYTERDRFLSASEALEFGLIDGLLETEY

SEQ ID NO: 796 - DNA, 1281 bp, Arabidopsis thaliana
gctttttgtgttgaagagagagtttcctatcttctccattcctcccaccatctccctcatcttcatcttcctctctctttctctctttctcaacaatctctattagatctttctccattaccattacctctggctttctcttaaatccaccatcatgaggagaggaagaggctcttccgccgtcgccggacctaccgtcgttgccgccatcaacggatctgtaaaagaaatcagattcagaggcgtaaggaagagaccttggggacgattcgcagctgagatccgtgatccatggaaaaaagctcgtgtttggttaggtactttcgattccgccgaagaagctgctcgcgcttacgactccgccgctcgtaacctccgtggtcctaaagccaaaactaatttccccatcgattcttcttctcctcctcctcctaatctccgatttaatcagattcgtaatcaaaatcaaaaccaagtcgatccgtttatggaccaccggttattcaccgaccatcaacaacagttcccgattgttaaccggcctactagtagcagcatgagcagcaccgttgaatcgtttagcggacccagacctacgacgatgaaaccggccacgacgaagagatatcctagaactccaccggttgttccggaggattgtcacagcgattgcgattcgtcgtcgtctgtaatcgacgacgacgacgatatcgcatcgtcttcacggcgacggaatccgccgtttcaattcgatcttaattttccaccgttggattgtgttgacttgttcaatggcgctgatgatcttcactgtaccgatctacgtctctaatgaattggtaaaatcaaactcaaaatcacagatccgtgatcggtttgattttaatcgaaaacacacaacaaaatccttttttttttttttttaaattttctgtttcgttgatctcatataatttttactatgcgggagaaatagaaagacaaagaaacgaagaagaagaagaagatggtgatgagcttgagagagcttgagctggttctgtgtttcttctgtgatgatattgtaagagtattattattttactattattactaaatcttcaaaaccaagaagaagaagaccgaacacgatgatctgttgtgtctgtttgttttactgtaagaaaaacgcagatctgggtttcgtttttttcttgagatagatcaaacaacccccatctttgtaacatatacatttggaacactcatgattctaaataaaaaatctagaatctttttttc

SEQ ID NO: 797 - protein, 225 aa, Arabidopsis thaliana
MRRGRGSSAVAGPTVVAAINGSVKEIRFRGVRKRPWGRFAAEIRDPWKKARVWLGTFDSAEEAARAYDSAARNLRGPKAKTNFPIDSSSPPPPNLRFNQIRNQNQNQVDPFMDHRLFTDHQQQFPIVNRPTSSSMSSTVESFSGPRPTTMKPATTKRYPRTPPVVPEDCHSDCDSSSSVIDDDDDIASSSRRRNPPFQFDLNFPPLDCVDLFNGADDLHCTDLRL

SEQ ID NO: 798 - protein, 114 aa, Arabidopsis thaliana
MDHRLFTDHQQQFPIVNRPTSSSMSSTVESFSGPRPTTMKPATTKRYPRTPPVVPEDCHSDCDSSSSVIDDDDDIASSSRRRNPPFQFDLNFPPLDCVDLFNGADDLHCTDLRL

SEQ ID NO: 799 - DNA, 891 bp, Arabidopsis thaliana
agggttttcgtctctttcactcgtaaccggaagagaggacaagatcctccactaatttcacaaaaagctcatctttttattcgttttcgaatcgattcgttatctgggttcaagtatcaaattctctggtttcgtttttcgtttttgatttgttctctctctttcggaaaaagtttggttttttttttttgtttgaaacaatgggaagaggcaagttcaagggtaaacctaccggccaacgccgattctctagtgctgctgatattcttgctggcacatctgctgcacgtcctcgatcattcaaacagaaagaagctgagtacgaagaagatgttgaagaagagtcagaggaggaatctgaagaagaatccgaagatgaagctgatgtgaagaagaaaggagctgaagctgttatcgaagttgataaccctaacagagtaagacaaaagaccttgaaagcaaaagacctcgatgctagtaaaaccactgaactctcaaggcgtgaaagagaggagctagagaagcagcgagctcatgagcgatacatgaggttgcaagagcaaggcaaaaccgaacaagcaaggaaggacttggatcgtttggctctgattcgccaacagagagaagaagctgccaagaagcgagaagaggaaaaagccgcaagagacgctaagaaagtcgaagggcgcaaatgagaagtgatcacactcaaaagacctgcctactatgcgattaagatgtgttgtttttactttgttctttttcgattgataaaagataaaacctctgctatttactctgttatctctcgattttaagttcggtttaaaaggattggatgtagttcaaaatataaactcgtttaagatttatgcgtggaagcttcctcag

SEQ ID NO: 800 - protein, 164 aa, Arabidopsis thaliana
MGRGKFKGKPTGQRRFSSAADILAGTSAARPRSFKQKEAEYEEDVEEESEEESEEESEDEADVKKKGAEAVIEVDNPNRVRQKTLKAKDLDASKTTELSRREREELEKQRAHERYMRLQEQGKTEQARKDLDRLALIRQQREEAAKKREEEKAARDAKKVEGRK

SEQ ID NO: 801 - protein, 129 aa, Arabidopsis thaliana
RVFVSFTRNRKRGQDPPLISQKAHLFIRFRIDSLSGFKYQILWFRFSFLICSLSFGKSLVFFFCLKQWEEASSRVNLPANADSLVLLIFLLAHLLHVLDHSNRKKLSTKKMLKKSQRRNLKKNPKMKLM

SEQ ID NO: 802 - DNA, 1005 bp, Arabidopsis thaliana
aacagaggcaactacaaccgcctttcttcttcttcctcatagcaatcgaaaacgctttcgcactttctcttgctttgacaatttctgtttttattcaatgggttctagtcaagatctcttcttcctcatcatcgttctcttctcctcgattctctttcctcagctttcctcgctaccggatccgtcgttttacgattatctccgggaaagcaatcttcccgccggaatagttcccaaaggagttaccaatttctcgatcgacatcaaaacggggcgtttcaccgtcgctctccctgttccttgcgatgctaaattcgagaatcagttccacttcgactacaatatctccggcgttctctccgatggacggatcgggaatttatctggtgtgacgcagaaggagctgtttctttggtttgctgtgaaaggaatacatgttgatccgcagagctctgggttaattcactttgatgtcggtgtcgctgataagcagctttctctttcgctctttgagtcgcctcgagattgcaccgccgcggaatctcaacctcgtgcggttgatctctctagaccccgtgatttggagaagcaatctgaagaaatgcaatcgacaatgcagaagcaacctgaagagatccaatcgatatttggaccacgaagaagtcgctggacattaggtttttgatctgaggcttagaaggaagtgcaaattctactgatgatgtcttttggtatggtgtgtgttgtaaaaagtttggtttgtagtagttttttttgttttacaccatatcatagtatcatcaacagcataagcttaggaggcatgaatacttttttttctttttgctttggtacacgattaggggttaagacatatatatatacatatatgcttgtggatttttcaccagaaactgttgtgttatcacactcttttcttggtttttttactttgtaaaagaaaggatgttgaggatacatgaatctttttgttttgtggttgtt

SEQ ID NO: 803 - protein, 227 aa, Arabidopsis thaliana
TEATTTAFLLLPHSNRKRFRTFSCFDNFCFYSMGSSQDLFFLIIVLFSSILFPQLSSLPDPSFYDYLRESNLPAGIVPKGVTNFSIDIKTGRFTVALPVPCDAKFENQFHFDYNISGVLSDGRIGNLSGVTQKELFLWFAVKGIHVDPQSSGLIHFDVGVADKQLSLSLFESPRDCTAAESQPRAVDLSRPRDLEKQSEEMQSTMQKQPEEIQSIFGPRRSRWTLGF

SEQ ID NO: 804 - protein, 195 aa, Arabidopsis thaliana
MGSSQDLFFLIIVLFSSILFPQLSSLPDPSFYDYLRESNLPAGIVPKGVTNFSIDIKTGRFTVALPVPCDAKFENQFHFDYNISGVLSDGRIGNLSGVTQKELFLWFAVKGIHVDPQSSGLIHFDVGVADKQLSLSLFESPRDCTAAESQPRAVDLSRPRDLEKQSEEMQSTMQKQPEEIQSIFGPRRSRWTLGF

SEQ ID NO: 805 - DNA, 874 bp, Arabidopsis thaliana
catcgctgtctggaacaggacaagcaaaaaagaaagaaattaaagagagagagaaagataatgggaaagttaatggcaaagaggttttgcattgggtttgggtgtggaagaattgggacgggcaacaataaaagatcatcatcttcttcttcttcttcatcgtcattttcatcattatcatcatcatcttcttcttcatcgtcatcatgtaacaataacaacataaaatgggagatgaggcctggagggatgctggttcagaagagatcagaagattctaacactgaagatttaatcagccttagagtctccactgtctctcagctttcatatgaaatctccattgatgccaactctactttcggtgaattgaagatgatgatagcaatagtgagtggaattgaggcaaaagagcaaagactcttgttcagaggaaaggaaagagaagacagagaatacttacacatgattggtgttggagatggagataaggtctttttattacaagatcctgcttttaaggagttgaaacatattcatctcccaattactgtctaactaattccttactttattaattgattaatcaatcgattaattagctctaatccccacttattaaacactctcttttataagtgctataagttcttgattttgcaggagtagtatatgcttgttatttcgctgtatcgtctcccatttgataatctttgagttgagtgattgattgtattttgctaaattgctagtcctattgattaaagttggaagattgaattttctgagtgtaacattgtatgctatgattttaatgtcaatagagttatgcgtggtatgtaatactaagtcttaacaaaaaatgtttttacgg

SEQ ID NO: 806 - protein, 185 aa, Arabidopsis thaliana
HRCLEQDKQKRKKLKRERKIMGKLMAKRFCIGFGCGRIGTGNNKRSSSSSSSSSSFSSLSSSSSSSSSSCNNNNIKWEMRPGGMLVQKRSEDSNTEDLISLRVSTVSQLSYEISIDANSTFGELKMMIAIVSGIEAKEQRLLFRGKEREDREYLHMIGVGDGDKVFLLQDPAFKELKHIHLPITV

SEQ ID NO: 807 - protein, 165 aa, Arabidopsis thaliana
MGKLMAKRFCIGFGCGRIGTGNNKRSSSSSSSSSSFSSLSSSSSSSSSSCNNNNIKWEMRPGGMLVQKRSEDSNTEDLISLRVSTVSQLSYEISIDANSTFGELKMMIAIVSGIEAKEQRLLFRGKEREDREYLHMIGVGDGDKVFLLQDPAFKELKHIHLPITV

SEQ ID NO: 808 - protein, 161 aa, Arabidopsis thaliana
MAKRFCIGFGCGRIGTGNNKRSSSSSSSSSSFSSLSSSSSSSSSSCNNNNIKWEMRPGGMLVQKRSEDSNTEDLISLRVSTVSQLSYEISIDANSTFGELKMMIAIVSGIEAKEQRLLFRGKEREDREYLHMIGVGDGDKVFLLQDPAFKELKHIHLPITV

SEQ ID NO: 809 - DNA, 602 bp, Arabidopsis thaliana
attatttaacttgagaatctcaagagtcaatttttgcagtagaagagtgttttttttagaggttaagagaatgtctgagaacggaaaaaggaaagacgaggatgtcagagcatcagacgaccgcgacgaatctgagacccacgcgccgcctaagaaagtggcaaagccagcggacgagattgaggacatcttcatctgcaatttagataagaatcggagagtctttgtgaggaattgcaatgggaggatttggattgccattcgtcagttctttgtcaaggacggtataactttaccttgtaatagcaagcaaggtatctctctaagcctggaacagtggaacgatcttcggaaccatgaggaggatattgataaggccctctctgagctttctgaggtttaaaagcttgtgtaatcgggtattggaaggtggctttggttgttttggtttgtttttcagaacaacaccatgttctgcaagtgttagctgcttcgagttagttcatgtgttgaatctattatttgatgttgattactcttttatttgatgttggatttacaacttgagatacgttgcaggaatacaagcattcattttgatc

SEQ ID NO: 810 - protein, 133 aa, Arabidopsis thaliana
LFNLRISRVNFCSRRVFFLEVKRMSENGKRKDEDVRASDDRDESETHAPPKKVAKPADEIEDIFICNLDKNRRVFVRNCNGRIWIAIRQFFVKDGITLPCNSKQGISLSLEQWNDLRNHEEDIDKALSELSEV

SEQ ID NO: 811 - protein, 110 aa, Arabidopsis thaliana
MSENGKRKDEDVRASDDRDESETHAPPKKVAKPADEIEDIFICNLDKNRRVFVRNCNGRIWIAIRQFFVKDGITLPCNSKQGISLSLEQWNDLRNHEEDIDKALSELSEV

SEQ ID NO: 812 - DNA, 922 bp, Arabidopsis thaliana
ctcattaatggaagtttcaacatcatccatgtcttcaaaaccagaacaaatgcaaaacccacctcctatgatctcatctcctaggtttcagcctcagataatatctcctcatcatcatgaccagcatcaacatctctcaaatccttatccaacaacatttgttcaagcagacacttctactttcaaacaagtcgttcagatgcttaccggctcatccaccgataccaccaccggaaaacaccacgaagctccttctccggtgaacaacaacaacaagggatcaagtttctcgattccacccatcaagaaaaccaacagcttcaagctttacgagagaagacaaaacaacaacaacatgttcgctaagaatgacctaatgatcaatacgttaaggcttcaaaactctcagagattgatgttcacaggaggaaacagcagtcatcatcaaagcccgagattctctccaagaaacagttcatcatcagaaaatattcttctgtctccaagcatgctggattttccgaagctagggctaaacagtcccgtgacgccactgagaagcaacgatgaccccttcaacaagtcatcacctttgtcattagggaactcatcggaagaagacaaagccattgctgataagggcttttatcttcatccatctccagtctcaactcctagagactctcagccactgcttcttcctctttttccggttgcttctccggcgaggaactcttaatcccgacgatatccatgagtgattttatacatgatattaaattatatctatctccggattttgtttagctataactaagatatctataagtttgatcatagttatggagtgactgtaaattttgtgcggtttttttcactttcaatctcaaaaattaattgcaatatatgtaattgggaggct

SEQ ID NO: 813 - protein, 245 aa, Arabidopsis thaliana
SLMEVSTSSMSSKPEQMQNPPPMISSPRFQPQIISPHHHDQHQHLSNPYPTTFVQADTSTFKQVVQMLTGSSTDTTTGKHHEAPSPVNNNNKGSSFSIPPIKKTNSFKLYERRQNNNNMFAKNDLMINTLRLQNSQRLMFTGGNSSHHQSPRFSPRNSSSSENILLSPSMLDFPKLGLNSPVTPLRSNDDPFNKSSPLSLGNSSEEDKAIADKGFYLHPSPVSTPRDSQPLLLPLFPVASPARNS

SEQ ID NO: 814 - protein, 243 aa, Arabidopsis thaliana
MEVSTSSMSSKPEQMQNPPPMISSPRFQPQIISPHHHDQHQHLSNPYPTTFVQADTSTFKQVVQMLTGSSTDTTTGKHHEAPSPVNNNNKGSSFSIPPIKKTNSFKLYERRQNNNNMFAKNDLMINTLRLQNSQRLMFTGGNSSHHQSPRFSPRNSSSSENILLSPSMLDFPKLGLNSPVTPLRSNDDPFNKSSPLSLGNSSEEDKAIADKGFYLHPSPVSTPRDSQPLLLPLFPVASPARNS

SEQ ID NO: 815 - protein, 236 aa, Arabidopsis thaliana
MSSKPEQMQNPPPMISSPRFQPQIISPHHHDQHQHLSNPYPTTFVQADTSTFKQVVQMLTGSSTDTTTGKHHEAPSPVNNNNKGSSFSIPPIKKTNSFKLYERRQNNNNMFAKNDLMINTLRLQNSQRLMFTGGNSSHHQSPRFSPRNSSSSENILLSPSMLDFPKLGLNSPVTPLRSNDDPFNKSSPLSLGNSSEEDKAIADKGFYLHPSPVSTPRDSQPLLLPLFPVASPARNS

SEQ ID NO: 816 - DNA, 1392 bp, Arabidopsis thaliana
atttgaatttccggaaaagaaaaaaaaacaaacacaaaacacgcttctcttgttgagaagctagcaaaacaacactaaacctgaaacaaacgtaaatccgccgcaacaacccagtttttttcgacggtgtacaagcttcctccgccgtaacgccgtcgtttaacaccacgaagcttgattaggtttccgtagtgtgtgatttgtgagattcgttttaaggttctgaacactgatgtcaaacccattgaaggagtcaagagaggatattgcagattctactcctcacatgagggataatgagtatgttcggctagttgtggctcatgaagcctccgcagctgaaaccgtgttgtctctatcgcaatcagaggtgcagagtaagaaattgatgtggtggttgaaagctttgggaatatgtgcagttgctctcttgcttacgcttgttttcggtaaatggggagttccgtttgtgtttcaaaaggttcttattccaattttgcaatgggaagcaactgcgtttggccgtcctatgctcgcgattgtccttgttgtttccttggctttgtttcctgtgttcttgataccttctggtccttccatgtggttagctgggatgatttttggttatggtctcggttttgttattatcatggttggaaccaccattggcatggttctcccttacttaatcgggcttatgttccgtgatcgcctccatcaatggttaaaaagatggcctcgtcaagctgctgttctaagactagctgcagaaggaagctggttccatcaattcagagtcgtggcaatctttcgggtttccccatttccttacacgatttttaactacgcaatcgtcgtgacaagcatgagattctggccttacttcttcggatccatagcaggaatgataccagaagctttcatctacatttacagcggtcggttaatcagaacattcgcagatgtgcaatacggacatcaacgtttgacaacagtggagattgtgtacaatgtaatctccttaatcattgcggttgtgaccactgttgctttcactgtgtacgcgaaaagagctttgagagagcttcaaaacgcagaagctaatgaagatgaagaagttcaagtaagaaaagtgagattcgagatgaagaacgtagttcagcacgaagaagataatcatcagcgtttgccttagccgaaagttgacacaaagctatgataggtttgtataaagctttgaacgttgacatgttcttcagcaggatttagagtaaataacaaaaggggtaaaaaaagtctgatgtagtaggaagactaagactagtcaagattggatttatattagtgtgactgattccaattattgaaacaaataaaagaagcatttaggcc

SEQ ID NO: 817 - protein, 320 aa, Arabidopsis thaliana
MSNPLKESREDIADSTPHMRDNEYVRLVVAHEASAAETVLSLSQSEVQSKKLMWWLKALGICAVALLLTLVFGKWGVPFVFQKVLIPILQWEATAFGRPMLAIVLVVSLALFPVFLIPSGPSMWLAGMIFGYGLGFVIIMVGTTIGMVLPYLIGLMFRDRLHQWLKRWPRQAAVLRLAAEGSWFHQFRVVAIFRVSPFPYTIFNYAIVVTSMRFWPYFFGSIAGMIPEAFIYIYSGRLIRTFADVQYGHQRLTTVEIVYNVISLIIAVVTTVAFTVYAKRALRELQNAEANEDEEVQVRKVRFEMKNVVQHEEDNHQRLP

SEQ ID NO: 818 - protein, 302 aa, Arabidopsis thaliana
MRDNEYVRLVVAHEASAAETVLSLSQSEVQSKKLMWWLKALGICAVALLLTLVFGKWGVPFVFQKVLIPILQWEATAFGRPMLAIVLVVSLALFPVFLIPSGPSMWLAGMIFGYGLGFVIIMVGTTIGMVLPYLIGLMFRDRLHQWLKRWPRQAAVLRLAAEGSWFHQFRVVAIFRVSPFPYTIFNYAIVVTSMRFWPYFFGSIAGMIPEAFIYIYSGRLIRTFADVQYGHQRLTTVEIVYNVISLIIAVVTTVAFTVYAKRALRELQNAEANEDEEVQVRKVRFEMKNVVQHEEDNHQRLP

SEQ ID NO: 819 - protein, 268 aa, Arabidopsis thaliana
MWWLKALGICAVALLLTLVFGKWGVPFVFQKVLIPILQWEATAFGRPMLAIVLVVSLALFPVFLIPSGPSMWLAGMIFGYGLGFVIIMVGTTIGMVLPYLIGLMFRDRLHQWLKRWPRQAAVLRLAAEGSWFHQFRVVAIFRVSPFPYTIFNYAIVVTSMRFWPYFFGSIAGMIPEAFIYIYSGRLIRTFADVQYGHQRLTTVEIVYNVISLIIAVVTTVAFTVYAKRALRELQNAEANEDEEVQVRKVRFEMKNVVQHEEDNHQRLP

SEQ ID NO: 820 - DNA, 1558 bp, Arabidopsis thaliana
ttttagttatttatatatatattctctgtctcgtatttgtccccaaaaatctagggttttaaggtttcttatccttcctcttcctccgccagattcttttcttgcgaagatgagcaacgacaaggacagcatgaacatgtccgatctctccaccgctcttaacgaggaggatcgtgccgggcttgttaatgctcttaagaacaagttgcagaatttggctggacaacactctgatgtccttgaaaacttgactccaccagtcaggaagcgtgtcgagtttctaagagagattcagaaccaatatgatgagatggaagcaaaattctttgaggagagagcagctcttgaagctaagtatcaaaagttatatcagcctttatataccaagcgatatgagattgtgaatggtgtggtcgaagttgaaggtgcagctgaagaagtaaaatccgaacaaggagaagataaatcagctgaagagaaaggagtaccagatttctggcttattgcattgaagaacaatgaaattactgcggaagagataactgagcgagatgaaggggctctcaagtatctcaaagatatcaagtggagtagggttgaagaaccaaaagggttcaagcttgagtttttctttgatcagaatccttacttcaagaacactgtcttgaccaagacatatcacatgattgatgaagatgagcctatccttgagaaggccctcgggacggagattgagtggtatcctggaaagtgtttgacacagaagattctaaaaaagaagccaaagaaaggatccaaaaacacaaagccgatcactaagactgaggactgtgagagtttcttcaactttttcagtccacctcaagttcctgacgatgatgaggatcttgatgatgacatggctgatgaactccaaggacaaatggagcatgattatgatatcggttcaacaatcaaagagaaaatcatctcgcatgctgtgtcatggttcactggtgaagctgttgaggcagatgaccttgatattgaggacgacgatgatgagattgatgaagatgatgatgaagaggacgaggaagatgatgaggatgacgaggaggaggatgatgaggatgatgacgaggaggaagaagcagatcaaggaaagaagagcaaaaagaagtcatcagctgggcacaagaaggctggaagaagtcaacttgcggaaggtcaagcaggtgagaggccaccggaatgtaagcagcagtgaagaagtgaagaatcttggcttagttatgatgaagaagaagagtgaagagtgtctttgagccgaggttgtgtttctttaatttgcagagtcatggtccggtttattatatatcagttttgggtgattggtttgctatttaaaaaaaaaaaaatgggttctttggtttggtttgtgtctcttgatttttccttttgtaatgatcttatgaatttgtttcgagttaatgtcgttctctggtcagatttcgaattcaattctatttatcctccctcgttaatgagagaatttgtgagacaatctagtttactt

SEQ ID NO: 821 - protein, 415 aa, Arabidopsis thaliana
FSYLYIYSLSRICPQKSRVLRFLILPLPPPDSFLAKMSNDKDSMNMSDLSTALNEEDRAGLVNALKNKLQNLAGQHSDVLENLTPPVRKRVEFLREIQNQYDEMEAKFFEERAALEAKYQKLYQPLYTKRYEIVNGVVEVEGAAEEVKSEQGEDKSAEEKGVPDFWLIALKNNEITAEEITERDEGALKYLKDIKWSRVEEPKGFKLEFFFDQNPYFKNTVLTKTYHMIDEDEPILEKALGTEIEWYPGKCLTQKILKKKPKKGSKNTKPITKTEDCESFFNFFSPPQVPDDDEDLDDDMADELQGQMEHDYDIGSTIKEKIISHAVSWFTGEAVEADDLDIEDDDDEIDEDDDEEDEEDDEDDEEEDDEDDDEEEEADQGKKSKKKSSAGHKKAGRSQLAEGQAGERPPECKQQ

SEQ ID NO: 822 - protein, 379 aa, Arabidopsis thaliana
MSNDKDSMNMSDLSTALNEEDRAGLVNALKNKLQNLAGQHSDVLENLTPPVRKRVEFLREIQNQYDEMEAKFFEERAALEAKYQKLYQPLYTKRYEIVNGVVEVEGAAEEVKSEQGEDKSAEEKGVPDFWLIALKNNEITAEEITERDEGALKYLKDIKWSRVEEPKGFKLEFFFDQNPYFKNTVLTKTYHMIDEDEPILEKALGTEIEWYPGKCLTQKILKKKPKKGSKNTKPITKTEDCESFFNFFSPPQVPDDDEDLDDDMADELQGQMEHDYDIGSTIKEKIISHAVSWFTGEAVEADDLDIEDDDDEIDEDDDEEDEEDDEDDEEEDDEDDDEEEEADQGKKSKKKSSAGHKKAGRSQLAEGQAGERPPECKQQ

SEQ ID NO: 823 - protein, 372 aa, Arabidopsis thaliana
MNMSDLSTALNEEDRAGLVNALKNKLQNLAGQHSDVLENLTPPVRKRVEFLREIQNQYDEMEAKFFEERAALEAKYQKLYQPLYTKRYEIVNGVVEVEGAAEEVKSEQGEDKSAEEKGVPDFWLIALKNNEITAEEITERDEGALKYLKDIKWSRVEEPKGFKLEFFFDQNPYFKNTVLTKTYHMIDEDEPILEKALGTEIEWYPGKCLTQKILKKKPKKGSKNTKPITKTEDCESFFNFFSPPQVPDDDEDLDDDMADELQGQMEHDYDIGSTIKEKIISHAVSWFTGEAVEADDLDIEDDDDEIDEDDDEEDEEDDEDDEEEDDEDDDEEEEADQGKKSKKKSSAGHKKAGRSQLAEGQAGERPPECKQQ

SEQ ID NO: 824 - DNA, 1099 bp, Arabidopsis thaliana
atgagctattgagctagtagcctcttgtactcttccattttacgcgcaatccacgcaccaacaaaaagaaaagaaaagaagagataaagaatatctttaaaaagtaagtgtggagaattctttcttctcaataaacaacaacatgtcgtcgagcaatgaaaatgctaaggcacaagcgccggagaaatctgactttacccggagatgtagtttgctcagccgttacttgaaggagaagggtagtttcggaaacattgatcttggcttataccgaaaacccgattccagtctcgcgttgcccggaaaattcgatccaccagggaaacaaaatgcgatgcataaggcagggcattccaaaggcgaaccctctacctcatcaggaggcaaagtcaaagatgttgctgacctcagtgaatcacagccaggaagttcgcagctgaccatattcttcggagggaaagttttagtatataatgagttccccgtagacaaagctaaagagattatggaagtagcaaaacaagccaagcctgtgactgagattaacattcagacaccaatcaatgacgaaaacaacaacaacaagagcagcatggttcttcctgatctcaatgagcctactgataataatcacctaacaaaggaacaacaacagcaacaagaacaaaatcagatcgtggaacgtatagcacgtagagcttccctccatcgattctttgctaaacggaaagacagagctgtggctagggctccgtaccaagttaaccaaaacgcaggtcatcatcgttatcctcccaagccagagattgtaaccggtcaaccactagaggcaggacagtcgtcacaaagaccgccggataacgccattggtcaaaccatggcccatatcaaatcagacggtgataaagatgatattatgaagattgaagaaggccaaagttcgaaagatctcgatctaaggctatagtaatatttgctaaatttcttgtaggaactgagtttttagattaacgtttcgatttttctgacttatctaagtgattttattttgctttgtactacagtatgtaatcttattctaacttgaatattcattcat

SEQ ID NO: 825 - protein, 274 aa, Arabidopsis thaliana
MSSSNENAKAQAPEKSDFTRRCSLLSRYLKEKGSFGNIDLGLYRKPDSSLALPGKFDPPGKQNAMHKAGHSKGEPSTSSGGKVKDVADLSESQPGSSQLTIFFGGKVLVYNEFPVDKAKEIMEVAKQAKPVTEINIQTPINDENNNNKSSMVLPDLNEPTDNNHLTKEQQQQQEQNQIVERIARRASLHRFFAKRKDRAVARAPYQVNQNAGHHRYPPKPEIVTGQPLEAGQSSQRPPDNAIGQTMAHIKSDGDKDDIMKIEEGQSSKDLDLRL

SEQ ID NO: 826 - protein, 210 aa, Arabidopsis thaliana
MHKAGHSKGEPSTSSGGKVKDVADLSESQPGSSQLTIFFGGKVLVYNEFPVDKAKEIMEVAKQAKPVTEINIQTPINDENNNNKSSMVLPDLNEPTDNNHLTKEQQQQQEQNQIVERIARRASLHRFFAKRKDRAVARAPYQVNQNAGHHRYPPKPEIVTGQPLEAGQSSQRPPDNAIGQTMAHIKSDGDKDDIMKIEEGQSSKDLDLRL

SEQ ID NO: 827 - protein, 153 aa, Arabidopsis thaliana
MEVAKQAKPVTEINIQTPINDENNNNKSSMVLPDLNEPTDNNHLTKEQQQQQEQNQIVERIARRASLHRFFAKRKDRAVARAPYQVNQNAGHHRYPPKPEIVTGQPLEAGQSSQRPPDNAIGQTMAHIKSDGDKDDIMKIEEGQSSKDLDLRL

SEQ ID NO: 828 - DNA, 1423 bp, Arabidopsis thaliana
atacatacaacactgcatatctctgcttctttctctcctcgctcttcgcgctctctgcagaagaaaaataaaacattttcttgagaaagaagccacaatctctatcactctctactatggatcttgttgagagtttttcccatggcgatcctgatactccgcgtttcagtgacgacttcggttctggctctgcttgctctactccgttcgttagcgctccgtctagtcccggccgtggtcctccgcctggttatttcttcagtgcaccgtcgagtccgatgcatttcttcctttgctctgcttcttcttcatcggagaatcctaaaaagcttgacacgtcttcatgcggcgactttgagtttgacttctcgtcgaggttgtcttcaagcagtggtcctttaggcggtgtttccatgacttcagctgaagagcttttctctaatggccagatcaagccaatgaagctctcttcgcatcttcagagacctcagatcttatctccgcttctagatctggagaacgaggaagaagacgacgatgatgagaccaaaccaaacggtgagatgaagcgtgggagagatctgaaactaagaagcagatctgttcaccggaaggccagatccctctctccgctccgaaacgcagcgtatcaatggaaccaagaagaaggagaggaagaagaagtcgccggagagagagaagttaaagagtgtataagaaagcttcaagaagacgaaaacgtgccttcagctgaaacgacaccgtcttgttctgcttcttcttcacgatcatcgtcttacggtagaaactctaagaaatggatctttcttaaagatctgcttcacagaagcaaaagcgaaggaagaggcaacgggaaagagaagttctggtccaacatttccttctctccttccaatttcaaagacaagaaactcaaatcatctcaacttgaagagaaaccgattcaagaaacagttgacgctgccgtggaatcaaagaagcagaagcagaaacaaccgccggcgaagaaagctccggttaacggaaaaccaaccaacgggatagcaaaacggagaggattgcagccgtctgctcacgagctacattacacaacgaacagagctcaagcagaggaaatgaagaagagaacatatttgccttacaggcatggactctttggttgtttagggtttagttccaaaggttacagtgccttgaacggtttagcccgtagcttaaacccagtttcatctggttaaatcatagattaagcaaatgttttatgtatagattatgaatccttaagttatatatagactatagtatatgtcattgtattccatcatttcttagatttgattactatgattctcttctagttcttgggaatgtattcagaatctaaaatttacagtaatgttgt

SEQ ID NO: 829 - protein, 380 aa, Arabidopsis thaliana
MDLVESFSHGDPDTPRFSDDFGSGSACSTPFVSAPSSPGRGPPPGYFFSAPSSPMHFFLCSASSSSENPKKLDTSSCGDFEFDFSSRLSSSSGPLGGVSMTSAEELFSNGQIKPMKLSSHLQRPQILSPLLDLENEEEDDDDETKPNGEMKRGRDLKLRSRSVHRKARSLSPLRNAAYQWNQEEGEEEEVAGEREVKECIRKLQEDENVPSAETTPSCSASSSRSSSYGRNSKKWIFLKDLLHRSKSEGRGNGKEKFWSNISFSPSNFKDKKLKSSQLEEKPIQETVDAAVESKKQKQKQPPAKKAPVNGKPTNGIAKRRGLQPSAHELHYTTNRAQAEEMKKRTYLPYRHGLFGCLGFSSKGYSALNGLARSLNPVSSG

SEQ ID NO: 830 - protein, 326 aa, Arabidopsis thaliana
MHFFLCSASSSSENPKKLDTSSCGDFEFDFSSRLSSSSGPLGGVSMTSAEELFSNGQIKPMKLSSHLQRPQILSPLLDLENEEEDDDDETKPNGEMKRGRDLKLRSRSVHRKARSLSPLRNAAYQWNQEEGEEEEVAGEREVKECIRKLQEDENVPSAETTPSCSASSSRSSSYGRNSKKWIFLKDLLHRSKSEGRGNGKEKFWSNISFSPSNFKDKKLKSSQLEEKPIQETVDAAVESKKQKQKQPPAKKAPVNGKPTNGIAKRRGLQPSAHELHYTTNRAQAEEMKKRTYLPYRHGLFGCLGFSSKGYSALNGLARSLNPVSSG

SEQ ID NO: 831 - protein, 281 aa, Arabidopsis thaliana
MTSAEELFSNGQIKPMKLSSHLQRPQILSPLLDLENEEEDDDDETKPNGEMKRGRDLKLRSRSVHRKARSLSPLRNAAYQWNQEEGEEEEVAGEREVKECIRKLQEDENVPSAETTPSCSASSSRSSSYGRNSKKWIFLKDLLHRSKSEGRGNGKEKFWSNISFSPSNFKDKKLKSSQLEEKPIQETVDAAVESKKQKQKQPPAKKAPVNGKPTNGIAKRRGLQPSAHELHYTTNRAQAEEMKKRTYLPYRHGLFGCLGFSSKGYSALNGLARSLNPVSSG

SEQ ID NO: 832 - DNA, 1334 bp, Arabidopsis thaliana
attctcatatttacttttgatctcgtggtgttagaatcaaagaaaccgcttcaaggatggtgagtgaaggagcaacaagaaaagaacttaacctctgtttcgagaatatgaagatggaaggagttttgatctctgagtggaaagatatccctgtggagcttctcatgaagattttaaaccttgttgatgatcggactgtgatcattgcttcttgtatttgtagtggctggagagatgctgtttcccttggcctcactcgcctctccctctcttggtgcaagaagaatatgaacagtttggttctatctcttgctcccaaattcgtaaagcttcagactttagtactgcgacaggacaaaccgcagcttgaggacaacgcggtggaagccatagcaaatcactgtcatgagctacaagatttggacttaagcaaaagctcgaaaatcactgaccattccctatattcacttgctcgtggttgtactaacctgactaaactcaaccttagcggctgcacttcgttcagcgacactgctcttgcgcatttgacaagattttgcaggaagctcaaaattctgaatctttgtggttgtgttgaagctgtatctgacaatacattgcaggctattggagaaaactgcaatcagttgcagtcactaaacttgggatggtgtgagaatataagtgatgatggagttatgagtttagcttatggttgtcctgatttaagaactcttgatctttgtagctgtgttctaatcacagatgagagtgttgtggctttggcgaatcggtgcattcacttgaggtcattggggttatactactgcagaaacattacagacagagcaatgtactctttagctcagagcggagtcaagaacaaacacgagatgtggcgagcggtaaagaaaggaaaattcgatgaagaaggactaagaagccttaacattagtcaatgcacttacctaacaccttcagctgttcaagctgtctgtgatacattccctgctctccacacttgttcaggcagacattcacttgtcatgagcggttgtttgaatctacaatctgttcattgtgcttgtatccttcaagctcaccgcactcacaccgtttaccctcacccggcgcattgaaacggtgtgtgagccagagggtctactactctctagtatgtgtgtacatacatataaccatatggtgttaataaagcttctttgagttccttctttgtctttgatgcaatcttaagattttaacattacctagtcttgaaaatcttgtaatgaatcgcgaaatacttatttcttctaacaatttgtttaagttgc

SEQ ID NO: 833 - protein, 360 aa, Arabidopsis thaliana
MVSEGATRKELNLCFENMKMEGVLISEWKDIPVELLMKILNLVDDRTVIIASCICSGWRDAVSLGLTRLSLSWCKKNMNSLVLSLAPKFVKLQTLVLRQDKPQLEDNAVEAIANHCHELQDLDLSKSSKITDHSLYSLARGCTNLTKLNLSGCTSFSDTALAHLTRFCRKLKILNLCGCVEAVSDNTLQAIGENCNQLQSLNLGWCENISDDGVMSLAYGCPDLRTLDLCSCVLITDESVVALANRCIHLRSLGLYYCRNITDRAMYSLAQSGVKNKHEMWRAVKKGKFDEEGLRSLNISQCTYLTPSAVQAVCDTFPALHTCSGRHSLVMSGCLNLQSVHCACILQAHRTHTVYPHPAH

SEQ ID NO: 834 - protein, 343 aa, Arabidopsis thaliana
MKMEGVLISEWKDIPVELLMKILNLVDDRTVIIASCICSGWRDAVSLGLTRLSLSWCKKNMNSLVLSLAPKFVKLQTLVLRQDKPQLEDNAVEAIANHCHELQDLDLSKSSKITDHSLYSLARGCTNLTKLNLSGCTSFSDTALAHLTRFCRKLKILNLCGCVEAVSDNTLQAIGENCNQLQSLNLGWCENISDDGVMSLAYGCPDLRTLDLCSCVLITDESVVALANRCIHLRSLGLYYCRNITDRAMYSLAQSGVKNKHEMWRAVKKGKFDEEGLRSLNISQCTYLTPSAVQAVCDTFPALHTCSGRHSLVMSGCLNLQSVHCACILQAHRTHTVYPHPAH

SEQ ID NO: 835 - protein, 341 aa, Arabidopsis thaliana
MEGVLISEWKDIPVELLMKILNLVDDRTVIIASCICSGWRDAVSLGLTRLSLSWCKKNMNSLVLSLAPKFVKLQTLVLRQDKPQLEDNAVEAIANHCHELQDLDLSKSSKITDHSLYSLARGCTNLTKLNLSGCTSFSDTALAHLTRFCRKLKILNLCGCVEAVSDNTLQAIGENCNQLQSLNLGWCENISDDGVMSLAYGCPDLRTLDLCSCVLITDESVVALANRCIHLRSLGLYYCRNITDRAMYSLAQSGVKNKHEMWRAVKKGKFDEEGLRSLNISQCTYLTPSAVQAVCDTFPALHTCSGRHSLVMSGCLNLQSVHCACILQAHRTHTVYPHPAH

SEQ ID NO: 836 - DNA, 1740 bp, Arabidopsis thaliana
aaccaaagactcttaaccatctcttctctctctctttgaaaacatagcacacacaaaaaaaagacagagcaaaaaaacacacaaagatgggcataatgatgatgattttgggtcttcttgtgatcattgtttgtttatgtactgctcttctccgatggaaccagatgcgatattctaagaaaggtcttcctcctggaaccatgggctggccaatatttggtgaaacgactgagtttcttaaacaaggaccagatttcatgaaaaaccaaagactaagatatgggagtttcttcaagtctcacattcttggttgcccaacaatagtctcaatggacgcagagttaaacagatacattctaatgaatgaatcgaaaggacttgttgccggttacccgcaatctatgcttgatattctagggacatgcaacatagctgcggttcatggcccgagccaccggctaatgagaggctcgttgctttctttaataagcccaaccatgatgaaagaccatctcttgcctaagattgatgatttcatgagaaactatctttgtggttgggatgatcttgagacagttgatatccaagaaaagaccaaacatatggcatttttatcatcgttgttacaaatagctgagactttgaaaaaaccagaggttgaagaatatagaacagagtttttcaagcttgttgtgggaactctatcggtcccgatcgatatcccgggaacgaattaccgcagtggagtccaagcaagaaacaacatcgataggttattgacagaactgatgcaagaaagaaaagagtctggagaaactttcacagacatgttgggttacttgatgaagaaggaagataaccgatacttgttaaccgataaagagataagagatcaagtggtaacgatcttgtattccggttatgagactgtctctacaacctccatgatggctcttaagtatctccatgatcatccaaaagctcttgaagaactcagaagagaacatttggctataagggagagaaaacgacctgacgaaccgctcactctcgacgatattaaatcgatgaaattcactcgagctgtgatctttgagacatcaagattggcaacgattgttaatggtgtccttaggaaaactactcacgacttagaactcaacggttatttaatcccaaaaggttggagaatttacgtatacacaagagagattaactatgatacatctctttatgaagatccaatgatctttaacccatggagatggatggaaaagagcttagaatcaaagagctatttcttactctttggaggtggagttaggctttgccctggaaaggaactaggaatctcggaagtctcaagcttccttcactactttgttacaaaatatagatgggaagagaatggagaagacaaattaatggtctttccaagagtttctgcaccaaaaggataccatcttaagtgttcaccttactgactagttttgtcctaatattgaaaaatgtgtaaataaatctattaagggtcattttgtagggctaattaacctattttatctattaaatctctcaagatcatagaggagatggataatgtacagagagaaagagagaagaagaaaatggaatatagaaaaaaataaaatatttgaaatgttgagcttagtctcttatcttgtaaatttgtaacccataaatttttacatttcataattacgttctgtgttttttttt

SEQ ID NO: 837 - protein, 465 aa, Arabidopsis thaliana
MGIMMMILGLLVIIVCLCTALLRWNQMRYSKKGLPPGTMGWPIFGETTEFLKQGPDFMKNQRLRYGSFFKSHILGCPTIVSMDAELNRYILMNESKGLVAGYPQSMLDILGTCNIAAVHGPSHRLMRGSLLSLISPTMMKDHLLPKIDDFMRNYLCGWDDLETVDIQEKTKHMAFLSSLLQIAETLKKPEVEEYRTEFFKLVVGTLSVPIDIPGTNYRSGVQARNNIDRLLTELMQERKESGETFTDMLGYLMKKEDNRYLLTDKEIRDQVVTILYSGYETVSTTSMMALKYLHDHPKALEELRREHLAIRERKRPDEPLTLDDIKSMKFTRAVIFETSRLATIVNGVLRKTTHDLELNGYLIPKGWRIYVYTREINYDTSLYEDPMIFNPWRWMEKSLESKSYFLLFGGGVRLCPGKELGISEVSSFLHYFVTKYRWEENGEDKLMVFPRVSAPKGYHLKCSPY

SEQ ID NO: 838 - protein, 462 aa, Arabidopsis thaliana
MMMILGLLVIIVCLCTALLRWNQMRYSKKGLPPGTMGWPIFGETTEFLKQGPDFMKNQRLRYGSFFKSHILGCPTIVSMDAELNRYILMNESKGLVAGYPQSMLDILGTCNIAAVHGPSHRLMRGSLLSLISPTMMKDHLLPKIDDFMRNYLCGWDDLETVDIQEKTKHMAFLSSLLQIAETLKKPEVEEYRTEFFKLVVGTLSVPIDIPGTNYRSGVQARNNIDRLLTELMQERKESGETFTDMLGYLMKKEDNRYLLTDKEIRDQVVTILYSGYETVSTTSMMALKYLHDHPKALEELRREHLAIRERKRPDEPLTLDDIKSMKFTRAVIFETSRLATIVNGVLRKTTHDLELNGYLIPKGWRIYVYTREINYDTSLYEDPMIFNPWRWMEKSLESKSYFLLFGGGVRLCPGKELGISEVSSFLHYFVTKYRWEENGEDKLMVFPRVSAPKGYHLKCSPY

SEQ ID NO: 839 - protein, 461 aa, Arabidopsis thaliana
MMILGLLVIIVCLCTALLRWNQMRYSKKGLPPGTMGWPIFGETTEFLKQGPDFMKNQRLRYGSFFKSHILGCPTIVSMDAELNRYILMNESKGLVAGYPQSMLDILGTCNIAAVHGPSHRLMRGSLLSLISPTMMKDHLLPKIDDFMRNYLCGWDDLETVDIQEKTKHMAFLSSLLQIAETLKKPEVEEYRTEFFKLVVGTLSVPIDIPGTNYRSGVQARNNIDRLLTELMQERKESGETFTDMLGYLMKKEDNRYLLTDKEIRDQVVTILYSGYETVSTTSMMALKYLHDHPKALEELRREHLAIRERKRPDEPLTLDDIKSMKFTRAVIFETSRLATIVNGVLRKTTHDLELNGYLIPKGWRIYVYTREINYDTSLYEDPMIFNPWRWMEKSLESKSYFLLFGGGVRLCPGKELGISEVSSFLHYFVTKYRWEENGEDKLMVFPRVSAPKGYHLKCSPY

SEQ ID NO: 840 - DNA, 1556 bp, Arabidopsis thaliana
aactccaaatctctacacttccatataattaaaacacagagagacgaagaaaatcgagatctcgaataatgcgaatctgaaggatctttacgaattccataatcttcagatcgaaaggtttctatcgattcgttggtcaagaggagattgtgcgtgtgattcgtgagcatgggctgttcgttttcaggattgaacgcactttacgacgccgtcaacggtggaggtgacgtatggatcaatgagaatcgattcaggatcgtgaggcagctcggcgaaggaggtttcgcattcgtctttttggtcaaggaaattgtcgccgacgcttcctccgccgcatccggtggtggtctagctaagaaagtcaaggatccggctcatctctccgctgacggaacttatgctatgaagaaagttttgattcagaacaaggagcaattggaattggtgcgtgaggagatccgtgtttcttcattgttcaatcaccctaatttgcttccactccttgatcatgccattatttctgttaaggacggccaagagggagcttggaaacacgaggccttcttgctgtttcctgttcacttggatgggaccttgctggataatttcactttgatgaaggctaaaaaagaaactttctcaacaactgatgttttgcacatattccgtcagctttgtgatggacttaaacacatgcactctctggagccaccatatgctcacaacgatgtcaaacctggcaacgtccttttaacacgtagaaaaggacagcctcctcttgcgatattgatggactttggaagtgctcgcccatcacggaagcaaatccgttcccgtcaagaggccttacagttacaggaatggacatctgagcattgctcagcaccgtttcgagctcccgagctctgggattgcccaagccatgctgatattgatgagagaacagatatctggtcactaggctgcacattatatgcaataatgtatggtgtgtctccattcgagtatgcgcttggagaatctggtggaagtcttcagcttgcaatcgtgaacgctcagatcaaatggccaaacactggaccaaaagcttcttaccctgaagctcttcaccagttcgtaacttggatgctgcaaccacaagctgctgttcgaccgcgcatagacgatatcatcatccatgtcgacaaattgatcgctaaattcaccaaatgattcccgaattatgttggttttcaaaaaaaggtgaaaggaaagaaaagaagactctttatacattgctttgtctctttttttttctaatatccttagctgttttcaaaaatcccatattagatacatatatttaatagtattacattgctcttcgtaatgtattttgaactttttaggattcggggttttctttttgactatgggaagttgtgaaccaataaatttacttaagacagtatatctcgtagttgtcctaattctggtcgatgatgctgtaatgctattataattttgtgctgattcatattttaattataaccatagggtttttgaaaatgttattt

SEQ ID NO: 841 - protein, 347 aa, Arabidopsis thaliana
MGCSFSGLNALYDAVNGGGDVWINENRFRIVRQLGEGGFAFVFLVKEIVADASSAASGGGLAKKVKDPAHLSADGTYAMKKVLIQNKEQLELVREEIRVSSLFNHPNLLPLLDHAIISVKDGQEGAWKHEAFLLFPVHLDGTLLDNFTLMKAKKETFSTTDVLHIFRQLCDGLKHMHSLEPPYAHNDVKPGNVLLTRRKGQPPLAILMDFGSARPSRKQIRSRQEALQLQEWTSEHCSAPFRAPELWDCPSHADIDERTDIWSLGCTLYAIMYGVSPFEYALGESGGSLQLAIVNAQIKWPNTGPKASYPEALHQFVTWMLQPQAAVRPRIDDIIIHVDKLIAKFTK

SEQ ID NO: 842 - protein, 269 aa, Arabidopsis thaliana
MKKVLIQNKEQLELVREEIRVSSLFNHPNLLPLLDHAIISVKDGQEGAWKHEAFLLFPVHLDGTLLDNFTLMKAKKETFSTTDVLHIFRQLCDGLKHMHSLEPPYAHNDVKPGNVLLTRRKGQPPLAILMDFGSARPSRKQIRSRQEALQLQEWTSEHCSAPFRAPELWDCPSHADIDERTDIWSLGCTLYAIMYGVSPFEYALGESGGSLQLAIVNAQIKWPNTGPKASYPEALHQFVTWMLQPQAAVRPRIDDIIIHVDKLIAKFTK

SEQ ID NO: 843 - protein, 198 aa, Arabidopsis thaliana
MKAKKETFSTTDVLHIFRQLCDGLKHMHSLEPPYAHNDVKPGNVLLTRRKGQPPLAILMDFGSARPSRKQIRSRQEALQLQEWTSEHCSAPFRAPELWDCPSHADIDERTDIWSLGCTLYAIMYGVSPFEYALGESGGSLQLAIVNAQIKWPNTGPKASYPEALHQFVTWMLQPQAAVRPRIDDIIIHVDKLIAKFTK

SEQ ID NO: 844 - DNA, 1515 bp, Arabidopsis thaliana
gtgcaattatatccgccgaccatctctctcctccgtcaccgagggagagcaaccatgccaatctcaattccccttaacgccactctacaatactcgtctccttcttcttcttcttcttcttcttctctcgtaccttcttcccctcttttctctccgattccttcaaccactgtttcccttaccggaattcgccagcgatgcctcaggatggtcacttcttgcgtctccaacgctcagaaatccgtcctgaatggtgccaccgattccgtctctgtcgtcgggcgggagcagattcgtcttggtcttcctagcaaaggacgcatggccgccgattcgctggatcttctcaaggattgccaattgtttgtcaaacaagtcaatccacgacaatatgttgctcaaattcctcagttaccaaatactgaagtttggtttcaacgaccaaaagacattgtcagaaagttgctatcaggagatctggatctaggcatcgttggtcttgacatagttggtgaatttggtcagggaaatgaagatcttatcattgtccacgaagctctcaactttggagattgtcatctctcccttgccatacccaattatggaatatttgagaatataaaatctctgaaggagctagcacaaatgcctcaatggaccgaggaaagacctttacgagttgctacaggattcacttatctaggccccaaatttatgaaagacaacggtataaagcatgtgactttctcaactgcagatggagccctagaggcagcgcctgcgatggggatagctgatgccattttagaccttgtgagcagtgggacaacccttaaagagaacaacttaaaagaaattgaaggaggggttgtgctggaaagtcaggctgcactagtggcgagtagaagggcattgactgagagaaaaggagcactagaaacagtgcatgagattctcgagagattagaggctcatttgaaggcaaatggtcaattcactgtggttgcaaacatgagaggaacggatgctgaagaagtggctgaacgtgtgaaaacccaaccatcactatcaggattgcagggaccaacaataagtccagtttattgtaaacgagatggaaaagtaacaattgagtactatgccattgtgatatgtgtaccaaaaaaagcgctttatgagtctgtgcagcaactgagagcggtgggaggaagtggggtactagtttctcctgtaacatacatttttcatgaggagactcccagatggagtcagcttctgagtaacctcggcctttgatgctgcttctcagacatactttggtttagtcagatgcattcgttggaggaactcttttggtcaaacactacaatgtctttcttttttgggttttatctttgtggatcttatagtagaaaaaacagaggttgtctcttttaagccttttaagtccatctatgccatttcagtttttcaggagtcaacacttttaaaaaccaattttatcaaagcattcgt

SEQ ID NO: 845 - protein, 431 aa, Arabidopsis thaliana
VQLYPPTISLLRHRGRATMPISIPLNATLQYSSPSSSSSSSSLVPSSPLFSPIPSTTVSLTGIRQRCLRMVTSCVSNAQKSVLNGATDSVSVVGREQIRLGLPSKGRMAADSLDLLKDCQLFVKQVNPRQYVAQIPQLPNTEVWFQRPKDIVRKLLSGDLDLGIVGLDIVGEFGQGNEDLIIVHEALNFGDCHLSLAIPNYGIFENIKSLKELAQMPQWTEERPLRVATGFTYLGPKFMKDNGIKHVTFSTADGALEAAPAMGIADAILDLVSSGTTLKENNLKEIEGGVVLESQAALVASRRALTERKGALETVHEILERLEAHLKANGQFTVVANMRGTDAEEVAERVKTQPSLSGLQGPTISPVYCKRDGKVTIEYYAIVICVPKKALYESVQQLRAVGGSGVLVSPVTYIFHEETPRWSQLLSNLGL

SEQ ID NO: 846 - protein, 413 aa, Arabidopsis thaliana
MPISIPLNATLQYSSPSSSSSSSSLVPSSPLFSPIPSTTVSLTGIRQRCLRMVTSCVSNAQKSVLNGATDSVSVVGREQIRLGLPSKGRMAADSLDLLKDCQLFVKQVNPRQYVAQIPQLPNTEVWFQRPKDIVRKLLSGDLDLGIVGLDIVGEFGQGNEDLIIVHEALNFGDCHLSLAIPNYGIFENIKSLKELAQMPQWTEERPLRVATGFTYLGPKFMKDNGIKHVTFSTADGALEAAPAMGIADAILDLVSSGTTLKENNLKEIEGGVVLESQAALVASRRALTERKGALETVHEILERLEAHLKANGQFTVVANMRGTDAEEVAERVKTQPSLSGLQGPTISPVYCKRDGKVTIEYYAIVICVPKKALYESVQQLRAVGGSGVLVSPVTYIFHEETPRWSQLLSNLGL

SEQ ID NO: 847 - protein, 362 aa, Arabidopsis thaliana
MVTSCVSNAQKSVLNGATDSVSVVGREQIRLGLPSKGRMAADSLDLLKDCQLFVKQVNPRQYVAQIPQLPNTEVWFQRPKDIVRKLLSGDLDLGIVGLDIVGEFGQGNEDLIIVHEALNFGDCHLSLAIPNYGIFENIKSLKELAQMPQWTEERPLRVATGFTYLGPKFMKDNGIKHVTFSTADGALEAAPAMGIADAILDLVSSGTTLKENNLKEIEGGVVLESQAALVASRRALTERKGALETVHEILERLEAHLKANGQFTVVANMRGTDAEEVAERVKTQPSLSGLQGPTISPVYCKRDGKVTIEYYAIVICVPKKALYESVQQLRAVGGSGVLVSPVTYIFHEETPRWSQLLSNLGL

SEQ ID NO: 848 - DNA, 1264 bp, Arabidopsis thaliana
aaatccacagagattttctctctttgatcacaattcaatcatacactctattctcatctcttactcaggtcaaaactctctaaagttggaatcttgatttggtttttaaggtaagattagctcaaaatgagtttaggtgctttgatggaagagaagagaagagcaacaacttcatcttcttcttctcaggtacatatgtcaaatgatatagattggcaaatgcttgataaatcgaggtttttcttcctcggtgctgctcttttctccggtgtatccactgctctttaccctattgtagttctcaaaacaaggcaacaagtctctccgactcgtgtctcatgtgccaacatttctctggctattgctagacttgaaggtcttaaagggttttacaagggttttggaacatctttgcttggaaccatcccggctcgtgctctctatatgactgctctagagattacaaagagtagtgtaggtcaagcaactgttaggttaggattgtctgatactacgtctttggctgttgctaatggtgcagctggtttgacctcggctgtggctgcccagactgtctggactccgattgatattgtgagtcaagggcttatggttcaaggcgatgtctccttgagtaagcatcttcctggagtgatgaactcttgcagatacagaaatgggtttgatgcttttagaaagattctttacacagatggaccaagagggttctacagaggatttgggatctcgatcttgacttacgcaccttccaacgcggtttggtgggcgtcttattctttggctcaaaaatcaatttggtctcgatacaagcactcctacaaccacaaggaagatgctggtggctcagtggtggttcaagcgttgagtgcagctacagcaagcggttgctcggctttagtaactatgccagtagacacaatcaagacgcggttgcaagtcttagacgcagaagagaacgggaggagacgagcaatgacagtgatgcagtcagtgaagagcttgatgaaggaaggaggagttggtgcttgttacagaggattaggaccaagatgggtctcaatgtcgatgtccgcaacaacgatgatcacaacctacgagttcttgaagcgcctagcaacaaagaagcagaaatgatatattgataaaaccttgttgtgttaagactaaccaaaatacttttgattgagtttgaagaatgttaataaacaaacataaaacagagcaaaagatcattacccctaat

SEQ ID NO: 849 - protein, 342 aa, Arabidopsis thaliana
MSLGALMEEKRRATTSSSSSQVHMSNDIDWQMLDKSRFFFLGAALFSGVSTALYPIVVLKTRQQVSPTRVSCANISLAIARLEGLKGFYKGFGTSLLGTIPARALYMTALEITKSSVGQATVRLGLSDTTSLAVANGAAGLTSAVAAQTVWTPIDIVSQGLMVQGDVSLSKHLPGVMNSCRYRNGFDAFRKILYTDGPRGFYRGFGISILTYAPSNAVWWASYSLAQKSIWSRYKHSYNHKEDAGGSVVVQALSAATASGCSALVTMPVDTIKTRLQVLDAEENGRRRAMTVMQSVKSLMKEGGVGACYRGLGPRWVSMSMSATTMITTYEFLKRLATKKQK

SEQ ID NO: 850 - protein, 336 aa, Arabidopsis thaliana
MEEKRRATTSSSSSQVHMSNDIDWQMLDKSRFFFLGAALFSGVSTALYPIVVLKTRQQVSPTRVSCANISLAIARLEGLKGFYKGFGTSLLGTIPARALYMTALEITKSSVGQATVRLGLSDTTSLAVANGAAGLTSAVAAQTVWTPIDIVSQGLMVQGDVSLSKHLPGVMNSCRYRNGFDAFRKILYTDGPRGFYRGFGISILTYAPSNAVWWASYSLAQKSIWSRYKHSYNHKEDAGGSVVVQALSAATASGCSALVTMPVDTIKTRLQVLDAEENGRRRAMTVMQSVKSLMKEGGVGACYRGLGPRWVSMSMSATTMITTYEFLKRLATKKQK

SEQ ID NO: 851 - protein, 319 aa, Arabidopsis thaliana
MSNDIDWQMLDKSRFFFLGAALFSGVSTALYPIVVLKTRQQVSPTRVSCANISLAIARLEGLKGFYKGFGTSLLGTIPARALYMTALEITKSSVGQATVRLGLSDTTSLAVANGAAGLTSAVAAQTVWTPIDIVSQGLMVQGDVSLSKHLPGVMNSCRYRNGFDAFRKILYTDGPRGFYRGFGISILTYAPSNAVWWASYSLAQKSIWSRYKHSYNHKEDAGGSVVVQALSAATASGCSALVTMPVDTIKTRLQVLDAEENGRRRAMTVMQSVKSLMKEGGVGACYRGLGPRWVSMSMSATTMITTYEFLKRLATKKQK

SEQ ID NO: 852 - DNA, 1343 bp, Arabidopsis thaliana
agcaaaattccaaacaaatattttcccatccttggatttttcatccccttcctctcggcgacaagaacaacaacaacacaaaaaaactcaaaaccatcgcgaacatcgaagaatcatctctcaacaattctccgataattctttggactgatgaattaaagggaaacgctgagtgtaaatcatacaacagttctaagtcgtgaaaacaaaaaaaagatggcttgtagaggttgtttggagtgtttgttgaagttactcaactttctcctggctgttgctggacttggcatgattggttatggtatctatttattcgttgagtacaagagagttaccgataattctgttacattcgatttgactaatggagatcaaagttacgtttcgtttgggaggcctattcttatggctgtgtcactgtcttctaatatctttgacaatcttcccaaagcgtggttcatatacttgttcattggtattggtgtggctctctttgttatttcttgctgtggctgtgttggtacttgttcgaggagtgtctgctgcttatcttgctactctcttcttctgatcttgttgatcttggtggagcttggattcgcagcatttattttcttcgataacagctggagagatgaacttccttctgacaggactggaaacttcgatacgatatataatttccttagagagaactggaagattgtaagatgggtagctctaggagcagttgttttcgaggctttactcttcttgcttgcccttatggtcagggcagctaatacaccagcagagtatgacagtgatgatgaatatcttgctccaaggcaacaaatcaggcagccattcatcaaccgccaagccgcccctgtcactggtgtcccagttgctcctactttggaccaacgcccaagccgcagtgacccttggagtgcacgtatgagggaaaagtatgggcttgacacatctgagttcacatacaatccctcagagtcacaccggttccagcaaatgccagcgcaaccaaacgaagaaaagggccgatgcaccatcatgtgagtccattttaaaagtcttgaagagttcagttaattctcttttcctgtgtctttattatttctgcgtgtaacaatcaagagtgtcagtaaaagtaggattcttgtttctgggttgatgatgactctagcatttgagatctctaatcaacctagtcacggtctcaaaactcatttgttgtgtctgtgtagtcttttgtaaggattcaccattatgaatattcatcttggttcccagtctgatccagtcctatgtttcttattatatataaaaaattcactttcttc

SEQ ID NO: 853 - protein, 280 aa, Arabidopsis thaliana
MACRGCLECLLKLLNFLLAVAGLGMIGYGIYLFVEYKRVTDNSVTFDLTNGDQSYVSFGRPILMAVSLSSNIFDNLPKAWFIYLFIGIGVALFVISCCGCVGTCSRSVCCLSCYSLLLILLILVELGFAAFIFFDNSWRDELPSDRTGNFDTIYNFLRENWKIVRWVALGAVVFEALLFLLALMVRAANTPAEYDSDDEYLAPRQQIRQPFINRQAAPVTGVPVAPTLDQRPSRSDPWSARMREKYGLDTSEFTYNPSESHRFQQMPAQPNEEKGRCTIM

SEQ ID NO: 854 - protein, 256 aa, Arabidopsis thaliana
MIGYGIYLFVEYKRVTDNSVTFDLTNGDQSYVSFGRPILMAVSLSSNIFDNLPKAWFIYLFIGIGVALFVISCCGCVGTCSRSVCCLSCYSLLLILLILVELGFAAFIFFDNSWRDELPSDRTGNFDTIYNFLRENWKIVRWVALGAVVFEALLFLLALMVRAANTPAEYDSDDEYLAPRQQIRQPFINRQAAPVTGVPVAPTLDQRPSRSDPWSARMREKYGLDTSEFTYNPSESHRFQQMPAQPNEEKGRCTIM

SEQ ID NO: 855 - protein, 217 aa, Arabidopsis thaliana
MAVSLSSNIFDNLPKAWFIYLFIGIGVALFVISCCGCVGTCSRSVCCLSCYSLLLILLILVELGFAAFIFFDNSWRDELPSDRTGNFDTIYNFLRENWKIVRWVALGAVVFEALLFLLALMVRAANTPAEYDSDDEYLAPRQQIRQPFINRQAAPVTGVPVAPTLDQRPSRSDPWSARMREKYGLDTSEFTYNPSESHRFQQMPAQPNEEKGRCTIM

SEQ ID NO: 856 - DNA, 1596 bp, Arabidopsis thaliana
aatgaaagaaactgttcaacaacttctgatttctaaaatctttttaaaatctctccgccacttctagttggacttgacttctcaccatagtctgtcccgttgttaccgaccatctattatatagggaaagtctcttagctacagagacacaataaccatttggagaggtcatgaactctaagaatcgcataaacaatgtcggggaaggtgttgatatcgaaatccctgacactgctcatcagattagcagcgattcatggtttcaggcagcgttcgttctgacaacaagtataaacagcgcatacgtgttgggatattcaggaacagtcatggttcctttaggatggattggtggtgtggttggtcttattcttgctactgcaatctcactctatgcaaacactctcgtagccaagcttcatgagtttggtggcaaaagacacattcgctatagagaccttgcgggattcatttacggtagaaaggcttattgtcttacatgggtgttgcaatatgtcaatcttttcatgattaattgtggtttcatcatactagctggttccgccttaaaggctgtttatgtgctttttagggatgatcatgccatgaagttacctcattttatagctattgcgggtctgatttgtgcggtttttgctattggaattcctcatttgtcggctcttgggatatggcttgcggtttcgactatcctcagcctgatctatatcgttgtggcaatcgtgctatcggttaaagatggagttaaagcaccttcaagagattacgagatacaaggatcaccactaagcaaactttttaccatcactggagcagccgctacactagttttcgtattcaacacagggatgcttccagaaattcaggcaacagtaaagcaaccagtagtaaaaaacatgatgaaggctctatactttcaattcacggtgggtgttttaccgatgtttgcggttgtattcatcgggtattgggcttacggatcctcgacctcgccctatctactaaacaacgttaatggtccactttgggttaaagcccttgctaacatctccgctatccttcaatccgttatctcgttgcacatttttgcaagtccaacatatgagtacatggacaccaagtttgggatcaaaggaaacccattggcattaaagaacttgttgtttaggatcatggcaagaggcgggtacatagcagttagtacgcttctctcagcactcttgccgttccttggggacttcatgagcctcactggtgcagtgagcacattcccccttacattcattctagccaaccacatgtactataaggctaagaacaataagctcaatactttgcaaaagctatgccattggctcaacgttgtcttcttcagtttgatgtctgttgctgccgccattgcagctcttaggctcatcgcccttgactccaaaaacttccacgtttttgcagatttgtaattcataatatatactcatcgtatttattcttagttggatttcttatcaataaaattaattttcaataaaacaatgtatatagaactatggttactaggggatggagatattatgc

SEQ ID NO: 857 - protein, 436 aa, Arabidopsis thaliana
MNSKNRINNVGEGVDIEIPDTAHQISSDSWFQAAFVLTTSINSAYVLGYSGTVMVPLGWIGGVVGLILATAISLYANTLVAKLHEFGGKRHIRYRDLAGFIYGRKAYCLTWVLQYVNLFMINCGFIILAGSALKAVYVLFRDDHAMKLPHFIAIAGLICAVFAIGIPHLSALGIWLAVSTILSLIYIVVAIVLSVKDGVKAPSRDYEIQGSPLSKLFTITGAAATLVFVFNTGMLPEIQATVKQPVVKNMMKALYFQFTVGVLPMFAVVFIGYWAYGSSTSPYLLNNVNGPLWVKALANISAILQSVISLHIFASPTYEYMDTKFGIKGNPLALKNLLFRIMARGGYIAVSTLLSALLPFLGDFMSLTGAVSTFPLTFILANHMYYKAKNNKLNTLQKLCHWLNVVFFSLMSVAAAIAALRLIALDSKNFHVFADL

SEQ ID NO: 858 - protein, 383 aa, Arabidopsis thaliana
MVPLGWIGGVVGLILATAISLYANTLVAKLHEFGGKRHIRYRDLAGFIYGRKAYCLTWVLQYVNLFMINCGFIILAGSALKAVYVLFRDDHAMKLPHFIAIAGLICAVFAIGIPHLSALGIWLAVSTILSLIYIVVAIVLSVKDGVKAPSRDYEIQGSPLSKLFTITGAAATLVFVFNTGMLPEIQATVKQPVVKNMMKALYFQFTVGVLPMFAVVFIGYWAYGSSTSPYLLNNVNGPLWVKALANISAILQSVISLHIFASPTYEYMDTKFGIKGNPLALKNLLFRIMARGGYIAVSTLLSALLPFLGDFMSLTGAVSTFPLTFILANHMYYKAKNNKLNTLQKLCHWLNVVFFSLMSVAAAIAALRLIALDSKNFHVFADL

SEQ ID NO: 859 - protein, 317 aa, Arabidopsis thaliana
MINCGFIILAGSALKAVYVLFRDDHAMKLPHFIAIAGLICAVFAIGIPHLSALGIWLAVSTILSLIYIVVAIVLSVKDGVKAPSRDYEIQGSPLSKLFTITGAAATLVFVFNTGMLPEIQATVKQPVVKNMMKALYFQFTVGVLPMFAVVFIGYWAYGSSTSPYLLNNVNGPLWVKALANISAILQSVISLHIFASPTYEYMDTKFGIKGNPLALKNLLFRIMARGGYIAVSTLLSALLPFLGDFMSLTGAVSTFPLTFILANHMYYKAKNNKLNTLQKLCHWLNVVFFSLMSVAAAIAALRLIALDSKNFHVFADL

SEQ ID NO: 860 - DNA, 1979 bp, Arabidopsis thaliana
tcttcttcaccttattttcgggtatcaaagccacaaaaccctgagaatggcggcagctactcaatttctctcccaaccttcgtctctcaatccacaccaactgaagaaccaaacctcacaacgctccagaagcatccctgtcttgtctcttaaatccacattgaagccacttaaacgcctctccgtgaaagccgccgtcgtttctcaaaactcgtccaaaaccgtgacgaagttcgatcactgtttcaagaaatcatcagatgggtttctctattgtgaaggaactaaagttgaggatatcatggagtcagtggagagaagacccttttacttatatagcaaacctcagatcactagaaacctcgaggcttataaagaagcattggaaggagtgagctctgtgattggttacgctatcaaagctaataacaatcttaaaattttggagcatttgagaagtttaggctgtggtgctgtgctcgttagtggaaatgagcttagacttgctcttcgtgctggtttcgatcccacaaagtgcattttcaatggaaatggcaagtctttggaagatttagttctagctgctcaagaaggtgttttcgttaatgtcgatagtgagtttgacttgaataacattgtggaagcttcaagaatttctggtaagcaggtcaatgtactgctgcgtatcaatcctgatgttgatcctcaggtgcatccatatgttgctactgggaacaagaactcaaagtttggtatcaggaacgagaagcttcaatggtttctggatcaggtcaaggcacatcccaaagagctgaagcttgttggagctcattgccatctaggctctaccattactaaggtggatatattcagagatgcggcagttctcatgatagaatacattgacgagatccggcgtcaaggttttgaagttagttacttgaacattggtggtggtttagggattgattattaccatgccggcgctgtccttcccacacccatggatctcatcaacactgtaagagagcttgttctttcacgagacctgaatctaataatcgagccagggagatctctgattgcaaacacttgctgtttcgtcaaccatgtaactggtgtgaagacgaatggaactaagaacttcatagtcattgatggaagtatggctgagcttatccgtcccagtctttatgatgcttatcagcacattgagttggtctctcctccaccggctgaagcagaggttaccaaattcgacgtagtgggtcctgtctgtgaatctgctgatttcctgggcaaagacagagagcttcccactcctccacagggagctggtctggtggttcatgacgctggtgcatactgtatgagcatggcttccacttacaatctcaagatgcgtcctccggaatactgggttgaagaagatgggtcgatcactaagataaggcatgctgagacattcgatgaccatttgcgtttctttgaaggtctatgaactcttagatttactcatcattgttgcttttttgattgaattgtatgattattcggaatcaggaccataatgatattgctgttttagattttcacattatgtgctttgattcaaagtcaatgaagtgatcatatgaataagaaaacgttcacaagtcaagacagaaaataagaggtgattctgattataagaggagtctttcaagccaaagtcgtccattgtccaaacacataaacactcatctaagcttcttcccatagctataagaagattctttcaagctttttgttcacaagtttgcttgcagaactaaatgaatcaataactacaactactatgtcattaatcaagaaactaaaagaagatagttcatagttcacaggacaagtaaagtgaatttggtttatcatgtagtgacttaccgccacaagtctaatttcatcatgggttataaggaagattccaaaataaacctttt

SEQ ID NO: 861 - protein, 499 aa, Arabidopsis thaliana
LLHLIFGYQSHKTLRMAAATQFLSQPSSLNPHQLKNQTSQRSRSIPVLSLKSTLKPLKRLSVKAAVVSQNSSKTVTKFDHCFKKSSDGFLYCEGTKVEDIMESVERRPFYLYSKPQITRNLEAYKEALEGVSSVIGYAIKANNNLKILEHLRSLGCGAVLVSGNELRLALRAGFDPTKCIFNGNGKSLEDLVLAAQEGVFVNVDSEFDLNNIVEASRISGKQVNVLLRINPDVDPQVHPYVATGNKNSKFGIRNEKLQWFLDQVKAHPKELKLVGAHCHLGSTITKVDIFRDAAVLMIEYIDEIRRQGFEVSYLNIGGGLGIDYYHAGAVLPTPMDLINTVRELVLSRDLNLIIEPGRSLIANTCCFVNHVTGVKTNGTKNFIVIDGSMAELIRPSLYDAYQHIELVSPPPAEAEVTKFDVVGPVCESADFLGKDRELPTPPQGAGLVVHDAGAYCMSMASTYNLKMRPPEYWVEEDGSITKIRHAETFDDHLRFFEGL

SEQ ID NO: 862 - protein, 484 aa, Arabidopsis thaliana
MAAATQFLSQPSSLNPHQLKNQTSQRSRSIPVLSLKSTLKPLKRLSVKAAVVSQNSSKTVTKFDHCFKKSSDGFLYCEGTKVEDIMESVERRPFYLYSKPQITRNLEAYKEALEGVSSVIGYAIKANNNLKILEHLRSLGCGAVLVSGNELRLALRAGFDPTKCIFNGNGKSLEDLVLAAQEGVFVNVDSEFDLNNIVEASRISGKQVNVLLRINPDVDPQVHPYVATGNKNSKFGIRNEKLQWFLDQVKAHPKELKLVGAHCHLGSTITKVDIFRDAAVLMIEYIDEIRRQGFEVSYLNIGGGLGIDYYHAGAVLPTPMDLINTVRELVLSRDLNLIIEPGRSLIANTCCFVNHVTGVKTNGTKNFIVIDGSMAELIRPSLYDAYQHIELVSPPPAEAEVTKFDVVGPVCESADFLGKDRELPTPPQGAGLVVHDAGAYCMSMASTYNLKMRPPEYWVEEDGSITKIRHAETFDDHLRFFEGL

SEQ ID NO: 863 - protein, 399 aa, Arabidopsis thaliana
MESVERRPFYLYSKPQITRNLEAYKEALEGVSSVIGYAIKANNNLKILEHLRSLGCGAVLVSGNELRLALRAGFDPTKCIFNGNGKSLEDLVLAAQEGVFVNVDSEFDLNNIVEASRISGKQVNVLLRINPDVDPQVHPYVATGNKNSKFGIRNEKLQWFLDQVKAHPKELKLVGAHCHLGSTITKVDIFRDAAVLMIEYIDEIRRQGFEVSYLNIGGGLGIDYYHAGAVLPTPMDLINTVRELVLSRDLNLIIEPGRSLIANTCCFVNHVTGVKTNGTKNFIVIDGSMAELIRPSLYDAYQHIELVSPPPAEAEVTKFDVVGPVCESADFLGKDRELPTPPQGAGLVVHDAGAYCMSMASTYNLKMRPPEYWVEEDGSITKIRHAETFDDHLRFFEGL

SEQ ID NO: 864 - DNA, 1416 bp, Arabidopsis thaliana
aattcaacacggattttcaacacagagctgacgttagcatttgtctctgaaatcccagatccgaaaacccaacaatggcgtcagagaacaacggatccagatccgattccgaatccatcaccgctcccaaagctgattccaccgtcgttgaaccgaggaagatagctctgatcaccggaatcaccggccaggacggatcatacctgacggagttccttctcggaaaaggctacgaatttcatggtctgatccgtcgatcatcgaatttcaacacccagcgaatcaaccatatctacatcgatccacacaatgtcaacaaagctctgatgaaactccactacgccgatctcaccgacgcttcctctctccgtcgttggatcgatgtgatcaagcctgacgaagtttataacctagctgctcaatctcacgtcgctgtctccttcgagatccctgattacacagccgatgtagtcgcaaccggtgctctccgtctccttgaagccgtcagatctcacaccatcgacagtggccgtaccgtcaagtattaccaagccggatcttcggagatgtttggatcaactcctcctccacaatcggagacgacgccgtttcaccccagatctccttacgcagcttccaaatgcgctgctcattggtacacagtgaattacagagaggcgtacggtctcttcgcttgtaacggaatcttgttcaatcacgagtcacctcgccgtggtgagaatttcgtgacgaggaagatcacaagagcattgggaaggatcaaggttggtttgcagacgaagctattccttgggaatttgcaagcgtcaagagattggggatttgcaggagattatgtggaagcaatgtggttgatgttgcagcaagagaagccagatgattacgttgtggcaacagaggaaggacacacagtggaagagtttcttgatgtgtcatttgggtatttgggactcaattggaaagattatgttgagattgaccagaggtactttaggcctgctgaagtagataaccttcaaggagatgcaagcaaggcaaaggaagtgttggggtggaaaccacaagtagggtttgagaagcttgtgaagatgatggttgatgaagatcttgagcttgctaagagggagaaagtgcttgttgatgctggatacatggatgctaagcagcaaccttgatttgatcaattatacaaagatggagtttcttacatttatctgcttttatagagttttaaatttcgtttttttttctttctctttttgttgctttggtggttgtttgttgtctttttatgttttagtttctttgttgctttttaagttatctaaattgtttccctccaatgagttgaggatgaaagcgcagtgaattttgaatgaaggagcaaaaagaatc

SEQ ID NO: 865 - protein, 373 aa, Arabidopsis thaliana
MASENNGSRSDSESITAPKADSTVVEPRKIALITGITGQDGSYLTEFLLGKGYEFHGLIRRSSNFNTQRINHIYIDPHNVNKALMKLHYADLTDASSLRRWIDVIKPDEVYNLAAQSHVAVSFEIPDYTADVVATGALRLLEAVRSHTIDSGRTVKYYQAGSSEMFGSTPPPQSETTPFHPRSPYAASKCAAHWYTVNYREAYGLFACNGILFNHESPRRGENFVTRKITRALGRIKVGLQTKLFLGNLQASRDWGFAGDYVEAMWLMLQQEKPDDYVVATEEGHTVEEFLDVSFGYLGLNWKDYVEIDQRYFRPAEVDNLQGDASKAKEVLGWKPQVGFEKLVKMMVDEDLELAKREKVLVDAGYMDAKQQP

SEQ ID NO: 866 - protein, 289 aa, Arabidopsis thaliana
MKLHYADLTDASSLRRWIDVIKPDEVYNLAAQSHVAVSFEIPDYTADVVATGALRLLEAVRSHTIDSGRTVKYYQAGSSEMFGSTPPPQSETTPFHPRSPYAASKCAAHWYTVNYREAYGLFACNGILFNHESPRRGENFVTRKITRALGRIKVGLQTKLFLGNLQASRDWGFAGDYVEAMWLMLQQEKPDDYVVATEEGHTVEEFLDVSFGYLGLNWKDYVEIDQRYFRPAEVDNLQGDASKAKEVLGWKPQVGFEKLVKMMVDEDLELAKREKVLVDAGYMDAKQQP

SEQ ID NO: 867 - protein, 209 aa, Arabidopsis thaliana
MFGSTPPPQSETTPFHPRSPYAASKCAAHWYTVNYREAYGLFACNGILFNHESPRRGENFVTRKITRALGRIKVGLQTKLFLGNLQASRDWGFAGDYVEAMWLMLQQEKPDDYVVATEEGHTVEEFLDVSFGYLGLNWKDYVEIDQRYFRPAEVDNLQGDASKAKEVLGWKPQVGFEKLVKMMVDEDLELAKREKVLVDAGYMDAKQQP

SEQ ID NO: 868 - DNA, 1216 bp, Arabidopsis thaliana
ctctctccgcttcccccaaaaatccaggggcttcttacacgcacacaatcctttaaagctatcgtctttcttatataatcagtgaatcttcattaacacctcccacaaaatctcagaaataactttcacaacagagtcaaagagttccaaatcgtttgtttgtattttgtacgatcaaagttgttggtacttgtaagataatcgaaaccaaagatgcggatgagctgtaatggatgcagagttcttcggaaagggtgtagtgaggattgtagtataaggccgtgtttggcttggatcaaatcgcctgaagcgcaagctaacgcaactgtctttctcgccaagttctatggccgtgctggactcatgaacctcatcaacgccggtcccaatcaccttcgtcctgggattttccgatcgttgttgcacgaagcttgtgggaggattgtgaatccgatctatggttcggtgggtttgttgtggtcggggaattggcagctttgtcaagacgccgtggaggctgtgatgaaaggagaaccggtcaaagagatcgccacagacgctgcgacgatcggccaaggtccgcctcttaagatctacgacatccgacatatctccaaggatgataactctgccgccgcggctactggctcaaccgatttgaaacttgcgaaaactcgccgtgctaagcgggtctccaccgtcgcgatacaggcggaatcggagggaaagtctgacgaggctagtcacgattcgtcgttgagtcatcagtctgaaatagtggctgctcatgaaggagagagcaaggaatccgagagcaatgtctctgaggttttggcattctcgcctccggctgtgaagggctccggcgagataaagcttgacctaactttaaggctcgaaccggtgtcacgtgcgtatcatgtggtacctgttaagaagagaaggatcggcgtgtttggcacgtgtcagaaggagagcacgtgtaagactgagcttatgctctaagctccgttttagctatactcagaagttttgcccccatcagctctattcggctcggctctgatgatcttcaagtcgagccggtaacttttttttaatatatagttctctatttccccctttaatgttcactttccatttgtgacaaaagaatagagtatatgtacaaaattatttacagagattaattcaagaattggctgagatattatct

SEQ ID NO: 869 - protein, 263 aa, Arabidopsis thaliana
MRMSCNGCRVLRKGCSEDCSIRPCLAWIKSPEAQANATVFLAKFYGRAGLMNLINAGPNHLRPGIFRSLLHEACGRIVNPIYGSVGLLWSGNWQLCQDAVEAVMKGEPVKEIATDAATIGQGPPLKIYDIRHISKDDNSAAAATGSTDLKLAKTRRAKRVSTVAIQAESEGKSDEASHDSSLSHQSEIVAAHEGESKESESNVSEVLAFSPPAVKGSGEIKLDLTLRLEPVSRAYHVVPVKKRRIGVFGTCQKESTCKTELML

SEQ ID NO: 870 - protein, 261 aa, Arabidopsis thaliana
MSCNGCRVLRKGCSEDCSIRPCLAWIKSPEAQANATVFLAKFYGRAGLMNLINAGPNHLRPGIFRSLLHEACGRIVNPIYGSVGLLWSGNWQLCQDAVEAVMKGEPVKEIATDAATIGQGPPLKIYDIRHISKDDNSAAAATGSTDLKLAKTRRAKRVSTVAIQAESEGKSDEASHDSSLSHQSEIVAAHEGESKESESNVSEVLAFSPPAVKGSGEIKLDLTLRLEPVSRAYHVVPVKKRRIGVFGTCQKESTCKTELML

SEQ ID NO: 871 - protein, 213 aa, Arabidopsis thaliana
MNLINAGPNHLRPGIFRSLLHEACGRIVNPIYGSVGLLWSGNWQLCQDAVEAVMKGEPVKEIATDAATIGQGPPLKIYDIRHISKDDNSAAAATGSTDLKLAKTRRAKRVSTVAIQAESEGKSDEASHDSSLSHQSEIVAAHEGESKESESNVSEVLAFSPPAVKGSGEIKLDLTLRLEPVSRAYHVVPVKKRRIGVFGTCQKESTCKTELML

SEQ ID NO: 872 - DNA, 1149 bp, Arabidopsis thaliana
cacacaaaagaagaaaaagagagaaatgggtaactctttgatctctcttctctcaatcttccacttgctggtgttatggggatcctcagtgaatgcctattggccaccatcacctggttattggccaagctccaaggttggttccctcaacttctacaaaggttttaggaatctttggggtcctcagcatcagagaatggaccaaaatgccctcaccatctggcttgatagaacctcaggaagtggattcaagtcagtgaagccattcagatcaggctactttggagcaaacatcaaactccaacctggctacactgctggagtcatcacatctctctatctatcaaataatgaggcacatccagggttccatgatgaggtagacatagaatttttggggacaacatttgggaagccttacacacttcagacaaatgtgtatattagaggaagtggtgatgggaaaatcattggccgtgagatgaagtttcgcttgtggtttgatccaactaaagattttcaccattatgctattctttggagccctagagaaatcatatttttggtggatgatattcccataagaagatacccaaagaagagtgcgtctacatttcctttaagaccaatgtggctttatggttccatatgggatgcttcttcttgggcaacggaagacggtaaatacaaagccgactataaatatcaacctttcactgctaaatacaccaattttaaagcgctcggctgcaccgcctactcgtcagctcggtgctatccgttgtcggcttcgccataccgttctggcggattaacccgacaacaacaccaagccatgagatgggttcaaacacatagtatggtatacaattattgcaaagattataagcgagaccattctttaacgccggaatgttggcgttaggaaatattcgatgaaagtcccaaagtttgagagttttaatcacatcaaagttaataccagaaagagcttggtacaattttgggatttttttcattactattattatgtggttggttgtttcacgaaaataaattttcttttttttttgacttatcatcttgtcttatgtaaatgtatccagtacggtaccatattgttttgtcaatcgtctgtgactgtgtctc

SEQ ID NO: 873 - protein, 307 aa, Arabidopsis thaliana
TQKKKKREMGNSLISLLSIFHLLVLWGSSVNAYWPPSPGYWPSSKVGSLNFYKGFRNLWGPQHQRMDQNALTIWLDRTSGSGFKSVKPFRSGYFGANIKLQPGYTAGVITSLYLSNNEAHPGFHDEVDIEFLGTTFGKPYTLQTNVYIRGSGDGKIIGREMKFRLWFDPTKDFHHYAILWSPREIIFLVDDIPIRRYPKKSASTFPLRPMWLYGSIWDASSWATEDGKYKADYKYQPFTAKYTNFKALGCTAYSSARCYPLSASPYRSGGLTRQQHQAMRWVQTHSMVYNYCKDYKRDHSLTPECWR

SEQ ID NO: 874 - protein, 299 aa, Arabidopsis thaliana
MGNSLISLLSIFHLLVLWGSSVNAYWPPSPGYWPSSKVGSLNFYKGFRNLWGPQHQRMDQNALTIWLDRTSGSGFKSVKPFRSGYFGANIKLQPGYTAGVITSLYLSNNEAHPGFHDEVDIEFLGTTFGKPYTLQTNVYIRGSGDGKIIGREMKFRLWFDPTKDFHHYAILWSPREIIFLVDDIPIRRYPKKSASTFPLRPMWLYGSIWDASSWATEDGKYKADYKYQPFTAKYTNFKALGCTAYSSARCYPLSASPYRSGGLTRQQHQAMRWVQTHSMVYNYCKDYKRDHSLTPECWR

SEQ ID NO: 875 - protein, 242 aa, Arabidopsis thaliana
MDQNALTIWLDRTSGSGFKSVKPFRSGYFGANIKLQPGYTAGVITSLYLSNNEAHPGFHDEVDIEFLGTTFGKPYTLQTNVYIRGSGDGKIIGREMKFRLWFDPTKDFHHYAILWSPREIIFLVDDIPIRRYPKKSASTFPLRPMWLYGSIWDASSWATEDGKYKADYKYQPFTAKYTNFKALGCTAYSSARCYPLSASPYRSGGLTRQQHQAMRWVQTHSMVYNYCKDYKRDHSLTPECWR

SEQ ID NO: 876 - DNA, 1294 bp, Arabidopsis thaliana
aaaaacttccgtatcctggagagtaaattcctttatggctacgaatgggttaatggcgtcgtccagtgtgtttcttcatcgcccgcgtatcgcatttgcttctagaacgaatcagactgtaggaaaatacggtaaaggccgtgttagtttcatgggcattgggacacgtcgtcttccggtggttttatccatgacggcgatggcggattccggtgaggaggccgtgaaatctgttttgcctggaaatggcatatccatcatggtgaatggatgtagtggcaaaatggggaaagctgtaattaaagcagcagactctgcaggagtaaatattgttcccatatcgtttggatctgctggtgaggatggtcagagagttgaggtctgtggaaaggagattactgtgcacggtccaactgaaagagaaaaggttctttcttcggtgtttgagaagcacccggagctaattgttgtcgactacacaattccctctgcagtaaatgataatgcggagctgtatagcaaagtaggtgttcctttcgtcatgggaacaactggtggagataggaacaaattgtatgaaactgttgaggaagcaaagatttatgctgtgatttctccacagatgggtaaacaggttgtagcatttcttgcggccatggagatcatggctgagcagtttccgggagccttttctggttattccttggatgtgatggagtctcatcaagctagcaaattggatgcatccggaacagcaaaagctgttatttcttgcttccaggaattgggtgtgtcttacgacatggatcagatacaattgattcgggatccaaaacagcaagtggagatggtgggtgtacctgaggagcatatctctggtcacgctttccatctttatcacttgacatcacccgatgaaactgtctccttcgagttccagcacaatgtctgcggccgatcaatttatgctgagggtactgttgatgccgtgctcttcctcgccaaaaagattcgattgaaagcagatcagcgaatctacaacatgatcgatgtcttgagagagggaaatatgcgttgagctttcgagttttgccagtgcattgaccaaatggtggttgtagaagagctgagattagatttaccaaatcatcagctgtgaaaattagatgtttggtttcccacttcttctgccttgagcacaggcttttgaaattccttggtatatacaagaacttgccattgtattgttcatgttttgacctctttacctcaatgttattctcctttctggatc

SEQ ID NO: 877 - protein, 358 aa, Arabidopsis thaliana
KTSVSWRVNSFMATNGLMASSSVFLHRPRIAFASRTNQTVGKYGKGRVSFMGIGTRRLPVVLSMTAMADSGEEAVKSVLPGNGISIMVNGCSGKMGKAVIKAADSAGVNIVPISFGSAGEDGQRVEVCGKEITVHGPTEREKVLSSVFEKHPELIVVDYTIPSAVNDNAELYSKVGVPFVMGTTGGDRNKLYETVEEAKIYAVISPQMGKQVVAFLAAMEIMAEQFPGAFSGYSLDVMESHQASKLDASGTAKAVISCFQELGVSYDMDQIQLIRDPKQQVEMVGVPEEHISGHAFHLYHLTSPDETVSFEFQHNVCGRSIYAEGTVDAVLFLAKKIRLKADQRIYNMIDVLREGNMR

SEQ ID NO: 878 - protein, 347 aa, Arabidopsis thaliana
MATNGLMASSSVFLHRPRIAFASRTNQTVGKYGKGRVSFMGIGTRRLPVVLSMTAMADSGEEAVKSVLPGNGISIMVNGCSGKMGKAVIKAADSAGVNIVPISFGSAGEDGQRVEVCGKEITVHGPTEREKVLSSVFEKHPELIVVDYTIPSAVNDNAELYSKVGVPFVMGTTGGDRNKLYETVEEAKIYAVISPQMGKQVVAFLAAMEIMAEQFPGAFSGYSLDVMESHQASKLDASGTAKAVISCFQELGVSYDMDQIQLIRDPKQQVEMVGVPEEHISGHAFHLYHLTSPDETVSFEFQHNVCGRSIYAEGTVDAVLFLAKKIRLKADQRIYNMIDVLREGNMR

SEQ ID NO: 879 - protein, 341 aa, Arabidopsis thaliana
MASSSVFLHRPRIAFASRTNQTVGKYGKGRVSFMGIGTRRLPVVLSMTAMADSGEEAVKSVLPGNGISIMVNGCSGKMGKAVIKAADSAGVNIVPISFGSAGEDGQRVEVCGKEITVHGPTEREKVLSSVFEKHPELIVVDYTIPSAVNDNAELYSKVGVPFVMGTTGGDRNKLYETVEEAKIYAVISPQMGKQVVAFLAAMEIMAEQFPGAFSGYSLDVMESHQASKLDASGTAKAVISCFQELGVSYDMDQIQLIRDPKQQVEMVGVPEEHISGHAFHLYHLTSPDETVSFEFQHNVCGRSIYAEGTVDAVLFLAKKIRLKADQRIYNMIDVLREGNMR

SEQ ID NO: 880 - DNA, 2073 bp, Arabidopsis thaliana
atgaacgtcagatatgattccgatataacccaaaaagtctacgctacaacagagcagcggtctagtctaacgcaaaatccgtttcgtcgtcttcctcgctttacttttcaatctcctccttctccattaatcatctctttctctctctcacggattcgtaagttaatctcagtgcttctccgtcatcttcgcattattggttcttcctttttccctgtaagctcgacacgtggattattcctctgctttttttgttttcccttttcgtgaagattcgtttcctgtatctccgtgaagacttgatggagttagtttcttaaagtagctccttcttagatccgagtttcgatttgcttcactggtgaagaattagtgattgattcaactagatactatcgatttcgttggatttgtactgaaaacttggctgattttgttgattctgtcttgctggtgaagtctcaagctacttcgtgattagaggaggagatctggatttctagttttagcaattcatttgacttccgagttttccagaatcattgaagtgttaggcttacttgattcagattcagaacatagctttagataacgttagaagcagaatcagaatctgcaaatcggctctttagattgctgctactagaaatttgaaattagcttttggtagtgttaaggatgcagaataggattgtacagttggaagaaggaaaagaaaatggaatcacagttcgatcagggcattataaaggatttccatcgaaactgctacttctgctagggttgtttcttacattttctgttactgtcttcatcattagtgtatctactatcaagtatactggaatacaaagtgtagtaaccacagtcacttcaagctttgtgccatgccgtgagggggaaccgaatagtttgagtaaatggatacaacctcctgcggttttgatgcataacatgagcgatgaagagcttctttggcgtgcttctttttggcctcgtagaaaagaatatccgtttaaacgggttccaaaggttgcgtttatgttcttgactaaaggccccttaccgcttgcttcgctttgggagaggttcttgaagggtcacaaagggctttactcggtttaccttcatccacacccttcttttacagccaagtttccagctagctctgttttccaccggaggcaaattccaagccaggttgcagaatgggggagaatgtccatgtgcgatgcagagaagcggcttcttgccaacgccctgcttgatgtgtccaacgaatggtttgttctcgtctcagagtcatgcattccactctacaacttcacaaccatttacagctacttaagccgatcaaaacacagcttcatgggtgcttttgatgaccctggaccgtttgggcgtggccgctacaacgggaacatggaacctgaagttccccttaccaaatggcgaaaagggtctcaatggtttgaggttaaccgggacctggcagctaccattgtcaaagacacattgtattacccgaaattcaaagagttctgcaggcctgcttgctatgtggacgagcattacttcccaacaatgttgacgattgagaaaccaacagtcttggctaaccggagcttgacatgggtggactggtcgaggggcggtccccacccagctacgtttgggcgatcggacattacagaaaacttctttggaaaaatctttgatggaagaaactgcagttacaatggtcgcaacacttccatgtgttatctctttgcgaggaagtttgctccgagtgctttggagcctttgcttcacattgctcccaagattcttggattttgagtagtttagttatgtctctgaagtctgaacctcttgacatcaaatattttattttgtttgttgtgatactagtttggaagaaatgagattttagtagagagaactaggttgcacgacaggatagtcatatgtaaactttatatttcaaagaattactatgcatagatcaaatagtcttctactctttgggactatcttttcagatgcattattgaatcacaaatttgttttctc

SEQ ID NO: 881 - protein, 386 aa, Arabidopsis thaliana
MQNRIVQLEEGKENGITVRSGHYKGFPSKLLLLLGLFLTFSVTVFIISVSTIKYTGIQSVVTTVTSSFVPCREGEPNSLSKWIQPPAVLMHNMSDEELLWRASFWPRRKEYPFKRVPKVAFMFLTKGPLPLASLWERFLKGHKGLYSVYLHPHPSFTAKFPASSVFHRRQIPSQVAEWGRMSMCDAEKRLLANALLDVSNEWFVLVSESCIPLYNFTTIYSYLSRSKHSFMGAFDDPGPFGRGRYNGNMEPEVPLTKWRKGSQWFEVNRDLAATIVKDTLYYPKFKEFCRPACYVDEHYFPTMLTIEKPTVLANRSLTWVDWSRGGPHPATFGRSDITENFFGKIFDGRNCSYNGRNTSMCYLFARKFAPSALEPLLHIAPKILGF

SEQ ID NO: 882 - protein, 297 aa, Arabidopsis thaliana
MHNMSDEELLWRASFWPRRKEYPFKRVPKVAFMFLTKGPLPLASLWERFLKGHKGLYSVYLHPHPSFTAKFPASSVFHRRQIPSQVAEWGRMSMCDAEKRLLANALLDVSNEWFVLVSESCIPLYNFTTIYSYLSRSKHSFMGAFDDPGPFGRGRYNGNMEPEVPLTKWRKGSQWFEVNRDLAATIVKDTLYYPKFKEFCRPACYVDEHYFPTMLTIEKPTVLANRSLTWVDWSRGGPHPATFGRSDITENFFGKIFDGRNCSYNGRNTSMCYLFARKFAPSALEPLLHIAPKILGF

SEQ ID NO: 883 - protein, 294 aa, Arabidopsis thaliana
MSDEELLWRASFWPRRKEYPFKRVPKVAFMFLTKGPLPLASLWERFLKGHKGLYSVYLHPHPSFTAKFPASSVFHRRQIPSQVAEWGRMSMCDAEKRLLANALLDVSNEWFVLVSESCIPLYNFTTIYSYLSRSKHSFMGAFDDPGPFGRGRYNGNMEPEVPLTKWRKGSQWFEVNRDLAATIVKDTLYYPKFKEFCRPACYVDEHYFPTMLTIEKPTVLANRSLTWVDWSRGGPHPATFGRSDITENFFGKIFDGRNCSYNGRNTSMCYLFARKFAPSALEPLLHIAPKILGF

SEQ ID NO: 884 - DNA, 1176 bp, Arabidopsis thaliana
acctgagagtaaagaagtgagaaggagaagaaagaagcaatggagaagatagagcacacgacgatatctaccaatggtattaacatgcatgtggcttcgattggttcaggtccagtgatcctattcgtccatggctttcccgatctctggtactcatggcgtcaccagcttgtctctttcgctgccttaggttaccgcgcaatcgctccagatcttcgaggatacggcgattccgatgcgccgccgtctcgtgaatcttacaccatccttcatatcgtcggagacctcgtcggattactggattcgctcggtgttgatcgggttttcctcgtcggtcacgattggggagcaattgttgcgtggtggctttgtatgatcaggcctgatcgagtcaacgcgttggtcaacactagcgttgtgtttaatccgaggaatccttctgtgaaacctgttgatgcgtttagggctttgttcggcgatgattactacatttgcaggtttcaggagcctggagagatcgaagaggactttgctcaagttgatacaaaaaagttaataaccagatttttcacttcgcgtaacccacgtccaccttgcattccaaagtcagttggtttcagaggtttacctgatccaccttctttgcccgcttggctcaccgaacaagatgtcaggttctacggagacaagtttagccaaaaaggcttcaccggtgggctaaactactatcgcgccctgaacctaagctgggaactaacagctccatggaccggtctacaaatcaaagtccctgtgaaattcatagtgggtgatctagacataacatacaatatccccggaacaaaggaatacatacatgaaggtggtttgaagaagcacgtaccttttctacaagaagtggtggtaatggaaggtgtaggtcacttcctccatcaagagaagcctgacgaggtcactgaccatatctatggcttcttcaagaaattcagaacccgcgaaaccgcatccttgtagtagttctccgtctgcacaatgtcaaattcaaggttgattaagcttgatcagggttacttactgtcttagagccctactatgtaatgttttcaaggatgctatctgtgtattgtgcttgtttaataatttagcaaaatataataatagaacaaataatttccc

SEQ ID NO: 885 - protein, 324 aa, Arabidopsis thaliana
MEKIEHTTISTNGINMHVASIGSGPVILFVHGFPDLWYSWRHQLVSFAALGYRAIAPDLRGYGDSDAPPSRESYTILHIVGDLVGLLDSLGVDRVFLVGHDWGAIVAWWLCMIRPDRVNALVNTSVVFNPRNPSVKPVDAFRALFGDDYYICRFQEPGEIEEDFAQVDTKKLITRFFTSRNPRPPCIPKSVGFRGLPDPPSLPAWLTEQDVRFYGDKFSQKGFTGGLNYYRALNLSWELTAPWTGLQIKVPVKFIVGDLDITYNIPGTKEYIHEGGLKKHVPFLQEVVVMEGVGHFLHQEKPDEVTDHIYGFFKKFRTRETASL

SEQ ID NO: 886 - protein, 309 aa, Arabidopsis thaliana
MHVASIGSGPVILFVHGFPDLWYSWRHQLVSFAALGYRAIAPDLRGYGDSDAPPSRESYTILHIVGDLVGLLDSLGVDRVFLVGHDWGAIVAWWLCMIRPDRVNALVNTSVVFNPRNPSVKPVDAFRALFGDDYYICRFQEPGEIEEDFAQVDTKKLITRFFTSRNPRPPCIPKSVGFRGLPDPPSLPAWLTEQDVRFYGDKFSQKGFTGGLNYYRALNLSWELTAPWTGLQIKVPVKFIVGDLDITYNIPGTKEYIHEGGLKKHVPFLQEVVVMEGVGHFLHQEKPDEVTDHIYGFFKKFRTRETASL

SEQ ID NO: 887 - protein, 213 aa, Arabidopsis thaliana
MIRPDRVNALVNTSVVFNPRNPSVKPVDAFRALFGDDYYICRFQEPGEIEEDFAQVDTKKLITRFFTSRNPRPPCIPKSVGFRGLPDPPSLPAWLTEQDVRFYGDKFSQKGFTGGLNYYRALNLSWELTAPWTGLQIKVPVKFIVGDLDITYNIPGTKEYIHEGGLKKHVPFLQEVVVMEGVGHFLHQEKPDEVTDHIYGFFKKFRTRETASL

SEQ ID NO: 888 - DNA, 1182 bp, Arabidopsis thaliana
aattatgctttcttttgtatttgattattatccgttagtgaccctcacgatctctttctctctcatataactcggatcaccacatgacttgatcttcttgccgttaccaaaaccaaaatccctaaatttgccctcatttccctctgattagatcccttaccccgacaaagacaccaaaattcttgagggcgagagagctgattgatgtctttggtatctggagccagggacatggggttcgacgacaacaacaacaacaagaacaacaaggatggagatgatgagaactcctcctccagaacaagagccgacgacgatgctcttagtcgacagatgagcgaatcttctctttgtgctaccgaggaggaagaagacgacgattccaaattgcaattgggtcctcagtacactatcaaagaacatctcgagaaggacaaggatgatgagagtctgaggaaatggaaggaacagcttctcggaagtgttgatgtcaccaacattggagagactcttgatccggaagtgaggattgatagcctcgccatcatatctcctggaagacccgacattgttctcttggttcctgagaatggaaatccaaagggcatgtggtttactttgaaagaagggagcaagtacaacttgaaattcacttttcatgttaacaacaacattgtctctggtcttaggtacaccaatacagtttggaagaccggtgtcaaagtggacagagctaaggaaatgcttggaacctttagtcctcagttggagccatacaaccacgtgatgccagaagagaccactccttctggcatgtttgctcgaggatcatattctgcaagaactaagtttcttgatgatgataataagtgctacttggagatcaactacagctttgacatccgtaaagaatggcctgcgctttgaaactcggagaatgcgagagttgtctcctgagagaggatgttgtcggtagaagaaagttgtgtttgtttcactccatatctccgtttatttcgttgaacatataattgtgaatcgttttctgatcatcttagaacaagaacgacatttacttcctacatccttgatcttgatttttccagtaatgtcgttggaaatcagtatgtctgtgtttgttctcaactctgtttctccttccacgttaacatgtgtttgatg

SEQ ID NO: 889 - protein, 240 aa, Arabidopsis thaliana
MSLVSGARDMGFDDNNNNKNNKDGDDENSSSRTRADDDALSRQMSESSLCATEEEEDDDSKLQLGPQYTIKEHLEKDKDDESLRKWKEQLLGSVDVTNIGETLDPEVRIDSLAIISPGRPDIVLLVPENGNPKGMWFTLKEGSKYNLKFTFHVNNNIVSGLRYTNTVWKTGVKVDRAKEMLGTFSPQLEPYNHVMPEETTPSGMFARGSYSARTKFLDDDNKCYLEINYSFDIRKEWPAL

SEQ ID NO: 890 - protein, 231 aa, Arabidopsis thaliana
MGFDDNNNNKNNKDGDDENSSSRTRADDDALSRQMSESSLCATEEEEDDDSKLQLGPQYTIKEHLEKDKDDESLRKWKEQLLGSVDVTNIGETLDPEVRIDSLAIISPGRPDIVLLVPENGNPKGMWFTLKEGSKYNLKFTFHVNNNIVSGLRYTNTVWKTGVKVDRAKEMLGTFSPQLEPYNHVMPEETTPSGMFARGSYSARTKFLDDDNKCYLEINYSFDIRKEWPAL

SEQ ID NO: 891 - protein, 197 aa, Arabidopsis thaliana
MSESSLCATEEEEDDDSKLQLGPQYTIKEHLEKDKDDESLRKWKEQLLGSVDVTNIGETLDPEVRIDSLAIISPGRPDIVLLVPENGNPKGMWFTLKEGSKYNLKFTFHVNNNIVSGLRYTNTVWKTGVKVDRAKEMLGTFSPQLEPYNHVMPEETTPSGMFARGSYSARTKFLDDDNKCYLEINYSFDIRKEWPAL

SEQ ID NO: 892 - DNA, 1533 bp, Arabidopsis thaliana
actcaagatgccggaatcatttacacaatgaaaacttttctttctccggcgatatgcttcgatcatggtcgatcgcgaaactacaaatcagtaaagtttattcatccgattctcgcttttgcacacacgttctcttcaatggagttgtcagacgacaattcacgagcactagcggcgaaagaagaacagtgatgagcttcggtgacggaaaccttggcgctcttggtctttcatcatcgtcgattccaggcatgggaatggacgcttacgaacccaccgtagtttctaatttgccttccgatatctcttccatatccgccggacattaccattctcttgccgttacatctagcggtgagatttgggcttggggtcgcaacgacgaaggccagctcggtcgaatcgtaattgattctagtagagattcaaggagtgaacctaagagagtggaaggtctagagaatgtgaatgtccaggcagcgtttgcgtctggagttgtttcagctgctattggagatgatggctctttgtgggtttggggaagatctaaaagaggacagcttggtcttggaaatggtatcattgaagctcgagttccttcgagagttgaaaatttagctgcagagcacgttgttaaggtatcattaggttgggggcacgcacttgcgcttactgtggatggtaaagtttttggatggggttatgtagctgatggaagagtaggcaatgttggacttccacttgaagcatctctgctagattcaattacagatgggtcgatgaaaggtcaccatgctgctggtgatttgaatcttgaggcagctgaaaagaaggttgtggaagcaatgagtaaagagaacgatatgccaattgcttgggaaccttgtctggtggaagaaacgtgtaacgagaaggtagcagatattgcgtgcggttccgatcactccttgatcctttgtcatgatggcacacttttgagcgctgggagcaacatctatggtcagttgggtcggtctaaacaagatctaggaatgaaacctgttgatataactgaatctccgatctctatagcagctggtcttggtcattcactagctatctgcaacaggggtgaaagaaatattctctcatggggttggaaccgaagccggcagcttggtaggggaaaaccggaaaacctgccaagagaagtagaaggtttcgatggggaaagtccagcttcagtatcagcagggcgtgtgcattccttgtgtgtaacagagaaaggagaagcttgggtttggggttgtgggaagaatggtaggctcggtttaggaagctcgagcgatgagcctgaaccgatgttgttagaggatgtagagggttgtgttcttcaagcagtcgctggctttgatcacagcctgatcttagtggctgaatagccccacccaatatctagtaaacattgatcttgaaaatttatttcatgtatttacgtgcgatcagttgctttttaagtgaactggtgaaataaaattagaaagatcagcgagt

SEQ ID NO: 893 - protein, 472 aa, Arabidopsis thaliana
SRCRNHLHNENFSFSGDMLRSWSIAKLQISKVYSSDSRFCTHVLFNGVVRRQFTSTSGERRTVMSFGDGNLGALGLSSSSIPGMGMDAYEPTVVSNLPSDISSISAGHYHSLAVTSSGEIWAWGRNDEGQLGRIVIDSSRDSRSEPKRVEGLENVNVQAAFASGVVSAAIGDDGSLWVWGRSKRGQLGLGNGIIEARVPSRVENLAAEHVVKVSLGWGHALALTVDGKVFGWGYVADGRVGNVGLPLEASLLDSITDGSMKGHHAAGDLNLEAAEKKVVEAMSKENDMPIAWEPCLVEETCNEKVADIACGSDHSLILCHDGTLLSAGSNIYGQLGRSKQDLGMKPVDITESPISIAAGLGHSLAICNRGERNILSWGWNRSRQLGRGKPENLPREVEGFDGESPASVSAGRVHSLCVTEKGEAWVWGCGKNGRLGLGSSSDEPEPMLLEDVEGCVLQAVAGFDHSLILVAE

SEQ ID NO: 894 - protein, 455 aa, Arabidopsis thaliana
MLRSWSIAKLQISKVYSSDSRFCTHVLFNGVVRRQFTSTSGERRTVMSFGDGNLGALGLSSSSIPGMGMDAYEPTVVSNLPSDISSISAGHYHSLAVTSSGEIWAWGRNDEGQLGRIVIDSSRDSRSEPKRVEGLENVNVQAAFASGVVSAAIGDDGSLWVWGRSKRGQLGLGNGIIEARVPSRVENLAAEHVVKVSLGWGHALALTVDGKVFGWGYVADGRVGNVGLPLEASLLDSITDGSMKGHHAAGDLNLEAAEKKVVEAMSKENDMPIAWEPCLVEETCNEKVADIACGSDHSLILCHDGTLLSAGSNIYGQLGRSKQDLGMKPVDITESPISIAAGLGHSLAICNRGERNILSWGWNRSRQLGRGKPENLPREVEGFDGESPASVSAGRVHSLCVTEKGEAWVWGCGKNGRLGLGSSSDEPEPMLLEDVEGCVLQAVAGFDHSLILVAE

SEQ ID NO: 895 - protein, 409 aa, Arabidopsis thaliana
MSFGDGNLGALGLSSSSIPGMGMDAYEPTVVSNLPSDISSISAGHYHSLAVTSSGEIWAWGRNDEGQLGRIVIDSSRDSRSEPKRVEGLENVNVQAAFASGVVSAAIGDDGSLWVWGRSKRGQLGLGNGIIEARVPSRVENLAAEHVVKVSLGWGHALALTVDGKVFGWGYVADGRVGNVGLPLEASLLDSITDGSMKGHHAAGDLNLEAAEKKVVEAMSKENDMPIAWEPCLVEETCNEKVADIACGSDHSLILCHDGTLLSAGSNIYGQLGRSKQDLGMKPVDITESPISIAAGLGHSLAICNRGERNILSWGWNRSRQLGRGKPENLPREVEGFDGESPASVSAGRVHSLCVTEKGEAWVWGCGKNGRLGLGSSSDEPEPMLLEDVEGCVLQAVAGFDHSLILVAE

SEQ ID NO: 896 - DNA, 1918 bp, Arabidopsis thaliana
acactgtgagattcaagtgtaaagtgctctctccccaatggctaatcaccaccgacttttacgcggcggcggatctccggccataatcggtggcagaatcacactcacagctttcgcttccactatcgcactcttcctcttcactctctccttcttcttcgcttcagattctaacgattctcctgatctccttcttcccggtgttgagtactctaatggagtcggatctagaagatccatgttggatatcaaatcggatccgcttaagccacggttgattcagatccggaaacaagctgatgatcatcggtcattagcattagcttatgcttcttacgcgagaaagcttaagctcgagaattcgaaactcgtcaggatcttcgctgatctttcgaggaattacacggatctgattaacaaaccgacgtatcgagctttgtatgattctgatggagcctcgattgaagaatctgtgcttaggcaatttgagaaagaagttaaggaacggattaaaatgactcgtcaagtgattgctgaagctaaagagtcttttgataatcagttgaagattcagaagctgaaagatacgattttcgctgttaacgaacagttaactaatgctaagaagcaaggtgcgttttcgagtttgatcgctgcgaaatcgattccgaaaggattgcattgtcttgctatgaggctgatggaagagaggattgctcaccctgagaagtatactgatgaagggaaagatagaccgcgggagctcgaggatccgaatctttaccattacgctatattttcggataatgtgattgcggcttcggtggttgtgaactctgctgtgaagaatgctaaggagccgtggaagcatgtttttcacgttgtgactgataagatgaatcttggagctatgcaggttatgtttaaactgaaggagtataaaggagctcatgtagaagttaaagctgttgaggattatacgtttttgaactcttcgtatgtgcctgtgttgaagcagttagaatctgcgaatcttcagaagttttatttcgagaataagctcgagaatgcgacgaaagataccacgaatatgaagttcaggaaccccaagtatttatctatattgaatcacttgaggttttatttacccgagatgtacccgaaactacataggatactgtttttggacgatgatgtggttgtgcagaaggatttaacgggtctgtgggagattgatatggatgggaaagtgaatggagctgtagagacttgttttgggtcgtttcatcggtacgctcaatacatgaatttctcacatcctttgatcaaagagaagtttaatcccaaagcatgtgcgtgggcgtatggaatgaacttctttgatcttgatgcttggagaagagagaagtgcacagaagaatatcactactggcaaaatctgaacgagaacagggctctatggaaactggggacgttaccaccgggactgatcaccttttactcaaccacaaagccgctggacaaatcatggcatgtgcttgggctgggttacaatccgagcattagcatggatgagatccgcaacgctgcagtggtacacttcaacggtaacatgaagccatggcttgacatagctatgaaccagtttcgaccactttggaccaaacacgtcgactatgacctcgagtttgttcaggcttgcaattttggcctctgaactatgaaaattttctttatcatcaaaatctgaaagcatatgttgtttgttacttcagctctacgaagttttaaccttagtttttgtttgtgtttatttatatatttttgggggtttagtagaacacttgtattttgttcatagctatctttgttctatggcaacctataatcaaagcttaattataaagtcacattatgc

SEQ ID NO: 897 - protein, 559 aa, Arabidopsis thaliana
MANHHRLLRGGGSPAIIGGRITLTAFASTIALFLFTLSFFFASDSNDSPDLLLPGVEYSNGVGSRRSMLDIKSDPLKPRLIQIRKQADDHRSLALAYASYARKLKLENSKLVRIFADLSRNYTDLINKPTYRALYDSDGASIEESVLRQFEKEVKERIKMTRQVIAEAKESFDNQLKIQKLKDTIFAVNEQLTNAKKQGAFSSLIAAKSIPKGLHCLAMRLMEERIAHPEKYTDEGKDRPRELEDPNLYHYAIFSDNVIAASVVVNSAVKNAKEPWKHVFHVVTDKMNLGAMQVMFKLKEYKGAHVEVKAVEDYTFLNSSYVPVLKQLESANLQKFYFENKLENATKDTTNMKFRNPKYLSILNHLRFYLPEMYPKLHRILFLDDDVVVQKDLTGLWEIDMDGKVNGAVETCFGSFHRYAQYMNFSHPLIKEKFNPKACAWAYGMNFFDLDAWRREKCTEEYHYWQNLNENRALWKLGTLPPGLITFYSTTKPLDKSWHVLGLGYNPSISMDEIRNAAVVHFNGNMKPWLDIAMNQFRPLWTKHVDYDLEFVQACNFGL

SEQ ID NO: 898 - protein, 492 aa, Arabidopsis thaliana
MLDIKSDPLKPRLIQIRKQADDHRSLALAYASYARKLKLENSKLVRIFADLSRNYTDLINKPTYRALYDSDGASIEESVLRQFEKEVKERIKMTRQVIAEAKESFDNQLKIQKLKDTIFAVNEQLTNAKKQGAFSSLIAAKSIPKGLHCLAMRLMEERIAHPEKYTDEGKDRPRELEDPNLYHYAIFSDNVIAASVVVNSAVKNAKEPWKHVFHVVTDKMNLGAMQVMFKLKEYKGAHVEVKAVEDYTFLNSSYVPVLKQLESANLQKFYFENKLENATKDTTNMKFRNPKYLSILNHLRFYLPEMYPKLHRILFLDDDVVVQKDLTGLWEIDMDGKVNGAVETCFGSFHRYAQYMNFSHPLIKEKFNPKACAWAYGMNFFDLDAWRREKCTEEYHYWQNLNENRALWKLGTLPPGLITFYSTTKPLDKSWHVLGLGYNPSISMDEIRNAAVVHFNGNMKPWLDIAMNQFRPLWTKHVDYDLEFVQACNFGL

SEQ ID NO: 899 - protein, 400 aa, Arabidopsis thaliana
MTRQVIAEAKESFDNQLKIQKLKDTIFAVNEQLTNAKKQGAFSSLIAAKSIPKGLHCLAMRLMEERIAHPEKYTDEGKDRPRELEDPNLYHYAIFSDNVIAASVVVNSAVKNAKEPWKHVFHVVTDKMNLGAMQVMFKLKEYKGAHVEVKAVEDYTFLNSSYVPVLKQLESANLQKFYFENKLENATKDTTNMKFRNPKYLSILNHLRFYLPEMYPKLHRILFLDDDVVVQKDLTGLWEIDMDGKVNGAVETCFGSFHRYAQYMNFSHPLIKEKFNPKACAWAYGMNFFDLDAWRREKCTEEYHYWQNLNENRALWKLGTLPPGLITFYSTTKPLDKSWHVLGLGYNPSISMDEIRNAAVVHFNGNMKPWLDIAMNQFRPLWTKHVDYDLEFVQACNFGL

SEQ ID NO: 900 - DNA, 1488 bp, Arabidopsis thaliana
actgtgctctcttcttcaatggaacaacaattaaccttagtattgcttgatagcccaaaaggcgccaaatatgtagaaacctttgaagaagccgcttcttcttcttcttcttcttcttcttcttctgttccctcctgcactgatcaccgccatcgaaccttcgtcaaattcttcctttacttctctctcgtcgctcttgcttactatttaatcatctccagtctcgccgtctctccaattcccccaacattgccgcaatcttctcccggaaacgtttcatcagcaaagtgtgatcttttcaccggagattggataccagatccaacaggtcctctgtacacaaatgtcacttgtcgtcacattcaagattttcagaactgcctattgaatggacgaccagatgtgaattatctcttctggagatggaagcctcgtgattgtgatcttcctaggtttagtccatcgcagtttcttgcttcagtgaagaacaaatggtgggcttttatcggtgattccattgctcgtaatcatgtccagtctctcatctgcattctctctcaggtggaagaagtggaggaaatctatcacgataaggagttcagatccaagatatggagattcccttctcacaacttcacactatcagtcatttggtctcctttccttctcaaatccgaaacatctagcaactcggatattcagctttacctcgaccagcttgaccacaaatggactgtccaatacccgaaattcgactacgttgttatctctggaggcaaatggtttcttaaaacaacaattttccatgaaaacaacgtagtcacgggctgtcattactgccaaggaagaaacaacctaactgatctcggctatgattactcctaccgcaaaaccctaaaccttctccgtgacttcgtcctaaactcaacccacaaaccgctggttctgtttcgaacaacaacgcctgaccatttcgaaaacggagagtggaacactggtgggtattgcaacagaacgatgccgtttaaagaaggccaagcaaatatgaaaactgtagatgatgtgatgcgtgatgttgagcttgaggtgtttcagaaatttgggaaaggttttggcttaggttccaacatcaggctattagacacgactggaatgtctcttctccgtccagacgggcatccgggaccataccggcatccaaatccttttgctggagttaagaataagagcaatgttcagaatgattgtctgcattggtgcttacctggtccaattgattcatggaatgatgtgatggtggaaaccacgcttaaccgggaacgggaactatacgatttaaccggttaatgtaccacgatatcgcttgtagctagttacagtcaatagccattccacttgtcaatgtctcgtatatgatagttctatattttaattttgtaatggttctaaacaagaataaacgatgcaaaattttgcagtgtgaatttt

SEQ ID NO: 901 - protein, 448 aa, Arabidopsis thaliana
TVLSSSMEQQLTLVLLDSPKGAKYVETFEEAASSSSSSSSSSVPSCTDHRHRTFVKFFLYFSLVALAYYLIISSLAVSPIPPTLPQSSPGNVSSAKCDLFTGDWIPDPTGPLYTNVTCRHIQDFQNCLLNGRPDVNYLFWRWKPRDCDLPRFSPSQFLASVKNKWWAFIGDSIARNHVQSLICILSQVEEVEEIYHDKEFRSKIWRFPSHNFTLSVIWSPFLLKSETSSNSDIQLYLDQLDHKWTVQYPKFDYVVISGGKWFLKTTIFHENNVVTGCHYCQGRNNLTDLGYDYSYRKTLNLLRDFVLNSTHKPLVLFRTTTPDHFENGEWNTGGYCNRTMPFKEGQANMKTVDDVMRDVELEVFQKFGKGFGLGSNIRLLDTTGMSLLRPDGHPGPYRHPNPFAGVKNKSNVQNDCLHWCLPGPIDSWNDVMVETTLNRERELYDLTG

SEQ ID NO: 902 - protein, 442 aa, Arabidopsis thaliana
MEQQLTLVLLDSPKGAKYVETFEEAASSSSSSSSSSVPSCTDHRHRTFVKFFLYFSLVALAYYLIISSLAVSPIPPTLPQSSPGNVSSAKCDLFTGDWIPDPTGPLYTNVTCRHIQDFQNCLLNGRPDVNYLFWRWKPRDCDLPRFSPSQFLASVKNKWWAFIGDSIARNHVQSLICILSQVEEVEEIYHDKEFRSKIWRFPSHNFTLSVIWSPFLLKSETSSNSDIQLYLDQLDHKWTVQYPKFDYVVISGGKWFLKTTIFHENNVVTGCHYCQGRNNLTDLGYDYSYRKTLNLLRDFVLNSTHKPLVLFRTTTPDHFENGEWNTGGYCNRTMPFKEGQANMKTVDDVMRDVELEVFQKFGKGFGLGSNIRLLDTTGMSLLRPDGHPGPYRHPNPFAGVKNKSNVQNDCLHWCLPGPIDSWNDVMVETTLNRERELYDLTG

SEQ ID NO: 903 - DNA, 1764 bp, Arabidopsis thaliana
tgctctctcgattgactttattgactgagagaaagcttttgacaatgggccacagacacagcaagtccaaatcctccgatccgccaccgtcctcctcctcctcttcctccggcaacgtagtccaccatgttaaacctgccggagaacgccgcggatcatccggttccggaaccgtcggatcgtcaggctccggaacaggcggatctcgttccaccacatctactcagcagaatggtcggatcttaggtcggccgatggaggaagtacggagaacctatgagtttggtcgtgagcttggtcgtggccagtttggtgtcacgtacctcgtaactcacaaagagacgaaacaacaggtcgcttgcaagtcaatccctacgcgccgccttgttcacaaagacgacattgaagatgttcgccgtgaagtccagattatgcaccatctcagcggtcaccggaacatagtggacttgaagggagcctacgaggacagacactctgtgaatctgataatggagttgtgtgaaggaggggaattgttcgataggatcatttctaaaggtctttactcagagagagctgctgcggatttgtgtaggcagatggtgatggttgtgcatagttgtcattctatgggtgtaatgcaccgagacttgaagcccgaaaactttctctttcttagtaaagatgagaactcaccattgaaagctacagactttggtctctctgtcttcttcaagccaggtgataagtttaaggatcttgttggaagtgcatactatgttgccccagaagttctaaaacggaactatggaccagaggctgatatctggagtgctggtgtgattctatacatccttctcagtggtgttccgcctttctggggagaaaatgaaacggggatctttgatgccattcttcaagggcaacttgatttttcagctgatccatggccagcactatcagatggtgccaaagatcttgtgaggaaaatgttaaaatatgaccctaaagatcggcttacagctgcggaagtgctaaatcatccgtggattagagaagatggggaggcatcagacaaaccgcttgacaatgcggtgttatccaggatgaaacaattccgggcgatgaacaaactaaaaaaaatggccctgaaggttatcgctgagaacctttctgaagaagaaatcattggtcttaaagagatgttcaaatctctagacactgataacaatggaatagtcaccttggaggaattgagaaccggtctcccaaaacttggttcaaagatctctgaagctgaaataaggcagttaatggaagcagctgatatggatggagatggatcaattgattacttggagtttatatcagccacaatgcatatgaacagaatcgaacgtgaggatcacttgtacaccgcattccagttctttgacaatgacaacagcggctacataacaatggaagagctagagctagccatgaagaaatacaacatgggtgatgataaatccatcaaagagatcattgctgaagtagacaccgatcgtgacggaaaaatcaactacgaagaatttgtagcgatgatgaagaagggaaatccagaattggtgccaaaccgacgcagaatgtgagagatcttttgatgttgtttgtttgtttttggttatcactttactcaaactttgtgtttctgttacaatcaattattttgtttcctgcaatctctttttatcaacacaacataaaaaatactttgagatc

SEQ ID NO: 904 - protein, 543 aa, Arabidopsis thaliana
LSRLTLLTERKLLTMGHRHSKSKSSDPPPSSSSSSSGNVVHHVKPAGERRGSSGSGTVGSSGSGTGGSRSTTSTQQNGRILGRPMEEVRRTYEFGRELGRGQFGVTYLVTHKETKQQVACKSIPTRRLVHKDDIEDVRREVQIMHHLSGHRNIVDLKGAYEDRHSVNLIMELCEGGELFDRIISKGLYSERAAADLCRQMVMVVHSCHSMGVMHRDLKPENFLFLSKDENSPLKATDFGLSVFFKPGDKFKDLVGSAYYVAPEVLKRNYGPEADIWSAGVILYILLSGVPPFWGENETGIFDAILQGQLDFSADPWPALSDGAKDLVRKMLKYDPKDRLTAAEVLNHPWIREDGEASDKPLDNAVLSRMKQFRAMNKLKKMALKVIAENLSEEEIIGLKEMFKSLDTDNNGIVTLEELRTGLPKLGSKISEAEIRQLMEAADMDGDGSIDYLEFISATMHMNRIEREDHLYTAFQFFDNDNSGYITMEELELAMKKYNMGDDKSIKEIIAEVDTDRDGKINYEEFVAMMKKGNPELVPNRRRM

SEQ ID NO: 905 - protein, 529 aa, Arabidopsis thaliana
MGHRHSKSKSSDPPPSSSSSSSGNVVHHVKPAGERRGSSGSGTVGSSGSGTGGSRSTTSTQQNGRILGRPMEEVRRTYEFGRELGRGQFGVTYLVTHKETKQQVACKSIPTRRLVHKDDIEDVRREVQIMHHLSGHRNIVDLKGAYEDRHSVNLIMELCEGGELFDRIISKGLYSERAAADLCRQMVMVVHSCHSMGVMHRDLKPENFLFLSKDENSPLKATDFGLSVFFKPGDKFKDLVGSAYYVAPEVLKRNYGPEADIWSAGVILYILLSGVPPFWGENETGIFDAILQGQLDFSADPWPALSDGAKDLVRKMLKYDPKDRLTAAEVLNHPWIREDGEASDKPLDNAVLSRMKQFRAMNKLKKMALKVIAENLSEEEIIGLKEMFKSLDTDNNGIVTLEELRTGLPKLGSKISEAEIRQLMEAADMDGDGSIDYLEFISATMHMNRIEREDHLYTAFQFFDNDNSGYITMEELELAMKKYNMGDDKSIKEIIAEVDTDRDGKINYEEFVAMMKKGNPELVPNRRRM

SEQ ID NO: 906 - protein, 459 aa, Arabidopsis thaliana
MEEVRRTYEFGRELGRGQFGVTYLVTHKETKQQVACKSIPTRRLVHKDDIEDVRREVQIMHHLSGHRNIVDLKGAYEDRHSVNLIMELCEGGELFDRIISKGLYSERAAADLCRQMVMVVHSCHSMGVMHRDLKPENFLFLSKDENSPLKATDFGLSVFFKPGDKFKDLVGSAYYVAPEVLKRNYGPEADIWSAGVILYILLSGVPPFWGENETGIFDAILQGQLDFSADPWPALSDGAKDLVRKMLKYDPKDRLTAAEVLNHPWIREDGEASDKPLDNAVLSRMKQFRAMNKLKKMALKVIAENLSEEEIIGLKEMFKSLDTDNNGIVTLEELRTGLPKLGSKISEAEIRQLMEAADMDGDGSIDYLEFISATMHMNRIEREDHLYTAFQFFDNDNSGYITMEELELAMKKYNMGDDKSIKEIIAEVDTDRDGKINYEEFVAMMKKGNPELVPNRRRM

SEQ ID NO: 907 - DNA, 1453 bp, Arabidopsis thaliana
tttcgtcttcgattttctctctcaacgcaaactcgtaagctgcttccattttcccttctagaccattgatttgttcttcgaaaaaaccgttctttcttttgcctctcactctagttccttctctcatttctacttctctagcttcactgacttgctgctaccactaaatcttggcatttgtggaaagttgggaatttagggtttttgggtgtgtgtgtgaaaacaatggaagcactagttgttgatgctggctctaagttcctgaaagcaggagcagcaattcctgaccagtctcctgcaatgataattccctctcaaatgaaacgaatggttgatgatgggtcttcttcagctgataaccccaccactgtctttgaggatgtcactcttgatcctattgaaaggggtttgattagagattgggatgctatggaagatctgttgcgttatgttgtctacactgggcttggatgggaagagggaaacgaaggcaatatactttttacagatccactttgtactcctaaggctattagggagcaattggtgcagttgatgtttgaaacattcaatgtctctggattttatgcatctgagcaagcagtgttgtccctttatgctgttggacgcatctccggttgcactgttgatattggtcatgggaagatagatattgccccagttcttgaaggtgcagtacaacacattgcctcgaaacggtttgagctaggtggaaccgagctaactaaattatttgcccaagagcttggaaaaaccaacccgtcgatgaatctcagcatgtctgatgttgaaaaactcaaggagcagtatgcaaactgtgccgaggacgaaattgcttacaaaaaaacccaaaactgtgaaatcgagcagcatactcttcctgatggacaggtgataagcatcgggcgagagagatactcggttggagaagctctgtttcagccatcaatactgggactggaggagcatggaatcgttgagcagcttgtccggattatctccacagtgtcatctgagaaccataggcagctcttggagaacactgtactttgtggtggtacaacctccatgacaggattcgaaagtagattccagaaagaagcaaacttgtgctcatctgccattaggccaacactggtgaaaccgccagaatatatgccggagaatttggggatgtattcggcttgggttggaggagccatactagctaaagtggtgtttccgcagaatcagcacgttactaaagcagattatgacgagactggaccatcagtggttcacaggaaatgtttctgaaaccatagactataaaacgatgttgttgttgtagctgaggattttttttttttggttggctttggtttgaagatgtggaccagattatgtagtacatttcaaattatggcttccaaatatcgactaatatgtgttc

SEQ ID NO: 908 - protein, 363 aa, Arabidopsis thaliana
MEALVVDAGSKFLKAGAAIPDQSPAMIIPSQMKRMVDDGSSSADNPTTVFEDVTLDPIERGLIRDWDAMEDLLRYVVYTGLGWEEGNEGNILFTDPLCTPKAIREQLVQLMFETFNVSGFYASEQAVLSLYAVGRISGCTVDIGHGKIDIAPVLEGAVQHIASKRFELGGTELTKLFAQELGKTNPSMNLSMSDVEKLKEQYANCAEDEIAYKKTQNCEIEQHTLPDGQVISIGRERYSVGEALFQPSILGLEEHGIVEQLVRIISTVSSENHRQLLENTVLCGGTTSMTGFESRFQKEANLCSSAIRPTLVKPPEYMPENLGMYSAWVGGAILAKVVFPQNQHVTKADYDETGPSVVHRKCF

SEQ ID NO: 909 - protein, 338 aa, Arabidopsis thaliana
MIIPSQMKRMVDDGSSSADNPTTVFEDVTLDPIERGLIRDWDAMEDLLRYVVYTGLGWEEGNEGNILFTDPLCTPKAIREQLVQLMFETFNVSGFYASEQAVLSLYAVGRISGCTVDIGHGKIDIAPVLEGAVQHIASKRFELGGTELTKLFAQELGKTNPSMNLSMSDVEKLKEQYANCAEDEIAYKKTQNCEIEQHTLPDGQVISIGRERYSVGEALFQPSILGLEEHGIVEQLVRIISTVSSENHRQLLENTVLCGGTTSMTGFESRFQKEANLCSSAIRPTLVKPPEYMPENLGMYSAWVGGAILAKVVFPQNQHVTKADYDETGPSVVHRKCF

SEQ ID NO: 910 - protein, 332 aa, Arabidopsis thaliana
MKRMVDDGSSSADNPTTVFEDVTLDPIERGLIRDWDAMEDLLRYVVYTGLGWEEGNEGNILFTDPLCTPKAIREQLVQLMFETFNVSGFYASEQAVLSLYAVGRISGCTVDIGHGKIDIAPVLEGAVQHIASKRFELGGTELTKLFAQELGKTNPSMNLSMSDVEKLKEQYANCAEDEIAYKKTQNCEIEQHTLPDGQVISIGRERYSVGEALFQPSILGLEEHGIVEQLVRIISTVSSENHRQLLENTVLCGGTTSMTGFESRFQKEANLCSSAIRPTLVKPPEYMPENLGMYSAWVGGAILAKVVFPQNQHVTKADYDETGPSVVHRKCF

SEQ ID NO: 911 - DNA, 1208 bp, Arabidopsis thaliana
aaaagactgtgaagcgagaggaccgttaagacgacggacgcttatctggaaggagagtcatgaatctgagtgtgaaccgatgcatcaccggtggtttcgtcggtggattctctagctgcagactcaatcatgagaaaaggtgggttcgtgctggcaagcactgtgagcttgagagggagagaagtttagtgtctgatgctgtttctttagagaggttagagagcaaaagcattaaacttgcgatgcttgctagtggtttaggagtggcgaacttggtaactcttagctcagcaaaagccgcagacttgaagatgattgtcttggatcaagccacttccatttacatcttggctgaaggaagccttggagattcggtcgggaacttcttgtattcagctaaccaacaggctaacgaagctgttcaagatcaactatcagcactcagtgtaacaagtttggcagtaatatttggggcaggccttgtgacaagtctgtctccatgtacacttagtgttttgccgttgacacttggttatattggtgcatttgggtctggcaaaagcagaggtcaggttattggagatacagttgctttcgcactgggattagcaactaccttagcccttcttgggatagtagcttcttttgccggaaaagcctatggacaaataggacaaggattaccagtagctgcatccggtctggctattgtaatgggtctcaatctccttgagataatcgaacttcagcttccttctttctttaacaactttgatcctcgtgctgcagcagcaaacttcccatctagtgtacaagcatatctagccggtctcacattcgcacttgctgcctcaccttgtagtactccagttctagccactcttcttggttacgtggctacttccagggatccagtaattggtggaagcttactcttaacctatacaacaggttacgtcgctccacttatcgtcgctgcttcttttgccggagctttacagagcttactttcgttgcgaaaggtctctgcatggatcaatcccataagtggtgctcttctacttggaggaggtttatatactttcttggataggctttttcctgctgctactatggtcatgtaaaaacttaacttacaaactcatttcggccaaaaacaaagtgtttgtaatagtaaataaataatattgtttataatgtaaaattac

SEQ ID NO: 912 - protein, 354 aa, Arabidopsis thaliana
MNLSVNRCITGGFVGGFSSCRLNHEKRWVRAGKHCELERERSLVSDAVSLERLESKSIKLAMLASGLGVANLVTLSSAKAADLKMIVLDQATSIYILAEGSLGDSVGNFLYSANQQANEAVQDQLSALSVTSLAVIFGAGLVTSLSPCTLSVLPLTLGYIGAFGSGKSRGQVIGDTVAFALGLATTLALLGIVASFAGKAYGQIGQGLPVAASGLAIVMGLNLLEIIELQLPSFFNNFDPRAAAANFPSSVQAYLAGLTFALAASPCSTPVLATLLGYVATSRDPVIGGSLLLTYTTGYVAPLIVAASFAGALQSLLSLRKVSAWINPISGALLLGGGLYTFLDRLFPAATMVM

SEQ ID NO: 913 - protein, 293 aa, Arabidopsis thaliana
MLASGLGVANLVTLSSAKAADLKMIVLDQATSIYILAEGSLGDSVGNFLYSANQQANEAVQDQLSALSVTSLAVIFGAGLVTSLSPCTLSVLPLTLGYIGAFGSGKSRGQVIGDTVAFALGLATTLALLGIVASFAGKAYGQIGQGLPVAASGLAIVMGLNLLEIIELQLPSFFNNFDPRAAAANFPSSVQAYLAGLTFALAASPCSTPVLATLLGYVATSRDPVIGGSLLLTYTTGYVAPLIVAASFAGALQSLLSLRKVSAWINPISGALLLGGGLYTFLDRLFPAATMVM

SEQ ID NO: 914 - protein, 270 aa, Arabidopsis thaliana
MIVLDQATSIYILAEGSLGDSVGNFLYSANQQANEAVQDQLSALSVTSLAVIFGAGLVTSLSPCTLSVLPLTLGYIGAFGSGKSRGQVIGDTVAFALGLATTLALLGIVASFAGKAYGQIGQGLPVAASGLAIVMGLNLLEIIELQLPSFFNNFDPRAAAANFPSSVQAYLAGLTFALAASPCSTPVLATLLGYVATSRDPVIGGSLLLTYTTGYVAPLIVAASFAGALQSLLSLRKVSAWINPISGALLLGGGLYTFLDRLFPAATMVM

SEQ ID NO: 915 - DNA, 1219 bp, Arabidopsis thaliana
ctttttgaaacgtcagggaaagagaatcccgcaatactctctcctctctcttttttttttttttctgggtcgaagtttggttctttgttggataatgatggtttttgacagtgaatctaacctagaccgattcttacgctgcactacaccgattgtgcctgcctattccctcccaaagacacagatcaagaaccttaatcctctatggtatccgttggagagccagagcgtcgagtatttcaggttgggagatttttgggattgtttcgacgagtggagtgcttacggtgcaggtgtccccattgtatcggaaacgggcgaaacattggtccaatactatgttccttacctctctgcaatccagattttcacctctcattctgttatcaatactcttagggaggagacagaatcaggggattcagggagcgagtcgtgtagcgaggagtggagatgggaaggatgttcttcgtctgaagaagggtttgatcatcaagaacctctcgatcgcctcggttactcttacttgcagtatttcgagagatgtacaccttactctagagtccctctcatggataagatcaaagagttgggagaaagatacgtagggttgaggtcattgaggagtgttgatctgtctcctgcgagttggatggctgttgcttggtatccaatctatcacattcccatgaatagaagcataaaagacttgtctacttgcttcctcacttaccacacgctttcttcatctttccaagatgtaaaaagggaagaggagaaggagaggataagtgtgagtgcatttgggatggccacttacaagatgcaagggaggctatgggataatgatagattgctttgctttttgagcgtagcagattcttggctaaagcagctaagggtccaccaccatgacttcacctacttcaccactactactcattatctttgatatatgtagtgttttagatcattacttggttaacagtctatttagctttgttgtttaagagtagcacatatcaataatgttggattgttgttacttgggactctttgggaaggataggtactgactttttcttcacaagacttttatatcataaatttagtttggggtcagattgatgatgatgggctcaatacatttattcttttctaatgttttgtggctttctgtttgtacaaacgcacgttctcttgattttggtatccttcc

SEQ ID NO: 916 - protein, 316 aa, Arabidopsis thaliana
FLKRQGKRIPQYSLLSLFFFFLGRSLVLCWIMMVFDSESNLDRFLRCTTPIVPAYSLPKTQIKNLNPLWYPLESQSVEYFRLGDFWDCFDEWSAYGAGVPIVSETGETLVQYYVPYLSAIQIFTSHSVINTLREETESGDSGSESCSEEWRWEGCSSSEEGFDHQEPLDRLGYSYLQYFERCTPYSRVPLMDKIKELGERYVGLRSLRSVDLSPASWMAVAWYPIYHIPMNRSIKDLSTCFLTYHTLSSSFQDVKREEEKERISVSAFGMATYKMQGRLWDNDRLLCFLSVADSWLKQLRVHHHDFTYFTTTTHYL

SEQ ID NO: 917 - protein, 285 aa, Arabidopsis thaliana
MMVFDSESNLDRFLRCTTPIVPAYSLPKTQIKNLNPLWYPLESQSVEYFRLGDFWDCFDEWSAYGAGVPIVSETGETLVQYYVPYLSAIQIFTSHSVINTLREETESGDSGSESCSEEWRWEGCSSSEEGFDHQEPLDRLGYSYLQYFERCTPYSRVPLMDKIKELGERYVGLRSLRSVDLSPASWMAVAWYPIYHIPMNRSIKDLSTCFLTYHTLSSSFQDVKREEEKERISVSAFGMATYKMQGRLWDNDRLLCFLSVADSWLKQLRVHHHDFTYFTTTTHYL

SEQ ID NO: 918 - protein, 284 aa, Arabidopsis thaliana
MVFDSESNLDRFLRCTTPIVPAYSLPKTQIKNLNPLWYPLESQSVEYFRLGDFWDCFDEWSAYGAGVPIVSETGETLVQYYVPYLSAIQIFTSHSVINTLREETESGDSGSESCSEEWRWEGCSSSEEGFDHQEPLDRLGYSYLQYFERCTPYSRVPLMDKIKELGERYVGLRSLRSVDLSPASWMAVAWYPIYHIPMNRSIKDLSTCFLTYHTLSSSFQDVKREEEKERISVSAFGMATYKMQGRLWDNDRLLCFLSVADSWLKQLRVHHHDFTYFTTTTHYL

SEQ ID NO: 919 - DNA, 1498 bp, Arabidopsis thaliana
tggcccagaattaaacgcaatccacttcaatccaaaatcccatactaaattaaaaccaacacacaggaagaaagaagaaacctctcatcttcccctctcttctgttgaagaaagcttaaacctttctgggtttcttttaactatggcgacaagggttagtttcttcttagctctggtaatgacggtggtgattcttgctccttctgtcgtctctggagaaaatgggttttccgatcttaaaatccgtactcacttgaaacgactcaacaagccagctctcaaatcgattaagagcccagatggagatatgattgactgtgttccaatcactgaccaaccagcttttgctcatcctctgctcattaatcacactgtccagatgtggccaagtttgaacccagaaagtgtatttagtgagagtaaagtttcatcaaaaaccaagaatcagcagtctaatgctatacatcagctttggcatgtgaatgggaaatgtccaaagaacacaattcccatcagaagaacgagaagacaagatctttacagagcgagttccgttgagaattacggtatgaagaatcagaagagtatccctaaacctaaatcttctgagccacctaatgtccttacacaaaatggtcatcagcacgcgataatgtatgtcgaagatggggttttctacggggctaaagcgaagataaatgtatggaagccggatgttgaaatgcctaatgagtttagcttagctcagatttgggttttaggtggaaatttcaactctgatcttaatagtattgaagctggctggcaggtcagcccacaattgtatggtgataataggaccagactcttcacttattggactagtgatgcataccaaggcacaggctgctataatcttctatgctcaggatttgttcaaatcaatagagaaatcgcaatgggtggatcaatctctcctttatcaaactatggaaactctcaatatgacatcaccatactcatctggaaggatccaaaagaaggacattggtggttacagtttggagagaaatacataataggatactggccagcttcactcttctcttacttatcagaaagtgcatcgatgatcgaatggggaggcgaagtggttaactcgcagtccgaggaaggacaacacacaaccactcagatgggaagtgggaggtttgcagaggaaggttggggaaaagcgagttacttcaagaacgttcaagtagttgatggatcgaatgaactgagaaacccggagaatcttcaagtgtttactgatcaagagaactgttacaatgtgaaaagtgggaatggaggttcttggggaagttacttctactatggtggtcctggtcgaaaccctaattgcccttaaagatttggtcgacttactcacattgcagatcattccaaatcaattgtataaaaaacatataatatatatatatacacattcttaagtatattattaatttcaggtttg

SEQ ID NO: 920 - protein, 462 aa, Arabidopsis thaliana
GPELNAIHFNPKSHTKLKPTHRKKEETSHLPLSSVEESLNLSGFLLTMATRVSFFLALVMTVVILAPSVVSGENGFSDLKIRTHLKRLNKPALKSIKSPDGDMIDCVPITDQPAFAHPLLINHTVQMWPSLNPESVFSESKVSSKTKNQQSNAIHQLWHVNGKCPKNTIPIRRTRRQDLYRASSVENYGMKNQKSIPKPKSSEPPNVLTQNGHQHAIMYVEDGVFYGAKAKINVWKPDVEMPNEFSLAQIWVLGGNFNSDLNSIEAGWQVSPQLYGDNRTRLFTYWTSDAYQGTGCYNLLCSGFVQINREIAMGGSISPLSNYGNSQYDITILIWKDPKEGHWWLQFGEKYIIGYWPASLFSYLSESASMIEWGGEVVNSQSEEGQHTTTQMGSGRFAEEGWGKASYFKNVQVVDGSNELRNPENLQVFTDQENCYNVKSGNGGSWGSYFYYGGPGRNPNCP

SEQ ID NO: 921 - protein, 415 aa, Arabidopsis thaliana
MATRVSFFLALVMTVVILAPSVVSGENGFSDLKIRTHLKRLNKPALKSIKSPDGDMIDCVPITDQPAFAHPLLINHTVQMWPSLNPESVFSESKVSSKTKNQQSNAIHQLWHVNGKCPKNTIPIRRTRRQDLYRASSVENYGMKNQKSIPKPKSSEPPNVLTQNGHQHAIMYVEDGVFYGAKAKINVWKPDVEMPNEFSLAQIWVLGGNFNSDLNSIEAGWQVSPQLYGDNRTRLFTYWTSDAYQGTGCYNLLCSGFVQINREIAMGGSISPLSNYGNSQYDITILIWKDPKEGHWWLQFGEKYIIGYWPASLFSYLSESASMIEWGGEVVNSQSEEGQHTTTQMGSGRFAEEGWGKASYFKNVQVVDGSNELRNPENLQVFTDQENCYNVKSGNGGSWGSYFYYGGPGRNPNCP

SEQ ID NO: 922 - protein, 403 aa, Arabidopsis thaliana
MTVVILAPSVVSGENGFSDLKIRTHLKRLNKPALKSIKSPDGDMIDCVPITDQPAFAHPLLINHTVQMWPSLNPESVFSESKVSSKTKNQQSNAIHQLWHVNGKCPKNTIPIRRTRRQDLYRASSVENYGMKNQKSIPKPKSSEPPNVLTQNGHQHAIMYVEDGVFYGAKAKINVWKPDVEMPNEFSLAQIWVLGGNFNSDLNSIEAGWQVSPQLYGDNRTRLFTYWTSDAYQGTGCYNLLCSGFVQINREIAMGGSISPLSNYGNSQYDITILIWKDPKEGHWWLQFGEKYIIGYWPASLFSYLSESASMIEWGGEVVNSQSEEGQHTTTQMGSGRFAEEGWGKASYFKNVQVVDGSNELRNPENLQVFTDQENCYNVKSGNGGSWGSYFYYGGPGRNPNCP

SEQ ID NO: 923 - DNA, 1221 bp, Arabidopsis thaliana
gtgttaatttgattaattccattacatcttcaaaaccgtacagatctctgtttcggagcagcttcttcacacgctcaagctcaccgatcgattcttccaatgctcttctaattcatctgcaaaactctcagatcactcatgggtttgatttcaaaccctacccgtttgattctcgtcgccaccatcttcttcctcgtttcttcaatctccggtcaggattctgtcgttgagaacaatgagagacaagaatctgaaggatctggtaaagagcttggtcgtcgtggaatggttggtactgaacgaattggagttgatactgttgtagacaatattggtgctcttggtttgaatctagaccttgatgctactgctcctagtgtatttgatgctttgttttcgagtttctcgatgatacttgtcaccgagattggggatgaaacttttataatagcggcattgatggctatgcgacatcctaaagctactgttttatctggtgcactctcagctttgtttgttatgactatactttctactggacttggtaggatagtgccaaacttgatatcgaggaagcacaccaatagtgctgctacagtgctctatgcattttttggtttgcgactactctacattgcttggaggtctactgattcaaagtcaaatcagaagaaagaaatggaggaagttgaagagaagctcgagtcaggtcaagggaagacacccttccgtcgtttattctcaagattttgtaccccaatatttctggagtccttcatcttaacctttctagctgaatggggtgaccgtagccagatcgctacaatagctttggcgactcacaagaacgccataggagtggccattggggcaagtattggacacactgtgtgtacttcactagcagttgttggaggaagcatgctggcttcaaggatctcgcaacgtacggtcgcaactgttggaggcttactcttcctcggcttttcagtctcctcctatttctatcctccattgtagtaaatgtgcttctttcgaaaatgggtgttagagacaatttctaagtaaagtttcaattttttttttgattttaatttaagtttgatattttgtttaatatcaatggccaaaatggccaaaccaaagaatccaacgcctatgcttttacaatttactttcttgaagtgtaacaaatctaattaaataaaattttgcagtatt

SEQ ID NO: 924 - protein, 293 aa, Arabidopsis thaliana
MGLISNPTRLILVATIFFLVSSISGQDSVVENNERQESEGSGKELGRRGMVGTERIGVDTVVDNIGALGLNLDLDATAPSVFDALFSSFSMILVTEIGDETFIIAALMAMRHPKATVLSGALSALFVMTILSTGLGRIVPNLISRKHTNSAATVLYAFFGLRLLYIAWRSTDSKSNQKKEMEEVEEKLESGQGKTPFRRLFSRFCTPIFLESFILTFLAEWGDRSQIATIALATHKNAIGVAIGASIGHTVCTSLAVVGGSMLASRISQRTVATVGGLLFLGFSVSSYFYPPL

SEQ ID NO: 925 - protein, 244 aa, Arabidopsis thaliana
MVGTERIGVDTVVDNIGALGLNLDLDATAPSVFDALFSSFSMILVTEIGDETFIIAALMAMRHPKATVLSGALSALFVMTILSTGLGRIVPNLISRKHTNSAATVLYAFFGLRLLYIAWRSTDSKSNQKKEMEEVEEKLESGQGKTPFRRLFSRFCTPIFLESFILTFLAEWGDRSQIATIALATHKNAIGVAIGASIGHTVCTSLAVVGGSMLASRISQRTVATVGGLLFLGFSVSSYFYPPL

SEQ ID NO: 926 - protein, 203 aa, Arabidopsis thaliana
MILVTEIGDETFIIAALMAMRHPKATVLSGALSALFVMTILSTGLGRIVPNLISRKHTNSAATVLYAFFGLRLLYIAWRSTDSKSNQKKEMEEVEEKLESGQGKTPFRRLFSRFCTPIFLESFILTFLAEWGDRSQIATIALATHKNAIGVAIGASIGHTVCTSLAVVGGSMLASRISQRTVATVGGLLFLGFSVSSYFYPPL

SEQ ID NO: 927 - DNA, 1141 bp, Arabidopsis thaliana
atcagcggcttcacctctccaggttcgtgtctcgattttgcaaactatctctcgaaatcgtcctacatttctttcttcagattcattactgagcttcgctttctgggtttctatctaaaaatttcacagatttcgtgtgtgaagaatcatttcaagccatgtctccggctaaaggtacgatcttttcattgataaccacttgaatcttcactggaacatgatggatttggatcttcttctactagactttagttttgctgaacccgctagtatctggtctcgattaatgttttctaatcatgtttcgttaggtgattagtttcaatatcttcctgattagcttcaactaagtgagattaatgtagtatccaaatgaattttgtctgtagacgtgtttctgagtattcatgtattgaagtcagatttgtatcaaagtattatatgatgcttaaactctctgttgtatgtaatatgcagttgatactaccaagaaggctgatcctaaggccaaggccttgaaggcggcaaaggctgtgaagtctggtcaagccttcaagaagaaggacaaaaagattaggaccaaggtcaccttccacaggccaaagactcttaccaagcctagaactggtaagtacccaaaaatcagcgctactccaaggaacaagttggatcactaccaaatccttaagtacccactcaccactgaatctgcgatgaagaagattgaagacaacaacactcttgttttcattgttgacattcgtgctgacaagaagaagattaaggatgctgttaagaagatgtatgacatccagaccaagaaagtgaacacactcatcaggtactttaaagagtatttttctatgaagccttgttgtgagattgattatgttcaatatatttgacactatggtttggttttgttacaggcctgatggaaccaagaaggcttacgtgaggcttacaccagactatgatgctttggatgttgctaacaagatcggcatcatctaagtctatctatctctgcagttataaagactattgtggttttgtctcttgtagtctcagttttgcttttaagatatttattattactatcatctggtaattgtagtattttggagcaaaaacgttttac

SEQ ID NO: 928 - protein, 63 aa, Arabidopsis thaliana
MKKIEDNNTLVFIVDIRADKKKIKDAVKKMYDIQTKKVNTLIRYFKEYFSMKPCCEIDYVQYI

SEQ ID NO: 929 - protein, 63 aa, Arabidopsis thaliana
ISGFTSPGSCLDFANYLSKSSYISFFRFITELRFLGFYLKISQISCVKNHFKPCLRLKVRSFH

SEQ ID NO: 930 - protein, 48 aa, Arabidopsis thaliana
MNFVCRRVSEYSCIEVRFVSKYYMMLKLSVVCNMQLILPRRLILRPRP

SEQ ID NO: 931 - DNA, 1643 bp, Arabidopsis thaliana
aaactgactatgaaagcggaaaaagttatggagagagagatcgagacaacgccaatagagcctcttagcccaatgtcacatatgctaagttcgccaaatttcttcattgtcataacttttgggtttaaaactcgatgcaaccgatcggcctttgttgatggcatcaacaacacattgatcaatgctcccagattctccagtaaaatggagataaattataagaaaaaaggagaaccggtctggattcctgttaaacttcgagtagatgatcatattattgtgccggatcttgaatattccaacattcaaaatcctgatcagttcgtagaagactatacttcaaacatagctaatattccaatggacatgtccaaacctctttgggaatttcatttactcaacatgaagacatcaaaagcagaatctttggctatagtaaaaatacatcactccattggtgatgggatgtctcttatgtccctactacttgcttgttcacgaaaaatatcagaccctgacgcgctagtttctaataccacggctacaaaaaagccagctgattccatggcttggtggttgtttgttgggttttggtttatgataagagtcaccttcaccactattgttgagttttccaagttaatgcttacagtatgctttttggaagataccaaaaaccctcttatgggtaacccgagtgatggatttcaatcttggaaggttgtccatcggataataagttttgaggatgtcaagttaataaaggacacaatgaacatgaaggtgaatgatgttcttcttggaatgacacaagcaggtctttcaagatatttgagtagcaaatatgatggatcaacggctgagaagaaaaagatcttagaaaaactccgtgttcgtggtgccgtagctataaacttaagaccagcaacaaagatagaggatttggctgatatgatggcgaagggttcaaagtgtagatggggaaacttcataggaacggttatatttccgttgtgggtgaaatcagagaaagatccgttggagtacattcgacgagccaaagctacgatggataggaaaaaaatatctctggaagctttttttttctatggaattattaaattcaccttgaaattttttggaggaaaggcagtagaagcttttggaaagaggatatttggtcacacatcattggcattttcaaatgtgaaaggtcccgatgaagaaataagtttttttcaccatccgatttcatatatcgcaggaagtgcattagttggagcacaagctctcaatatccattttataagctacgtagacaagattgtcatcaatctagctgttgacacaacaacgattcaagatcctaatcgactatgtgatgatatggtggaagcacttgagatcatcaaatctgccacacaaggggaaatatttcacaaaacggaagtttgaaacacatcacctgatgtttgatcagggttatgtaatatataactatatgaagttttgtatttgcaatgaatttttttatggagtatgataaccaaaatatgtggtgaagtgtaagtttgtttgtttggtttgatcttaggtgttttatgaacagttggcaaaatggtaaaagggcataacaaaagatc

SEQ ID NO: 932 - protein, 484 aa, Arabidopsis thaliana
KLTMKAEKVMEREIETTPIEPLSPMSHMLSSPNFFIVITFGFKTRCNRSAFVDGINNTLINAPRFSSKMEINYKKKGEPVWIPVKLRVDDHIIVPDLEYSNIQNPDQFVEDYTSNIANIPMDMSKPLWEFHLLNMKTSKAESLAIVKIHHSIGDGMSLMSLLLACSRKISDPDALVSNTTATKKPADSMAWWLFVGFWFMIRVTFTTIVEFSKLMLTVCFLEDTKNPLMGNPSDGFQSWKVVHRIISFEDVKLIKDTMNMKVNDVLLGMTQAGLSRYLSSKYDGSTAEKKKILEKLRVRGAVAINLRPATKIEDLADMMAKGSKCRWGNFIGTVIFPLWVKSEKDPLEYIRRAKATMDRKKISLEAFFFYGIIKFTLKFFGGKAVEAFGKRIFGHTSLAFSNVKGPDEEISFFHHPISYIAGSALVGAQALNIHFISYVDKIVINLAVDTTTIQDPNRLCDDMVEALEIIKSATQGEIFHKTEV

SEQ ID NO: 933 - protein, 481 aa, Arabidopsis thaliana
MKAEKVMEREIETTPIEPLSPMSHMLSSPNFFIVITFGFKTRCNRSAFVDGINNTLINAPRFSSKMEINYKKKGEPVWIPVKLRVDDHIIVPDLEYSNIQNPDQFVEDYTSNIANIPMDMSKPLWEFHLLNMKTSKAESLAIVKIHHSIGDGMSLMSLLLACSRKISDPDALVSNTTATKKPADSMAWWLFVGFWFMIRVTFTTIVEFSKLMLTVCFLEDTKNPLMGNPSDGFQSWKVVHRIISFEDVKLIKDTMNMKVNDVLLGMTQAGLSRYLSSKYDGSTAEKKKILEKLRVRGAVAINLRPATKIEDLADMMAKGSKCRWGNFIGTVIFPLWVKSEKDPLEYIRRAKATMDRKKISLEAFFFYGIIKFTLKFFGGKAVEAFGKRIFGHTSLAFSNVKGPDEEISFFHHPISYIAGSALVGAQALNIHFISYVDKIVINLAVDTTTIQDPNRLCDDMVEALEIIKSATQGEIFHKTEV

SEQ ID NO: 934 - protein, 475 aa, Arabidopsis thaliana
MEREIETTPIEPLSPMSHMLSSPNFFIVITFGFKTRCNRSAFVDGINNTLINAPRFSSKMEINYKKKGEPVWIPVKLRVDDHIIVPDLEYSNIQNPDQFVEDYTSNIANIPMDMSKPLWEFHLLNMKTSKAESLAIVKIHHSIGDGMSLMSLLLACSRKISDPDALVSNTTATKKPADSMAWWLFVGFWFMIRVTFTTIVEFSKLMLTVCFLEDTKNPLMGNPSDGFQSWKVVHRIISFEDVKLIKDTMNMKVNDVLLGMTQAGLSRYLSSKYDGSTAEKKKILEKLRVRGAVAINLRPATKIEDLADMMAKGSKCRWGNFIGTVIFPLWVKSEKDPLEYIRRAKATMDRKKISLEAFFFYGIIKFTLKFFGGKAVEAFGKRIFGHTSLAFSNVKGPDEEISFFHHPISYIAGSALVGAQALNIHFISYVDKIVINLAVDTTTIQDPNRLCDDMVEALEIIKSATQGEIFHKTEV

SEQ ID NO: 935 - DNA, 1801 bp, Arabidopsis thaliana
tgaaccattaggtgatttttttctctgatcttcgagttctgataattgctcttttttctctggctttgttatcgataatttctctggattttctttctggggtgaatttttgcgcagagatgggttcggcgaacaacgagtacgagtttctgagtgagattgggctgacttctcacaacttgggatcttacgttgctggcaaatggcaagccaacggacctcttgtttcaactctcaatcctgctaacaatcagccaattgctcaagttgtggaagcttctctagaggattacgagcaaggtttgaaagcttgcgaggaagcagctaaaatatggatgcaggttacggctcctaagagaggtgatatcgtcagacagattggggatgcactaagatccaaacttgactatcttggtcgtcttctttctcttgaaatgggaaagatccttgctgaaggtattggagaagttcaggaagtaattgacatgtgtgattttgctgttggtttgagccgacaactcaatggatcggttataccttcagaacgccctaaccacatgatgttggagatgtggaatcctcttggcattgttggtgttatcacagcgtttaattttccctgtgcagttcttggttggaatgcttgtattgctcttgtctgtggaaactgtgtagtctggaaaggtgctccaactacaccgttaataactatcgcaatgaccaagctagtagctgaagttttagagaaaaacaacttacccggtgccatttttacggccatgtgtggtggtgctgaaattggtgaagcaatagccaaagacacacgcattcccttagtatcctttactggaagctccagggtgggctcaatggtacaacaaacagtgaatgcgagatctgggaaaactttgcttgagttgagtggaaacaatgcaatcatagtcatggacgatgctgatatacagttagcggctcgatctgttctattcgctgcggttggaactgctggtcaacgttgcacaacttgccgtaggctgcttttgcatgagagtgtctatgacaaagtactcgagcaactgcttacctcatacaaacaagtcaaaatcggcaatcctcttgagaaagggacattgttaggaccattacatactcctgaatcaaaaaagaactttgagaaaggaattgaagtcatcaaatcccagggtggtaaaatactaacgggaggtaaagcagtcgaaggtgaaggaaactttgtggagcctacgataatcgagatatcagcagatgctgctgtcgtcaaagaagagctatttgctccggttctatatgttctaaagtttaagtcatttggagaggctgttgcgataaacaactcggttcctcaaggtctaagcagctcgatattcactcggaaccctgaaaacatcttcaggtggatcggaccactgggaagtgactgtggcattgtgaatgtgaacataccgacgaatggagctgagattggtggagcttttggaggcgagaaagcgactggtggtggtcgtgaagctggaagcgactcatggaaacagtacatgcgtcgatcgacttgtaccatcaactatggaaacgagttacctctagcgcaaggaattaacttcggttagatttttcagagatttactcgttaattaataatgttatgttggttcgatttcgatacttgtattgtatgccttgttctctccaagcctttgacttaagatgattacgcttttaatatatataaaaaaatattgaatatattttgattgttaatttg

SEQ ID NO: 936 - protein, 508 aa, Arabidopsis thaliana
MGSANNEYEFLSEIGLTSHNLGSYVAGKWQANGPLVSTLNPANNQPIAQVVEASLEDYEQGLKACEEAAKIWMQVTAPKRGDIVRQIGDALRSKLDYLGRLLSLEMGKILAEGIGEVQEVIDMCDFAVGLSRQLNGSVIPSERPNHMMLEMWNPLGIVGVITAFNFPCAVLGWNACIALVCGNCVVWKGAPTTPLITIAMTKLVAEVLEKNNLPGAIFTAMCGGAEIGEAIAKDTRIPLVSFTGSSRVGSMVQQTVNARSGKTLLELSGNNAIIVMDDADIQLAARSVLFAAVGTAGQRCTTCRRLLLHESVYDKVLEQLLTSYKQVKIGNPLEKGTLLGPLHTPESKKNFEKGIEVIKSQGGKILTGGKAVEGEGNFVEPTIIEISADAAVVKEELFAPVLYVLKFKSFGEAVAINNSVPQGLSSSIFTRNPENIFRWIGPLGSDCGIVNVNIPTNGAEIGGAFGGEKATGGGREAGSDSWKQYMRRSTCTINYGNELPLAQGINFG

SEQ ID NO: 937 - protein, 436 aa, Arabidopsis thaliana
MQVTAPKRGDIVRQIGDALRSKLDYLGRLLSLEMGKILAEGIGEVQEVIDMCDFAVGLSRQLNGSVIPSERPNHMMLEMWNPLGIVGVITAFNFPCAVLGWNACIALVCGNCVVWKGAPTTPLITIAMTKLVAEVLEKNNLPGAIFTAMCGGAEIGEAIAKDTRIPLVSFTGSSRVGSMVQQTVNARSGKTLLELSGNNAIIVMDDADIQLAARSVLFAAVGTAGQRCTTCRRLLLHESVYDKVLEQLLTSYKQVKIGNPLEKGTLLGPLHTPESKKNFEKGIEVIKSQGGKILTGGKAVEGEGNFVEPTIIEISADAAVVKEELFAPVLYVLKFKSFGEAVAINNSVPQGLSSSIFTRNPENIFRWIGPLGSDCGIVNVNIPTNGAEIGGAFGGEKATGGGREAGSDSWKQYMRRSTCTINYGNELPLAQGINFG

SEQ ID NO: 938 - protein, 403 aa, Arabidopsis thaliana
MGKILAEGIGEVQEVIDMCDFAVGLSRQLNGSVIPSERPNHMMLEMWNPLGIVGVITAFNFPCAVLGWNACIALVCGNCVVWKGAPTTPLITIAMTKLVAEVLEKNNLPGAIFTAMCGGAEIGEAIAKDTRIPLVSFTGSSRVGSMVQQTVNARSGKTLLELSGNNAIIVMDDADIQLAARSVLFAAVGTAGQRCTTCRRLLLHESVYDKVLEQLLTSYKQVKIGNPLEKGTLLGPLHTPESKKNFEKGIEVIKSQGGKILTGGKAVEGEGNFVEPTIIEISADAAVVKEELFAPVLYVLKFKSFGEAVAINNSVPQGLSSSIFTRNPENIFRWIGPLGSDCGIVNVNIPTNGAEIGGAFGGEKATGGGREAGSDSWKQYMRRSTCTINYGNELPLAQGINFG

SEQ ID NO: 939 - DNA, 1645 bp, Arabidopsis thaliana
aaatcaatttttaatttaccttcgtcaagaagaagacgacttgagatttgcgaaaaagatgactcaggacgtagagatgaaagataaccaaaccccaacgcaatccgtcgtctctgctcctacctccacgctacagaatttgaaggagattgcagctctgattgatactggatcttatacaaaggaagtccgtcgtattgctcgtgctgtgcgtctcaccgttggactacgaaggaagctcacgggttccgtgatctcttctttccttgatttcgctttggttcctggatctgaagctcacactcgtctctcttcttttgtgccgaagagtgatgaacatgacatggaagttgatacagcatcatcgaattcccaagctcctcctaagcatctacctgcagagctcgagatttactgctacttcattgttcttctttttctcattgatcagaaaaagtacaacgaggccaaagtttgttctaccgctagcattgctcgcctcaaaagcgtaaacaggagaaccgttgatgtcattgcttccaaattgtatttttactactccttaagttacgagctaactaatgatcttgcagagatacgtagtactcttcttgctcttcaccattcggccacactgcgccacgacgaattgggccaggaaacacttttgaatctgttgcttcgcaattatctacactacaacctgtacgaccaagcagagaagttgagatcaaaagcgcctcgatttgaggcacactctaaccaacagttttgtaggtacttgttttaccttggcaagatcaggacgattcaacttgagtacaccgatgcaaaagagagtctcctccaagctgctaggaaagcacctgttgcatctctgggattcagaatccagtgcaacaagtgggctatcatagttcggctgttgttgggtgaaatacctgaacgatctatcttcactcagaaaggaatggagaagactcttaggccatattttgagctgaccaacgctgtgagaattggtgacttggagctgttcgggaaaatccaagagaagtttgccaaaacatttgcggaagacaggactcacaacctcatagtcagactccgacacaacgtgatcagaacaggactgcgcaacatcagcatttcctactccagaatctctctacaggatgttgctcaaaagctgagactgaactcagcgaacccagtggctgatgcagaaagcatcgtcgctaaagccattagagatggagcaatcgacgcaaccatcgaccacaagaacggttgtatggtctccaaggaaacaggagacatctactccactaatgaaccacagactgcgtttaactcgaggattgccttctgtttgaatatgcacaatgaagcggttagagcactgaggttcccgccaaacacgcacagggagaaagagagcgaggagaaaagaagggagatgaaacagcaagaagaggagctcgctaaatacatggctgaggaagacgatgatgatttctagatttgtttcaaattctactgtttttgtctgttaacacttttgttattttgaattatctgactttttcttgttattatgcacatcagttcttttactttatgaaaaaacaaaatctcaaacttt

SEQ ID NO: 940 - protein, 506 aa, Arabidopsis thaliana
NQFLIYLRQEEDDLRFAKKMTQDVEMKDNQTPTQSVVSAPTSTLQNLKEIAALIDTGSYTKEVRRIARAVRLTVGLRRKLTGSVISSFLDFALVPGSEAHTRLSSFVPKSDEHDMEVDTASSNSQAPPKHLPAELEIYCYFIVLLFLIDQKKYNEAKVCSTASIARLKSVNRRTVDVIASKLYFYYSLSYELTNDLAEIRSTLLALHHSATLRHDELGQETLLNLLLRNYLHYNLYDQAEKLRSKAPRFEAHSNQQFCRYLFYLGKIRTIQLEYTDAKESLLQAARKAPVASLGFRIQCNKWAIIVRLLLGEIPERSIFTQKGMEKTLRPYFELTNAVRIGDLELFGKIQEKFAKTFAEDRTHNLIVRLRHNVIRTGLRNISISYSRISLQDVAQKLRLNSANPVADAESIVAKAIRDGAIDATIDHKNGCMVSKETGDIYSTNEPQTAFNSRIAFCLNMHNEAVRALRFPPNTHREKESEEKRREMKQQEEELAKYMAEEDDDDF

SEQ ID NO: 941 - protein, 487 aa, Arabidopsis thaliana
MTQDVEMKDNQTPTQSVVSAPTSTLQNLKEIAALIDTGSYTKEVRRIARAVRLTVGLRRKLTGSVISSFLDFALVPGSEAHTRLSSFVPKSDEHDMEVDTASSNSQAPPKHLPAELEIYCYFIVLLFLIDQKKYNEAKVCSTASIARLKSVNRRTVDVIASKLYFYYSLSYELTNDLAEIRSTLLALHHSATLRHDELGQETLLNLLLRNYLHYNLYDQAEKLRSKAPRFEAHSNQQFCRYLFYLGKIRTIQLEYTDAKESLLQAARKAPVASLGFRIQCNKWAIIVRLLLGEIPERSIFTQKGMEKTLRPYFELTNAVRIGDLELFGKIQEKFAKTFAEDRTHNLIVRLRHNVIRTGLRNISISYSRISLQDVAQKLRLNSANPVADAESIVAKAIRDGAIDATIDHKNGCMVSKETGDIYSTNEPQTAFNSRIAFCLNMHNEAVRALRFPPNTHREKESEEKRREMKQQEEELAKYMAEEDDDDF

SEQ ID NO: 942 - protein, 481 aa, Arabidopsis thaliana
MKDNQTPTQSVVSAPTSTLQNLKEIAALIDTGSYTKEVRRIARAVRLTVGLRRKLTGSVISSFLDFALVPGSEAHTRLSSFVPKSDEHDMEVDTASSNSQAPPKHLPAELEIYCYFIVLLFLIDQKKYNEAKVCSTASIARLKSVNRRTVDVIASKLYFYYSLSYELTNDLAEIRSTLLALHHSATLRHDELGQETLLNLLLRNYLHYNLYDQAEKLRSKAPRFEAHSNQQFCRYLFYLGKIRTIQLEYTDAKESLLQAARKAPVASLGFRIQCNKWAIIVRLLLGEIPERSIFTQKGMEKTLRPYFELTNAVRIGDLELFGKIQEKFAKTFAEDRTHNLIVRLRHNVIRTGLRNISISYSRISLQDVAQKLRLNSANPVADAESIVAKAIRDGAIDATIDHKNGCMVSKETGDIYSTNEPQTAFNSRIAFCLNMHNEAVRALRFPPNTHREKESEEKRREMKQQEEELAKYMAEEDDDDF

SEQ ID NO: 943 - DNA, 1559 bp, Arabidopsis thaliana
tgatgaaaaaaaaagctttgaaattctctctcgacaatggtgtcggaccaggatctagcgaaaggagtcgagactttgcttcgacaatccgaccctagctctctcacatcgttaagcagtattgttcagcagcttgaagctaagttagggttagacctcacggagaagacgactttcatcagagatcagatcaatatcctcctccgtgctcaccaaaacccttctgcctccgtcgcctccgcttcatccgtacaacaatctcaccctcctcctccgccgtcttctcaccagcagcagaatttgcattccggcgtcaatgttcctccgatggcgaaagggcatttcacacttagccatccttcgcaattctctgtttcttctcaatcacaacaatatccttcacatttcgctcttcagcctccttatcactcttatgacctaaatttccggcagccttatccggtttacatgccgccgcaacagcaccagcatcagcagcagtctccgcgacaacaacaatcctctgtgatgctctcacatggcgggaatgcttctctatctgttaatcaagccccaaaagaaagtgctccggctggaactaaaagaaagggtggtcctggaggactaaacaaagtctgtagggtttctccagaacttgaagtagttgttggtgaacctgctcttcctagaactgagattgtgaggcaattgtgggcttatataaggaagaataaccttcaagacccgagtaacaagcggaagatcatctgtgatgatgcgttgcgtgtggtttttgagactgattgcactgacatgttcaagatgaataagttgcttgctaagcatattctcccgcttgatccatcaaaggactctggtcaagcaaaaaaggcaaaaactgaggtggagactaagactgagaccaccgagcctattagttcaactgctattagttcaactgttacattatctgagccacttggtaagttctttggcactggtgagacggagatggcagacgaagagattattcgccgtgtttgggaatacataaaactcaacaatttagaggacccagtaaatccaatggctattcagtgtgatgaaaagctccgagatcttcttggatgtgaaagcatttcagctgtggggataaatgagatgctgaggcgccatatgtacaagcagtcgtgatatcttctggtctgacttaattaactaggaactactagtgtgtgtatctagggaacctacttatgactccttgctgtagaactctgatagggaagaaaagatccttttcacttttaacttcctttaatgctattttaatcttccgttgggttctttgttttagttggttgtgtatcgacatgcttaggttgatgttgtatttagtattgtaccgaaactctagtgttaagggtgaaacggcgcagatgttttgtattaaacgccattcacccatgaatgtcttaggaaaaaaaaactcatgtgtttaactatgttttccctgttggaaatatttgcatcctactgatagaaaaatcttattccct

SEQ ID NO: 944 - protein, 385 aa, Arabidopsis thaliana
MVSDQDLAKGVETLLRQSDPSSLTSLSSIVQQLEAKLGLDLTEKTTFIRDQINILLRAHQNPSASVASASSVQQSHPPPPPSSHQQQNLHSGVNVPPMAKGHFTLSHPSQFSVSSQSQQYPSHFALQPPYHSYDLNFRQPYPVYMPPQQHQHQQQSPRQQQSSVMLSHGGNASLSVNQAPKESAPAGTKRKGGPGGLNKVCRVSPELEVVVGEPALPRTEIVRQLWAYIRKNNLQDPSNKRKIICDDALRVVFETDCTDMFKMNKLLAKHILPLDPSKDSGQAKKAKTEVETKTETTEPISSTAISSTVTLSEPLGKFFGTGETEMADEEIIRRVWEYIKLNNLEDPVNPMAIQCDEKLRDLLGCESISAVGINEMLRRHMYKQS

SEQ ID NO: 945 - protein, 288 aa, Arabidopsis thaliana
MAKGHFTLSHPSQFSVSSQSQQYPSHFALQPPYHSYDLNFRQPYPVYMPPQQHQHQQQSPRQQQSSVMLSHGGNASLSVNQAPKESAPAGTKRKGGPGGLNKVCRVSPELEVVVGEPALPRTEIVRQLWAYIRKNNLQDPSNKRKIICDDALRVVFETDCTDMFKMNKLLAKHILPLDPSKDSGQAKKAKTEVETKTETTEPISSTAISSTVTLSEPLGKFFGTGETEMADEEIIRRVWEYIKLNNLEDPVNPMAIQCDEKLRDLLGCESISAVGINEMLRRHMYKQS

SEQ ID NO: 946 - protein, 241 aa, Arabidopsis thaliana
MPPQQHQHQQQSPRQQQSSVMLSHGGNASLSVNQAPKESAPAGTKRKGGPGGLNKVCRVSPELEVVVGEPALPRTEIVRQLWAYIRKNNLQDPSNKRKIICDDALRVVFETDCTDMFKMNKLLAKHILPLDPSKDSGQAKKAKTEVETKTETTEPISSTAISSTVTLSEPLGKFFGTGETEMADEEIIRRVWEYIKLNNLEDPVNPMAIQCDEKLRDLLGCESISAVGINEMLRRHMYKQS

SEQ ID NO: 947 - DNA, 1386 bp, Arabidopsis thaliana
gaaaaatatctcgaatccgattccttttttctcttctgcaatctctttgaaatctcaagcttctcttcaaaatttcgattacagctgaagattctctcgattttctggttttgactttttttttgtttggtttggtgaaagatttggatcaaatgggggtggattactacaatgttctgaaagtgaatcgaaatgctaacgaagatgatctgaagaagtcttaccggcgaatggctatgaaatggcaccctgacaaaaaccctacgagcaagaaagaagctgaagctaagttcaagcagatctctgaagcttacgacgtcttgagcgatcctcagagacgtcagatctacgatcagtacggagaagaaggtcttaaatccaccgatttacctactgcggcggagacggcggcgcatcagcagcagcggagctactcttctagcaactctgagtttcggtattatccgcgtgatgctgaagatatctttgctgagtttttcggcgaatccggtgatgcttttggcggagggagtagcggaaggacacgtggagatggcggtgatggtggcggtcggagatttaaaagtgcagaagcagggagccaggctaatagaaagacgccgccgacgaacaaaaaaacgacgccgccggcgaataggaaggctccggctattgagagtaaattggcttgcacattggaggagctctacaaaggtgcaaagaagaagatgcgaatttctcgcgttgttcctgatgattttggaaagccaaagacagtccaagagatattgaagatagacataaaaccaggttggaagaaaggcacaaagatcacttttccagagaaaggcaaccaagaacctggtgtcactcctgcggatcttatattcgtggttgacgagaaaccgcattcggtattcaagagagacggtaacgatctgattctcgagaagaaagtctctcttatagatgctttaaccggtctcaccattagcgtaacgactctagacgggaggagcctaactatcccggtgctggatatcgtaaaaccgggtcaggagattgtgatcccgaatgagggaatgcctactaaagaccctttgaagagaggagaccttagagttacctttgaaatcttgttcccgtcaaggctaacgtcagaacagaagaatgacctcaagagagttcttggtggaagctgatgagttgacgtttagttttcaagtaagctattgatcttctttaacaacggattccacaggaagttgctagtcatttgagtgtacatacatttacgtttttcctttgtaaacttgtgttataagaaaaacaagaaaacccaaatcgaataagactggatatgcgggatctaataatggctgccac

SEQ ID NO: 948 - protein, 349 aa, Arabidopsis thaliana
MGVDYYNVLKVNRNANEDDLKKSYRRMAMKWHPDKNPTSKKEAEAKFKQISEAYDVLSDPQRRQIYDQYGEEGLKSTDLPTAAETAAHQQQRSYSSSNSEFRYYPRDAEDIFAEFFGESGDAFGGGSSGRTRGDGGDGGGRRFKSAEAGSQANRKTPPTNKKTTPPANRKAPAIESKLACTLEELYKGAKKKMRISRVVPDDFGKPKTVQEILKIDIKPGWKKGTKITFPEKGNQEPGVTPADLIFVVDEKPHSVFKRDGNDLILEKKVSLIDALTGLTISVTTLDGRSLTIPVLDIVKPGQEIVIPNEGMPTKDPLKRGDLRVTFEILFPSRLTSEQKNDLKRVLGGS

SEQ ID NO: 949 - protein, 323 aa, Arabidopsis thaliana
MAMKWHPDKNPTSKKEAEAKFKQISEAYDVLSDPQRRQIYDQYGEEGLKSTDLPTAAETAAHQQQRSYSSSNSEFRYYPRDAEDIFAEFFGESGDAFGGGSSGRTRGDGGDGGGRRFKSAEAGSQANRKTPPTNKKTTPPANRKAPAIESKLACTLEELYKGAKKKMRISRVVPDDFGKPKTVQEILKIDIKPGWKKGTKITFPEKGNQEPGVTPADLIFVVDEKPHSVFKRDGNDLILEKKVSLIDALTGLTISVTTLDGRSLTIPVLDIVKPGQEIVIPNEGMPTKDPLKRGDLRVTFEILFPSRLTSEQKNDLKRVLGGS

SEQ ID NO: 950 - protein, 321 aa, Arabidopsis thaliana
MKWHPDKNPTSKKEAEAKFKQISEAYDVLSDPQRRQIYDQYGEEGLKSTDLPTAAETAAHQQQRSYSSSNSEFRYYPRDAEDIFAEFFGESGDAFGGGSSGRTRGDGGDGGGRRFKSAEAGSQANRKTPPTNKKTTPPANRKAPAIESKLACTLEELYKGAKKKMRISRVVPDDFGKPKTVQEILKIDIKPGWKKGTKITFPEKGNQEPGVTPADLIFVVDEKPHSVFKRDGNDLILEKKVSLIDALTGLTISVTTLDGRSLTIPVLDIVKPGQEIVIPNEGMPTKDPLKRGDLRVTFEILFPSRLTSEQKNDLKRVLGGS

SEQ ID NO: 951 - DNA, 1871 bp, Arabidopsis thaliana
aaaaccctaaaaaatccaaccagaagggtagaagctctctcgccgacaattaccggctacaaggtttctctgctcgtcaacgttctctgaattagtggtattgaaagatgagcttatctcagaatgctccgaaaagtaagggtattaaaagagaggagctcaagaaacagtacgaagatgttgaagatgaggaagagattgggtccgatgatgatctcactaggggaaagagaagaaagacagagaaggagaagcagaagctagaagaatcggaactggttgaaatgaaaaagcttgagaatttgatattcgggtcactctactctcctgttacgtttggtaaggaagaagaagaagatggttcggctttgtttcatgtagaccgttctgctgtgaggcagattcctgactacgaggatgatggtgatgatgatgaagagctttctgatgaagagaatggtcaagttgtggcaattagaaagggagaagctgcctgggaggatgaagaagagaaacagataaacgttgatatagctagtgtcaaccgtctaaggaagctaaggaaagaggagaatgagggtttgatctctgggtctgagtacattgcaaggctgagggctcatcatgctaagctaaacccggggactgattgggctcggccagattctcaaatagttgatggagagtcttcagatgatgatgatactcaggatggaggagttgatgatatccttcgaacgaatgaagatcttgtggtgaagtctcgtggtaacaagctgtgtgctggtcgtcttgaatactctaagcttgtggatgccaatgcagcggatccttcaaatggtccaataaactctgtccacttccatcagaacgctcagctgcttctcactgctggattggatcgacggttaaggtttttccagattgatggaaagaggaacaccaagatccagagcatttttcttgaggactgtcccattcgtaaagcggctttcttgcccaatggctctcaggtcattgtctccggaagaagaaagttcttttacagctttgatttggagaaggcaaagtttgacaaaattggccctttggttggtagagaggagaaaagcttggaatatttcgaggtgtcacaagactctaacaccatagcttttgttggcaacgaaggttatatcttacttgtgtctacaaaaacaaaagagctgataggaaccctaaagatgaatggttcagttaggtctttagcatttagtgaagatgggaagcatttgctgagctcaggaggtgacgggcaagtctatgtctgggatctgagaacaatgaaatgcttatacaaaggcgtggatgaaggcagcacttgtggcacttctctttgcagttcgcttaacggagcattgtttgcttctggaaccgacagaggaatcgtaaacatttacaagaaatctgagtttgtgggaggcaaaagaaagccgataaagacagtggacaatctcacatccaagatagatttcatgaagttcaaccatgatgctcagattctagctatagtctctacaatgaacaaaaacagtgtaaagctagtccatgttccatccctaaccgtcttctcaaactggccgccaccaaacagcacaatgcattaccctcgctgcctagacttcagccccggaagtggcttcatggctatggggaacgctgccggaaaagttttgctgtataaactccatcattaccagaatgcttgaagtggtctttaacaagggcagttttgggattgttgtgtttcctctttttttgtcgcaagtactctttatgttatcaattttcctatccaattatcgatcaatgaaaaattttctttctgattg

SEQ ID NO: 952 - protein, 546 aa, Arabidopsis thaliana
MSLSQNAPKSKGIKREELKKQYEDVEDEEEIGSDDDLTRGKRRKTEKEKQKLEESELVEMKKLENLIFGSLYSPVTFGKEEEEDGSALFHVDRSAVRQIPDYEDDGDDDEELSDEENGQVVAIRKGEAAWEDEEEKQINVDIASVNRLRKLRKEENEGLISGSEYIARLRAHHAKLNPGTDWARPDSQIVDGESSDDDDTQDGGVDDILRTNEDLVVKSRGNKLCAGRLEYSKLVDANAADPSNGPINSVHFHQNAQLLLTAGLDRRLRFFQIDGKRNTKIQSIFLEDCPIRKAAFLPNGSQVIVSGRRKFFYSFDLEKAKFDKIGPLVGREEKSLEYFEVSQDSNTIAFVGNEGYILLVSTKTKELIGTLKMNGSVRSLAFSEDGKHLLSSGGDGQVYVWDLRTMKCLYKGVDEGSTCGTSLCSSLNGALFASGTDRGIVNIYKKSEFVGGKRKPIKTVDNLTSKIDFMKFNHDAQILAIVSTMNKNSVKLVHVPSLTVFSNWPPPNSTMHYPRCLDFSPGSGFMAMGNAAGKVLLYKLHHYQNA

SEQ ID NO: 953 - protein, 487 aa, Arabidopsis thaliana
MKKLENLIFGSLYSPVTFGKEEEEDGSALFHVDRSAVRQIPDYEDDGDDDEELSDEENGQVVAIRKGEAAWEDEEEKQINVDIASVNRLRKLRKEENEGLISGSEYIARLRAHHAKLNPGTDWARPDSQIVDGESSDDDDTQDGGVDDILRTNEDLVVKSRGNKLCAGRLEYSKLVDANAADPSNGPINSVHFHQNAQLLLTAGLDRRLRFFQIDGKRNTKIQSIFLEDCPIRKAAFLPNGSQVIVSGRRKFFYSFDLEKAKFDKIGPLVGREEKSLEYFEVSQDSNTIAFVGNEGYILLVSTKTKELIGTLKMNGSVRSLAFSEDGKHLLSSGGDGQVYVWDLRTMKCLYKGVDEGSTCGTSLCSSLNGALFASGTDRGIVNIYKKSEFVGGKRKPIKTVDNLTSKIDFMKFNHDAQILAIVSTMNKNSVKLVHVPSLTVFSNWPPPNSTMHYPRCLDFSPGSGFMAMGNAAGKVLLYKLHHYQNA

SEQ ID NO: 954 - DNA, 1377 bp, Arabidopsis thaliana
acttccctttgttcagacgtttctttattcttcttccttccttcttctccttcttcttgatcgtgttcagaaatcatattcatcacctctctctctctatgtctctatatttggattctttataacatgtgagatcgatctatttttgatcagagacagagagaagactagaagaagcaaagaatatttcaagaatgatgaagatgaatacaggaacatcgccgtcggtcatcggcggcgggactagtggtaatgagtgggagtctcgacctggaggaatggttgttcaacgtcggacagatcagaactccgatgtgccacgtgtctttcgtgttcgggttaaatacgggtcggtttatcacgagatcaacatcaattcccaatcttccttcggagagttgaagaagatgttgtctgatcaagtgggacttcaccatgaagacatgaaggttttgtacaaagacaaagagagagattcaaagatgtttcttgatctttgtggagttaaagatcggtcaaagcttgttgttaaagaagatccaatttctcaggagaaacgtctccttgcaaaaaggaaaaacgccgccattgaaaaagcttctaaatctatctctgatattagtttcgaagtcgacagactcgccggacaggtgtcggcgtttgagacggtgattaataaaggaggtaaagttgaagagaagagtcttgtgaatctgatagagatgttgatgaatcagttattgagacttgatgctattattgctgatggtgatgtcaaattgatgaggaagatgcaggtgcaaagagttcagaagtacgttgaggcactcgacctcttaaaagtcaaaaactctgccaaaaaagttgaagtcaacaagtccgtccgccacaaaccgcaaacgcaaacgcgatttgagcaacgcgatttgttatcgtttgtggaggaagaggaggaggagcctaggaattccaatgcatcatcctcatcaggtactccggcggttgtagcttcaaaatgggaaatgtttgattccgcatcgacggccaaggcggctgaaacggttaaaccggtccctccgcgattcaaatgggaattcttcgattaagatgaacactatatatacatacatgataaatatgtcttttttttctccggtttcatatgtgatttgttttgtttttcatctcaactgagatgtgtatgatttgtgatttgatcttggctattttttgaggctttgtctagaatatcttttggttggactcccttttaagtcaatcaaaaataataggggagtttcaacaattactatcattgtaatacctaaagatttggattttctttactattacaataaaaagctatcaaaaagatgc

SEQ ID NO: 955 - protein, 303 aa, Arabidopsis thaliana
MMKMNTGTSPSVIGGGTSGNEWESRPGGMVVQRRTDQNSDVPRVFRVRVKYGSVYHEININSQSSFGELKKMLSDQVGLHHEDMKVLYKDKERDSKMFLDLCGVKDRSKLVVKEDPISQEKRLLAKRKNAAIEKASKSISDISFEVDRLAGQVSAFETVINKGGKVEEKSLVNLIEMLMNQLLRLDAIIADGDVKLMRKMQVQRVQKYVEALDLLKVKNSAKKVEVNKSVRHKPQTQTRFEQRDLLSFVEEEEEEPRNSNASSSSGTPAVVASKWEMFDSASTAKAAETVKPVPPRFKWEFFD

SEQ ID NO: 956 - protein, 302 aa, Arabidopsis thaliana
MKMNTGTSPSVIGGGTSGNEWESRPGGMVVQRRTDQNSDVPRVFRVRVKYGSVYHEININSQSSFGELKKMLSDQVGLHHEDMKVLYKDKERDSKMFLDLCGVKDRSKLVVKEDPISQEKRLLAKRKNAAIEKASKSISDISFEVDRLAGQVSAFETVINKGGKVEEKSLVNLIEMLMNQLLRLDAIIADGDVKLMRKMQVQRVQKYVEALDLLKVKNSAKKVEVNKSVRHKPQTQTRFEQRDLLSFVEEEEEEPRNSNASSSSGTPAVVASKWEMFDSASTAKAAETVKPVPPRFKWEFFD

SEQ ID NO: 957 - protein, 300 aa, Arabidopsis thaliana
MNTGTSPSVIGGGTSGNEWESRPGGMVVQRRTDQNSDVPRVFRVRVKYGSVYHEININSQSSFGELKKMLSDQVGLHHEDMKVLYKDKERDSKMFLDLCGVKDRSKLVVKEDPISQEKRLLAKRKNAAIEKASKSISDISFEVDRLAGQVSAFETVINKGGKVEEKSLVNLIEMLMNQLLRLDAIIADGDVKLMRKMQVQRVQKYVEALDLLKVKNSAKKVEVNKSVRHKPQTQTRFEQRDLLSFVEEEEEEPRNSNASSSSGTPAVVASKWEMFDSASTAKAAETVKPVPPRFKWEFFD

SEQ ID NO: 958 - DNA, 1448 bp, Arabidopsis thaliana
ctcgaagatcagcgagagagagagaagtagattgagaggcgagagagataatggcagatgaaggtaaggaggagacaggaatgggtcaggtcgaggaagatttttctgtgtggaagaagaacacaccatttctctacgatcttttgatctctcacccactcgaatggccatctctcaccgtccattgggttccatcgacgccaaatccttacgtagcagactcttacttcggtgtccacaagcttatactcggtactcatacttccggtagtgctcaagattttctcatggtcgccgacgtcgttaccccgacaccaaacgcagaacctgggataggcggcgctaatcaggatccctttattcctaaggtggagattaggcagaggatacgtgttgatggagaagtgaacagagcgcggtgtatgcctcaaaagccgacgcttgtgggtgcaaagacgagtgggtgtgaggtgtttctgtttgattacgccaaacatgctgcaaagtctcaaacgagtgagtgtgatcctgatctgaggctagtgggacatgacaaggaagggtatggattgtcttggagtcctttcaaggaaggttatcttttgagtggttcacaggatcagaagatctgtctttgggatgtttcagctacaccgcaagataaggttttgaatgcaatgtttgtgtatgagggacatgaaagtgctatcgcagatgtgtcatggcacatgaagaatgagaacctttttggttctgcgggtgaggatggccgattggtgatatgggacacacggacaaaccaaatgcaacaccaagtgaaagttcacgagagagaggtcaactatctatctttcaatccgttcaacgaatgggtattggccacagcttcctcagactccactgttgctttgtttgacctccggaaacttaatgcgccattgcatgtcatgagcagccatgagggagaggtcttccaagtggagtgggatcctaaccatgaaacagtactcgcatcttcaggggaggacagaaggctgatggtctgggacctgaacagggttggagaagagcagcttgagatagagttggatgcagaagatggtccaccagagttactcttctctcacggaggccacaaggctaagatatcagactttgcttggaacaaaaacgagccttgggtcattgcaagtgtagctgaagacaacagtcttcaggtgtggcagatggcagaaagcatctatcgcgatgaagaggatgccgaggacatcaaagaagatattacacaacaatcatgaaaattaagaaacgatttggtctctccattacttaaagtgtcttatcttgctttagccagtttctgaaagacaagctttgcgtctgtattaggattaacatgaatcatctctgtttgttaatgtaaccatgttggattttgttggtttcct

SEQ ID NO: 959 - protein, 415 aa, Arabidopsis thaliana
MADEGKEETGMGQVEEDFSVWKKNTPFLYDLLISHPLEWPSLTVHWVPSTPNPYVADSYFGVHKLILGTHTSGSAQDFLMVADVVTPTPNAEPGIGGANQDPFIPKVEIRQRIRVDGEVNRARCMPQKPTLVGAKTSGCEVFLFDYAKHAAKSQTSECDPDLRLVGHDKEGYGLSWSPFKEGYLLSGSQDQKICLWDVSATPQDKVLNAMFVYEGHESAIADVSWHMKNENLFGSAGEDGRLVIWDTRTNQMQHQVKVHEREVNYLSFNPFNEWVLATASSDSTVALFDLRKLNAPLHVMSSHEGEVFQVEWDPNHETVLASSGEDRRLMVWDLNRVGEEQLEIELDAEDGPPELLFSHGGHKAKISDFAWNKNEPWVIASVAEDNSLQVWQMAESIYRDEEDAEDIKEDITQQS

SEQ ID NO: 960 - protein, 405 aa, Arabidopsis thaliana
MGQVEEDFSVWKKNTPFLYDLLISHPLEWPSLTVHWVPSTPNPYVADSYFGVHKLILGTHTSGSAQDFLMVADVVTPTPNAEPGIGGANQDPFIPKVEIRQRIRVDGEVNRARCMPQKPTLVGAKTSGCEVFLFDYAKHAAKSQTSECDPDLRLVGHDKEGYGLSWSPFKEGYLLSGSQDQKICLWDVSATPQDKVLNAMFVYEGHESAIADVSWHMKNENLFGSAGEDGRLVIWDTRTNQMQHQVKVHEREVNYLSFNPFNEWVLATASSDSTVALFDLRKLNAPLHVMSSHEGEVFQVEWDPNHETVLASSGEDRRLMVWDLNRVGEEQLEIELDAEDGPPELLFSHGGHKAKISDFAWNKNEPWVIASVAEDNSLQVWQMAESIYRDEEDAEDIKEDITQQS

SEQ ID NO: 961 - protein, 336 aa, Arabidopsis thaliana
MVADVVTPTPNAEPGIGGANQDPFIPKVEIRQRIRVDGEVNRARCMPQKPTLVGAKTSGCEVFLFDYAKHAAKSQTSECDPDLRLVGHDKEGYGLSWSPFKEGYLLSGSQDQKICLWDVSATPQDKVLNAMFVYEGHESAIADVSWHMKNENLFGSAGEDGRLVIWDTRTNQMQHQVKVHEREVNYLSFNPFNEWVLATASSDSTVALFDLRKLNAPLHVMSSHEGEVFQVEWDPNHETVLASSGEDRRLMVWDLNRVGEEQLEIELDAEDGPPELLFSHGGHKAKISDFAWNKNEPWVIASVAEDNSLQVWQMAESIYRDEEDAEDIKEDITQQS

SEQ ID NO: 962 - DNA, 1451 bp, Arabidopsis thaliana
gctctcactcccaaaacgatgtcgtctctatctcgcgttctccgtggcaccttcaacacttgcccgatccgccgtttttcctccgccgccaccgtagtctccgaacccaccgcagtcactgccgcaatctcgcctcctcaaaagtcactaaccagtctcgtgaatggcgaacgaaaccccaaacggatcgtggagaaattcaagaaggcatgtgagtcggagcggttccggaccaacatagccgtgtacgatagaaccgtgcgccgtctcgtagccgcaaagagattacactatgtcgaagagattttggaggagcagaagaagtaccgcgacatgtcaaaagagggattcgcggcgaggatcatttctctgtatggaaaagccggcatgtttgaaaatgcacagaaggtgttcgaagaaatgccaaacagagactgcaagaggtcagtgttgtccttcaatgccttgcttagtgcatatagactttccaagaaattcgatgtggttgaagaacttttcaatgagttacctggaaagttatcaatcaaaccagatattgtatcttacaatactttgattaaggcattgtgtgagaaggattctttacctgaagctgttgcattgcttgatgagattgagaacaagggactaaaacctgatatagttacattcaacacacttttactgtcttcgtatctaaagggacagtttgagctaggggaagagatatgggctaaaatggtggagaagaatgtagcaatagacatcaggacttacaatgctaggctgcttggattagccaatgaggcgaaatcgaaagagctagtaaatctctttggagaacttaaggctagtggtctcaaacctgatgttttcagtttcaatgctatgattagaggatctatcaacgaaggaaaaatggacgaagctgaagcgtggtacaaagaaattgtgaagcatggttatcgtcctgataaagctacctttgctttattgcttcctgctatgtgtaaagcaggtgactttgagtctgcgattgagctcttcaaggagacattcagtaagcggtatcttgtcggtcaaacaacgttgcagcagttagttgatgaattggtgaaagggtctaagagagaagaagctgaggagattgtgaagattgcaaagaccaatgatttcttaaagttgaagctaaatttgccgtcccaggaagagtaagtcatttgctactctctcactaagtgtctcgttgaattgtgtctgagcagcttaagctatatgtatttgctggtgttgctttgtggcttttctacttctctaaactttcctctgtggaagtaagacttgtttctttctatgtagtttcgcttatttcactggtgcaaaaaacagcatgtagtcgaggtttaggcagaagaaaccctacaaatttaataaattttggttatttgttt

SEQ ID NO: 963 - protein, 404 aa, Arabidopsis thaliana
ALTPKTMSSLSRVLRGTFNTCPIRRFSSAATVVSEPTAVTAAISPPQKSLTSLVNGERNPKRIVEKFKKACESERFRTNIAVYDRTVRRLVAAKRLHYVEEILEEQKKYRDMSKEGFAARIISLYGKAGMFENAQKVFEEMPNRDCKRSVLSFNALLSAYRLSKKFDVVEELFNELPGKLSIKPDIVSYNTLIKALCEKDSLPEAVALLDEIENKGLKPDIVTFNTLLLSSYLKGQFELGEEIWAKMVEKNVAIDIRTYNARLLGLANEAKSKELVNLFGELKASGLKPDVFSFNAMIRGSINEGKMDEAEAWYKEIVKHGYRPDKATFALLLPAMCKAGDFESAIELFKETFSKRYLVGQTTLQQLVDELVKGSKREEAEEIVKIAKTNDFLKLKLNLPSQEE

SEQ ID NO: 964 - protein, 398 aa, Arabidopsis thaliana
MSSLSRVLRGTFNTCPIRRFSSAATVVSEPTAVTAAISPPQKSLTSLVNGERNPKRIVEKFKKACESERFRTNIAVYDRTVRRLVAAKRLHYVEEILEEQKKYRDMSKEGFAARIISLYGKAGMFENAQKVFEEMPNRDCKRSVLSFNALLSAYRLSKKFDVVEELFNELPGKLSIKPDIVSYNTLIKALCEKDSLPEAVALLDEIENKGLKPDIVTFNTLLLSSYLKGQFELGEEIWAKMVEKNVAIDIRTYNARLLGLANEAKSKELVNLFGELKASGLKPDVFSFNAMIRGSINEGKMDEAEAWYKEIVKHGYRPDKATFALLLPAMCKAGDFESAIELFKETFSKRYLVGQTTLQQLVDELVKGSKREEAEEIVKIAKTNDFLKLKLNLPSQEE

SEQ ID NO: 965 - protein, 293 aa, Arabidopsis thaliana
MSKEGFAARIISLYGKAGMFENAQKVFEEMPNRDCKRSVLSFNALLSAYRLSKKFDVVEELFNELPGKLSIKPDIVSYNTLIKALCEKDSLPEAVALLDEIENKGLKPDIVTFNTLLLSSYLKGQFELGEEIWAKMVEKNVAIDIRTYNARLLGLANEAKSKELVNLFGELKASGLKPDVFSFNAMIRGSINEGKMDEAEAWYKEIVKHGYRPDKATFALLLPAMCKAGDFESAIELFKETFSKRYLVGQTTLQQLVDELVKGSKREEAEEIVKIAKTNDFLKLKLNLPSQEE

SEQ ID NO: 966 - DNA, 1515 bp, Arabidopsis thaliana
attattcacaatcgtgagcaaacggaacaaagtttaaagtcgtcgttcaaagcaacgtgagttctctcggaaccttacgggttacttacgggtaaaccactcgccggtcggaataaaggttttacaaattcctcttgtctcatccgtgatgttgaagcgtactgacaaatggaaatcttcgcatggatctcgaatccatcaattcggacttgttttcgttgttgggatcttcctggtggtggttctgttattttgtttcagtggcaagaatcagagcacgaaaatgcaactaccgaaacagatctctaacaatgtcaagcccgaattgcaatctcagccaacattagagattcagaacgagactcaattgatatggacgataccaaattcaccaaaagcagttctgtttatagctcatggttgccacaggaaagcttcagacttttgggacaaatcttcagattgtcctcaatgtactggcctaccagaggagaggattcttatgcgatttgccctagctcgaaagtttgctgttttaactgtatctagcactggaacatgctggacatttgggaaggaaaaaacgattgttggaagtataataaaatcgtgggtcgagaagcataagctcgaaagacttccgcttgttgcgttaggggcttcatctggtggctactttgtctcggctcttgcaacagaaatgcagtttagtagcattgtgcttatgattgctgaaggagtctttgatcaaattagtatcagtaaacagtatccgcctactctgtttgtgcacatgcctaaagatgtgtatagacaacaaaagattagagagttcttagaaggtcttagaatggaaggtattgatgctgcagagattgaatgcttggatttgccgatttctccggatttcttggcggataggattccaggtcttgattcagatgtctcggccaaactatttaagttgtttcgagacaagggatttgttgatgagaagggatacatgaaacgtgatggacggagaacaccgtggaaacaagctcttagtggctacaaaatatcactggagcaaagtttgattactcctgttgaggaagaactgaatcttgcatatgcatatcatgagatgacgagcttgcagtctgaccaaatattcagctggtttgaatcgcatatgagctaattggctgtcagattttcatgtaacaagatcattctttgaaagctgtaagatgtattgcacaggacaatctatttgactccaatggaacatgcctaaacagtcgatttacttacgatttgagtctgaaaagatcatggtcactctggttgctgtgatttagagttaagaatagaattttggttagtgtaactaaactctccgtttaaattcagcagagtttcgtaaggtcagctgctttttgattctcatttgtagttaactaagaccgctaagtctgttgtggttttggaatctgtaagaactcttaatttaagaatgttggatgatattgc

SEQ ID NO: 967 - protein, 344 aa, Arabidopsis thaliana
MLKRTDKWKSSHGSRIHQFGLVFVVGIFLVVVLLFCFSGKNQSTKMQLPKQISNNVKPELQSQPTLEIQNETQLIWTIPNSPKAVLFIAHGCHRKASDFWDKSSDCPQCTGLPEERILMRFALARKFAVLTVSSTGTCWTFGKEKTIVGSIIKSWVEKHKLERLPLVALGASSGGYFVSALATEMQFSSIVLMIAEGVFDQISISKQYPPTLFVHMPKDVYRQQKIREFLEGLRMEGIDAAEIECLDLPISPDFLADRIPGLDSDVSAKLFKLFRDKGFVDEKGYMKRDGRRTPWKQALSGYKISLEQSLITPVEEELNLAYAYHEMTSLQSDQIFSWFESHMS

SEQ ID NO: 968 - protein, 299 aa, Arabidopsis thaliana
MQLPKQISNNVKPELQSQPTLEIQNETQLIWTIPNSPKAVLFIAHGCHRKASDFWDKSSDCPQCTGLPEERILMRFALARKFAVLTVSSTGTCWTFGKEKTIVGSIIKSWVEKHKLERLPLVALGASSGGYFVSALATEMQFSSIVLMIAEGVFDQISISKQYPPTLFVHMPKDVYRQQKIREFLEGLRMEGIDAAEIECLDLPISPDFLADRIPGLDSDVSAKLFKLFRDKGFVDEKGYMKRDGRRTPWKQALSGYKISLEQSLITPVEEELNLAYAYHEMTSLQSDQIFSWFESHMS

SEQ ID NO: 969 - protein, 226 aa, Arabidopsis thaliana
MRFALARKFAVLTVSSTGTCWTFGKEKTIVGSIIKSWVEKHKLERLPLVALGASSGGYFVSALATEMQFSSIVLMIAEGVFDQISISKQYPPTLFVHMPKDVYRQQKIREFLEGLRMEGIDAAEIECLDLPISPDFLADRIPGLDSDVSAKLFKLFRDKGFVDEKGYMKRDGRRTPWKQALSGYKISLEQSLITPVEEELNLAYAYHEMTSLQSDQIFSWFESHMS

SEQ ID NO: 970 - DNA, 1216 bp, Arabidopsis thaliana
aattttcaacaagcaaagttcatgatggggaataagcgaaatctcggatttgtgatcttcttctgggctctggtggttgcagtagtagccacggccatcgagcatcgtcgcaatgagaggactaaaggcgtcaatggtcttgacaagatcatcatccgcgaccgtcgtggccgatctgctgaggtttacttgtatggaggtcaagtcagttcttggaaaaatgagaatggagaggagttacttgttatgagtagcaaggctatattccagcctccaacaccgattcgtggaggaattccagtattgtttccgcaatacagtaacaccggtccacttccctcacatggatttgtaagacagaggttctgggaggttgagactaaaccacctcctttgccatcactttctactgctcatgttgacctgatcgtaagatcatccaatgaggatttgaagatctggccgcataagtttgagtatagactgagagtagcattgggacatgatggagatttgacgttaacatctcgtgttaagaatactgatacaaaaccatttaacttcacatttgctcttcacccctacttcgctgtttccaatatcagtgaaatccatgtcgaaggattacacaacttggattaccttgaccaacaaaagaacagaacacgtttcactgatcatgagaaggttataactttcaatgctcaacttgacaggttgtacctaagcactccagatcaactaagaatcgtggaccataagaaaaagaagactattgttgtacacaaggagggacaagttgatgccgtggtgtggaatccatgggataagaaagtatccgatttgggagttgaagactataagcgttttgtaacggtggaaagcgcggctgtcgcgaaaccgatcacagtgaaccccggcaaagaatggaaaggaatactccatgtttctgtggttccatcaaatcggaaagcttgaccctataaaagtcttgcattcatcatcctcatcctttaaaaaaaaaacttaaaactgtctttattaaagtatacttaatgttcccgagagacatcacatggtgaacacaaagttagttgggttccaaactggactcttgaccagttttattgttttgtaactttagcattcatgaataaaaaaagtgcgttaattacaataattgttaaatgtaattaaataaaagtgcgttaactac

SEQ ID NO: 971 - protein, 325 aa, Arabidopsis thaliana
NFQQAKFMMGNKRNLGFVIFFWALVVAVVATAIEHRRNERTKGVNGLDKIIIRDRRGRSAEVYLYGGQVSSWKNENGEELLVMSSKAIFQPPTPIRGGIPVLFPQYSNTGPLPSHGFVRQRFWEVETKPPPLPSLSTAHVDLIVRSSNEDLKIWPHKFEYRLRVALGHDGDLTLTSRVKNTDTKPFNFTFALHPYFAVSNISEIHVEGLHNLDYLDQQKNRTRFTDHEKVITFNAQLDRLYLSTPDQLRIVDHKKKKTIVVHKEGQVDAVVWNPWDKKVSDLGVEDYKRFVTVESAAVAKPITVNPGKEWKGILHVSVVPSNRKA

SEQ ID NO: 972 - protein, 318 aa, Arabidopsis thaliana
MMGNKRNLGFVIFFWALVVAVVATAIEHRRNERTKGVNGLDKIIIRDRRGRSAEVYLYGGQVSSWKNENGEELLVMSSKAIFQPPTPIRGGIPVLFPQYSNTGPLPSHGFVRQRFWEVETKPPPLPSLSTAHVDLIVRSSNEDLKIWPHKFEYRLRVALGHDGDLTLTSRVKNTDTKPFNFTFALHPYFAVSNISEIHVEGLHNLDYLDQQKNRTRFTDHEKVITFNAQLDRLYLSTPDQLRIVDHKKKKTIVVHKEGQVDAVVWNPWDKKVSDLGVEDYKRFVTVESAAVAKPITVNPGKEWKGILHVSVVPSNRKA

SEQ ID NO: 973 - protein, 317 aa, Arabidopsis thaliana
MGNKRNLGFVIFFWALVVAVVATAIEHRRNERTKGVNGLDKIIIRDRRGRSAEVYLYGGQVSSWKNENGEELLVMSSKAIFQPPTPIRGGIPVLFPQYSNTGPLPSHGFVRQRFWEVETKPPPLPSLSTAHVDLIVRSSNEDLKIWPHKFEYRLRVALGHDGDLTLTSRVKNTDTKPFNFTFALHPYFAVSNISEIHVEGLHNLDYLDQQKNRTRFTDHEKVITFNAQLDRLYLSTPDQLRIVDHKKKKTIVVHKEGQVDAVVWNPWDKKVSDLGVEDYKRFVTVESAAVAKPITVNPGKEWKGILHVSVVPSNRKA

SEQ ID NO: 974 - DNA, 1384 bp, Arabidopsis thaliana
cctttcttgtcgtcgtttcgaagagactaaaggcgacggagagaatcggagaagaagatgggaacggcggtgggacagtggctagaggaagcgcttgttgacctctgccgcaaaccagagaccggtttgaatttcgatcgtgatgtcatctccggtttagtctcctattgcgatcttgctcagcctgtcgatgccaaggaatatctcgacaatattattggaaaagaaggcaaaagcatcattgcagaatatctacagcgaagaggatacaaagatccatctagccatgtagcagccagttcaggtccagaactgcaaatgtatgttaagccaaaagtggataatggtgcttctagtggaaccaagaaaccgtttaaaacaccaaaagagggaacatcttctaatcagcaagctggaactgggaaattaacagctcccgcccagcaagttaatcctaagaagaaaaaaggtggaaaggtgatttctcttgccgaagcagctaaaggatcaatagtgtttcagcaaggaaaaccgtgtgcatgccaagctcgtagacaccacttagtgagcaactgcttgtcgtgtgggaaaatagtgtgcgaacaagaaggagaagggccttgcagtttttgcggagcacttgtgctgaaagaaggaagtacatatgctgggctagaggtagggtatactccagtatctgatgctgatgtggcagctgaagcatatgcgaaaaggcttgtagagtatgatagaaattcggccgcacgtacaacggttattgatgaccaaagcgattactatgaatctgagagcagtacttggctctctgcggaggaaaaagagctagtgaggaagaagcgagaggagattgaagaagctgaacgagtaaaaaagagcaaagtggttatgacatttgatttaatcggccgtaaggttctgttaaatgaagatgatatctcagaactagaatcagggaacaggattctgggaccacctgagactaaaaacgtgaacagaataaaaccgaacccgactgcaagactcgttccaatcttcttagacccaggaccaaccgagaagaagccaaacagcaccaccaccaagaaagacaacaagaaaaaccgaaacggtttgtgtctagagatcacaggaagggtgcaacatgacagaagtgaactcaaatacttacaagccgatccaaaatcggacggtaaatcttggccatcaggaaacgatggacttcatgtagaagatggtggtgaatgttccttagattacgactaaatatttttcagtaaccaaacccggttcaatgttttcggtttaccgaacctgatactatttgttcagtttaaaagtcaacaacttttctcttgttgagtcc

SEQ ID NO: 975 - protein, 408 aa, Arabidopsis thaliana
MGTAVGQWLEEALVDLCRKPETGLNFDRDVISGLVSYCDLAQPVDAKEYLDNIIGKEGKSIIAEYLQRRGYKDPSSHVAASSGPELQMYVKPKVDNGASSGTKKPFKTPKEGTSSNQQAGTGKLTAPAQQVNPKKKKGGKVISLAEAAKGSIVFQQGKPCACQARRHHLVSNCLSCGKIVCEQEGEGPCSFCGALVLKEGSTYAGLEVGYTPVSDADVAAEAYAKRLVEYDRNSAARTTVIDDQSDYYESESSTWLSAEEKELVRKKREEIEEAERVKKSKVVMTFDLIGRKVLLNEDDISELESGNRILGPPETKNVNRIKPNPTARLVPIFLDPGPTEKKPNSTTTKKDNKKNRNGLCLEITGRVQHDRSELKYLQADPKSDGKSWPSGNDGLHVEDGGECSLDYD

SEQ ID NO: 976 - protein, 321 aa, Arabidopsis thaliana
MYVKPKVDNGASSGTKKPFKTPKEGTSSNQQAGTGKLTAPAQQVNPKKKKGGKVISLAEAAKGSIVFQQGKPCACQARRHHLVSNCLSCGKIVCEQEGEGPCSFCGALVLKEGSTYAGLEVGYTPVSDADVAAEAYAKRLVEYDRNSAARTTVIDDQSDYYESESSTWLSAEEKELVRKKREEIEEAERVKKSKVVMTFDLIGRKVLLNEDDISELESGNRILGPPETKNVNRIKPNPTARLVPIFLDPGPTEKKPNSTTTKKDNKKNRNGLCLEITGRVQHDRSELKYLQADPKSDGKSWPSGNDGLHVEDGGECSLDYD

SEQ ID NO: 977 - DNA, 1652 bp, Arabidopsis thaliana
aaaagaagcttcttcaccttgtctcttttcacagtctcacacagcatagaaataatcgaaagatttctttttaaaatctgggatttgttttttttgttcattgatcattttcgattgttagagaagaatcaaatggcgatggctatggatcggatcgtcttctccccttcatcttacgtctatcgtccttgtcaagctaggggatccagatcttccagagtttccatggcttctacgattcgctctgcgactacagaggttacgaatggaaggaaactgtatatccctcccagagaggtgcatgtccaagtcaaacattcaatgccgccacaaaagttagatatctttaagtctttagaaggatgggctgatgaaaccctgttgacttatttaaaacctgttgagaaatcgtggcagcctaccgattttcttcccgaacctgagtcggaaggattctatgaccaagtcaaggagctaagggaaaggtgcaaggaacttcctgatgactattttgtggtgcttgttggggatatgatcactgaagaagcacttcctacttaccagaccatgttgaacacattggatggtgttagggatgagacaggagctagtcctactccttgggctatatggaccagggcttggactgctgaggagaatagacatggggatctccttaacaagtatctttatctgtctggtcgggtagacatgaggcagattgaaaagactattcagtacctgattggttctggaatggatccaaaaactgaaaacaacccttacttgggtttcatctacacatcatttcaagaaagagcgaccttcatctcccatggaaacactgccagactggcgaaagatcgtggagatttgaaacttgcgcagatatgcgggaccattgctgctgatgagaggcgtcatgagactgcttacaccaagattgtagagaagctctttgaaattgaccctgatggcacgatcttgggcctggctgatatgatgaagaaaaagatatcaatgcctgcacatttaatgtatgatggccaagatgataacctgtttgagcacttctcaaccgttgcccagaggctcggtgtctacactgccaaggactatgctgatattctggagtttcttgttgaacggtggaatgtggagactttgacagacctttctagtgaaggacacagggcccaggactttgtctgcggactacctgcaagaatccgtaaaattgaagagagagctcaaggaagagccaaagaagctgccaaaaacataccattcagctggatatttggtcgaaatatcagggcttaagaagtttactacacaattctctttccaattatcccaagtaagtcataaaggtcttcaccaaccatttcaccaatgaaggaccagtttttaagaccacgaaagttcatttgaatgtgttttgttttatacggaacattgtagataaagttatgtggttaggttatgtttcttgtttgaatcagtcaagaccaaagaaaatgtgtttgagtgttcttagatattgtatggtttaccaagaacaagacttaagattttcctttacctttttgattctctttttgttgtatcagtctaaagaatgttctctcttaaataaagagtggtttggc

SEQ ID NO: 978 - protein, 440 aa, Arabidopsis thaliana
KRSFFTLSLFTVSHSIEIIERFLFKIWDLFFLFIDHFRLLEKNQMAMAMDRIVFSPSSYVYRPCQARGSRSSRVSMASTIRSATTEVTNGRKLYIPPREVHVQVKHSMPPQKLDIFKSLEGWADETLLTYLKPVEKSWQPTDFLPEPESEGFYDQVKELRERCKELPDDYFVVLVGDMITEEALPTYQTMLNTLDGVRDETGASPTPWAIWTRAWTAEENRHGDLLNKYLYLSGRVDMRQIEKTIQYLIGSGMDPKTENNPYLGFIYTSFQERATFISHGNTARLAKDRGDLKLAQICGTIAADERRHETAYTKIVEKLFEIDPDGTILGLADMMKKKISMPAHLMYDGQDDNLFEHFSTVAQRLGVYTAKDYADILEFLVERWNVETLTDLSSEGHRAQDFVCGLPARIRKIEERAQGRAKEAAKNIPFSWIFGRNIRA

SEQ ID NO: 979 - protein, 396 aa, Arabidopsis thaliana
MAMAMDRIVFSPSSYVYRPCQARGSRSSRVSMASTIRSATTEVTNGRKLYIPPREVHVQVKHSMPPQKLDIFKSLEGWADETLLTYLKPVEKSWQPTDFLPEPESEGFYDQVKELRERCKELPDDYFVVLVGDMITEEALPTYQTMLNTLDGVRDETGASPTPWAIWTRAWTAEENRHGDLLNKYLYLSGRVDMRQIEKTIQYLIGSGMDPKTENNPYLGFIYTSFQERATFISHGNTARLAKDRGDLKLAQICGTIAADERRHETAYTKIVEKLFEIDPDGTILGLADMMKKKISMPAHLMYDGQDDNLFEHFSTVAQRLGVYTAKDYADILEFLVERWNVETLTDLSSEGHRAQDFVCGLPARIRKIEERAQGRAKEAAKNIPFSWIFGRNIRA

SEQ ID NO: 980 - protein, 394 aa, Arabidopsis thaliana
MAMDRIVFSPSSYVYRPCQARGSRSSRVSMASTIRSATTEVTNGRKLYIPPREVHVQVKHSMPPQKLDIFKSLEGWADETLLTYLKPVEKSWQPTDFLPEPESEGFYDQVKELRERCKELPDDYFVVLVGDMITEEALPTYQTMLNTLDGVRDETGASPTPWAIWTRAWTAEENRHGDLLNKYLYLSGRVDMRQIEKTIQYLIGSGMDPKTENNPYLGFIYTSFQERATFISHGNTARLAKDRGDLKLAQICGTIAADERRHETAYTKIVEKLFEIDPDGTILGLADMMKKKISMPAHLMYDGQDDNLFEHFSTVAQRLGVYTAKDYADILEFLVERWNVETLTDLSSEGHRAQDFVCGLPARIRKIEERAQGRAKEAAKNIPFSWIFGRNIRA

SEQ ID NO: 981 - DNA, 1354 bp, Arabidopsis thaliana
gttttatcttttgatagttctgattgtaattagattttggtaggtcacttgtatagagagatcagtaaaataagaaggatgagttggtgtgatggttcagatgataactacgatcttaatcttgaaagagtatcgaacactgatcatccatcggttcaactcaaagaccaatctcaatcatgtgtaacgagccgtccagattccaagattagcgctgaaactcctatcacgagttgtccttcttgcggacacaagctccatcatcaccaagacgaccaggttggtagcatcaaagatttaccaagcttaccggcaggagtcaaattcgatccgtcggataaagagatccttatgcatttggaggcgaaggtatcatccgataagcgaaaacttcatccgttgattgatgaatttatacctacgcttgaaggagagaatggaatttgttatacgcatcctgagaaacttcctggagtaagcaaggacgggcaagtacggcacttcttccaccggccatcaaaggcttatacgaccggaacacgaaaacgaagaaaagtgagcacagatgaggaaggccatgaaacaaggtggcacaaaacaggcaagactcgacctgttttgtctcaatcaggagaaaccggtttcaagaagatcctagtgctctacaccaactatggtcgccagaagaagcctgagaagacgaattgggtgatgcatcagtatcatttaggtagcagcgaggacgaaaaagacggtgaaccagtcctctctaaagtcttctaccaaacacagcctaggcaatgcggttcgatggaacctaaaccgaaaaatctcgtaaacctaaaccggtttagttatgaaaatattcaggccggtttcgggtatgagcatggtggtaaaagtgaagagacgacgcaggtgattcgagagttggtagttcgtgaaggcgatgggtcatgttcgtttcttagttttacttgtgatgcaagtaagggtaaagaaagcttcatgaagaatcaatagaacataacatatataatatatataaatggaggtgctttgttggagtaaagatgaggaaaagaatgagagagcacatattctttgtgtgtaggtgttgggtaactatcatagtaatctacctcaaagcttttgggagattttaggttttaaccttttttattattaaattgggggcgtaactttaacctcgagacatgactgatatttgtttatatttctattcttctagataaaatatgtcaaaacaatactgtaatagctcgtctttcaattattgtaacaaatatttcaagtaataatgaaattaaaaatggataaaataggactttgg

SEQ ID NO: 982 - protein, 314 aa, Arabidopsis thaliana
MSWCDGSDDNYDLNLERVSNTDHPSVQLKDQSQSCVTSRPDSKISAETPITSCPSCGHKLHHHQDDQVGSIKDLPSLPAGVKFDPSDKEILMHLEAKVSSDKRKLHPLIDEFIPTLEGENGICYTHPEKLPGVSKDGQVRHFFHRPSKAYTTGTRKRRKVSTDEEGHETRWHKTGKTRPVLSQSGETGFKKILVLYTNYGRQKKPEKTNWVMHQYHLGSSEDEKDGEPVLSKVFYQTQPRQCGSMEPKPKNLVNLNRFSYENIQAGFGYEHGGKSEETTQVIRELVVREGDGSCSFLSFTCDASKGKESFMKNQ

SEQ ID NO: 983 - protein, 223 aa, Arabidopsis thaliana
MHLEAKVSSDKRKLHPLIDEFIPTLEGENGICYTHPEKLPGVSKDGQVRHFFHRPSKAYTTGTRKRRKVSTDEEGHETRWHKTGKTRPVLSQSGETGFKKILVLYTNYGRQKKPEKTNWVMHQYHLGSSEDEKDGEPVLSKVFYQTQPRQCGSMEPKPKNLVNLNRFSYENIQAGFGYEHGGKSEETTQVIRELVVREGDGSCSFLSFTCDASKGKESFMKNQ

SEQ ID NO: 984 - DNA, 1501 bp, Arabidopsis thaliana
ctcctcacaacatcaatctcacaggaaggaaagaaagaaagaaagacgagcccttttttctttctaaaaatagaaatatgtctctaaaagccattcatgtctcggaagtgccaagcctcgaccacttccctgagaacccgtcgctcatttgctcctctcgcaaagcgaataacaagtttgtggtggttggccatagaggacacggcatgaacatgtcgcagtcgccggatctaaggttctctgctctcaaggagaactccatcctctcctttaatgccgcttcaaaattccctctcgactttatcgaattcgatgttcaggtcaccagagatggctgcccaatcatattccacgacgacttcatctactccgaggaacagggagtggtgtacgagaagagggtcacggaggtttgcttgtcggagttcatgtcctacgggccacagagggatacaggcaagacaggaaagcctttgctgagaaagtcaaaggaagggaagatccataagtggagcgtcgcaaccgacgactctttctgtactctccaagaggcttttgagaaagtagagaatccaaacctcggtttcaacatcgaactcaagcttgacgacaacgtcttctattcctccgatcacctctcccgtcttctcctcccaatcttgcaggtcgtgtctgatatcggaaacgacagaactatcatcttctccagcttccatcctgatgcagcccttcttgtcaggaagttgcagaccacctaccccgtattcttcttgaccaacggaggaactgagatgtaccacgacacgagaaggaattcgcttgaggaagcaatcaaagtatgtttagaaggaggcctccaagggattgtctcggaggtgaagggagtattccgcaaccccgctcttgtcaacaagataaaagaatccaagctctctctgatgacatacggaaagctaaacaatgtagccgaggcggtttacatgcagcatttgatggggatagagggagtgatagttgatcatgtggaggagataacagaggcggtgagggagatgatgaagccatccaacagagatgctgatggtactaagccaaagcctaacttctctgacagagagctctcctttcttctcaagctcattcccgagttgatacaacactaaaactatctcttttagttaggatctctagtttcccaaaatgtgatagtgttttgtatcgggaaaatttgacaatgtgggtgctgctatcatgattcatgaggtgaaagcccaaatgttatggaatatatctgtttgcagacgggttatgacttatgaggtatcaaagcaccatcagcaaattatgtaaatgtattcaaaagtggaaagtggggacttgggagaggaggccgtgctgcaggtgatatttgagacggggcaagagaggtctgtaaggatcctcctcccttctctgcttcacaaactttatgcatctctcgacctccttcttcacgtctgcg

SEQ ID NO: 985 - protein, 386 aa, Arabidopsis thaliana
PHNINLTGRKERKKDEPFFLSKNRNMSLKAIHVSEVPSLDHFPENPSLICSSRKANNKFVVVGHRGHGMNMSQSPDLRFSALKENSILSFNAASKFPLDFIEFDVQVTRDGCPIIFHDDFIYSEEQGVVYEKRVTEVCLSEFMSYGPQRDTGKTGKPLLRKSKEGKIHKWSVATDDSFCTLQEAFEKVENPNLGFNIELKLDDNVFYSSDHLSRLLLPILQVVSDIGNDRTIIFSSFHPDAALLVRKLQTTYPVFFLTNGGTEMYHDTRRNSLEEAIKVCLEGGLQGIVSEVKGVFRNPALVNKIKESKLSLMTYGKLNNVAEAVYMQHLMGIEGVIVDHVEEITEAVREMMKPSNRDADGTKPKPNFSDRELSFLLKLIPELIQH

SEQ ID NO: 986 - protein, 361 aa, Arabidopsis thaliana
MSLKAIHVSEVPSLDHFPENPSLICSSRKANNKFVVVGHRGHGMNMSQSPDLRFSALKENSILSFNAASKFPLDFIEFDVQVTRDGCPIIFHDDFIYSEEQGVVYEKRVTEVCLSEFMSYGPQRDTGKTGKPLLRKSKEGKIHKWSVATDDSFCTLQEAFEKVENPNLGFNIELKLDDNVFYSSDHLSRLLLPILQVVSDIGNDRTIIFSSFHPDAALLVRKLQTTYPVFFLTNGGTEMYHDTRRNSLEEAIKVCLEGGLQGIVSEVKGVFRNPALVNKIKESKLSLMTYGKLNNVAEAVYMQHLMGIEGVIVDHVEEITEAVREMMKPSNRDADGTKPKPNFSDRELSFLLKLIPELIQH

SEQ ID NO: 987 - protein, 318 aa, Arabidopsis thaliana
MNMSQSPDLRFSALKENSILSFNAASKFPLDFIEFDVQVTRDGCPIIFHDDFIYSEEQGVVYEKRVTEVCLSEFMSYGPQRDTGKTGKPLLRKSKEGKIHKWSVATDDSFCTLQEAFEKVENPNLGFNIELKLDDNVFYSSDHLSRLLLPILQVVSDIGNDRTIIFSSFHPDAALLVRKLQTTYPVFFLTNGGTEMYHDTRRNSLEEAIKVCLEGGLQGIVSEVKGVFRNPALVNKIKESKLSLMTYGKLNNVAEAVYMQHLMGIEGVIVDHVEEITEAVREMMKPSNRDADGTKPKPNFSDRELSFLLKLIPELIQH

SEQ ID NO: 988 - DNA, 1512 bp, Arabidopsis thaliana
tggcatgtgatatagaaatcaagatgggaagccaaggcatgagttcaccgagtcccttggtggtgaagaaatcgcaagtggttatagtgaaaccctcaaaggctacacctgatgtctctctttctctctccacactcgacaacgatccttatctcgaaaccctcgccaaaaccatctatgtctacgctccaccatccccaaacgaccacgtccacgatccagcttccctttttcagcaagctctctctgacgcccttgtctattactaccctctcgctggaaaacttcaccggggatcacacgaccatagactagaattgaggtgcagtcccgcggaaggagtcccctttgttagggcaaccgcagactgtactctctcttccctcaactatttgaaggacatggacactgacttataccaactcgtaccttgtgatgtagctgcgccctctggcgattacaaccctctggctttgcagatcactttgtttgcatgcggagggctcactcttgctacggccctctctcattccttgtgtgatggttttggagcgtctcagtttttcaaaaccttaactgagctcgccgcgggaaaaacacaacctagcatcatccccgtctgggacagacatcgtctcacttctaacaactttagcttaaacgaccaagtggaggagggacaagctcccaagctagttgattttggagaggcttgctcttctgcggcaacttctccctacacacccagcaacgacatggtatgtgagatcctcaacgtgacatccgaagatattactcagctcaaggagaaagttgcgggggtggtcacgactctagagattcttgcggcccacgtctggagagcaaggtgccgggccttgaagttaagtccagatgggacttctcttttcggaatggctgtgggtatacgccgcattgtggagccaccattaccggaagggtactacggaaacgcatttgtcaaagccaacgtagcaatgaaggctggagagttaagcaactcaccgttgtctcacgttgttcagctcattaaagaggcaaagaaagcggcacaggagaagaggtacgtgttggagcagttaagagagacagagaaaacgttgaagatgaatgtagcgtgtgaaggagggaaaggagcgttcatgttgcttactgattggaggcaacttggattgctagacgaaattgattttgggtatggaggatcagtgaatattataccattggtgcccaagtatctgccggatatttgtattttcttgccgaggaagcaaggtggtgttagagtgctagtcacgctgcccaaatctgtaatggtcaacttcaaggaacacataaatcccctaaatacatgaaattaataagcaggtgaatgtaattcacagtgtttctttaaaatatgaaaaggacctcatgcgattgtatatttaaagcttttgtttgctgtttgtttaagtttttcacatttggaaagtaatattttacaaaccg

SEQ ID NO: 989 - protein, 457 aa, Arabidopsis thaliana
ACDIEIKMGSQGMSSPSPLVVKKSQVVIVKPSKATPDVSLSLSTLDNDPYLETLAKTIYVYAPPSPNDHVHDPASLFQQALSDALVYYYPLAGKLHRGSHDHRLELRCSPAEGVPFVRATADCTLSSLNYLKDMDTDLYQLVPCDVAAPSGDYNPLALQITLFACGGLTLATALSHSLCDGFGASQFFKTLTELAAGKTQPSIIPVWDRHRLTSNNFSLNDQVEEGQAPKLVDFGEACSSAATSPYTPSNDMVCEILNVTSEDITQLKEKVAGVVTTLEILAAHVWRARCRALKLSPDGTSLFGMAVGIRRIVEPPLPEGYYGNAFVKANVAMKAGELSNSPLSHVVQLIKEAKKAAQEKRYVLEQLRETEKTLKMNVACEGGKGAFMLLTDWRQLGLLDEIDFGYGGSVNIIPLVPKYLPDICIFLPRKQGGVRVLVTLPKSVMVNFKEHINPLNT

SEQ ID NO: 990 - protein, 450 aa, Arabidopsis thaliana
MGSQGMSSPSPLVVKKSQVVIVKPSKATPDVSLSLSTLDNDPYLETLAKTIYVYAPPSPNDHVHDPASLFQQALSDALVYYYPLAGKLHRGSHDHRLELRCSPAEGVPFVRATADCTLSSLNYLKDMDTDLYQLVPCDVAAPSGDYNPLALQITLFACGGLTLATALSHSLCDGFGASQFFKTLTELAAGKTQPSIIPVWDRHRLTSNNFSLNDQVEEGQAPKLVDFGEACSSAATSPYTPSNDMVCEILNVTSEDITQLKEKVAGVVTTLEILAAHVWRARCRALKLSPDGTSLFGMAVGIRRIVEPPLPEGYYGNAFVKANVAMKAGELSNSPLSHVVQLIKEAKKAAQEKRYVLEQLRETEKTLKMNVACEGGKGAFMLLTDWRQLGLLDEIDFGYGGSVNIIPLVPKYLPDICIFLPRKQGGVRVLVTLPKSVMVNFKEHINPLNT

SEQ ID NO: 991 - protein, 445 aa, Arabidopsis thaliana
MSSPSPLVVKKSQVVIVKPSKATPDVSLSLSTLDNDPYLETLAKTIYVYAPPSPNDHVHDPASLFQQALSDALVYYYPLAGKLHRGSHDHRLELRCSPAEGVPFVRATADCTLSSLNYLKDMDTDLYQLVPCDVAAPSGDYNPLALQITLFACGGLTLATALSHSLCDGFGASQFFKTLTELAAGKTQPSIIPVWDRHRLTSNNFSLNDQVEEGQAPKLVDFGEACSSAATSPYTPSNDMVCEILNVTSEDITQLKEKVAGVVTTLEILAAHVWRARCRALKLSPDGTSLFGMAVGIRRIVEPPLPEGYYGNAFVKANVAMKAGELSNSPLSHVVQLIKEAKKAAQEKRYVLEQLRETEKTLKMNVACEGGKGAFMLLTDWRQLGLLDEIDFGYGGSVNIIPLVPKYLPDICIFLPRKQGGVRVLVTLPKSVMVNFKEHINPLNT

SEQ ID NO: 992 - DNA, 1683 bp, Arabidopsis thaliana
ccaacatggtgaccggagaagaatgtctcgatttcaaattttcttaaggaaaagtttcaaaatttaaggcggcagtttcgcgaaatcaatgggcttttctttttctattttcattatggaaaatttcgcgctaactcacttctaggctcttatggatgaccatggtggttctgatttgagcctcgaggatctcatggatgagtattcttctcgacccgcacaaatagctgaatggttatggtgtattgaatatgtagccaaatttgtcaaggatctaagctgcttactcgatttgatgaacattggttatcagtactctgatgactatgggaagaggattaatgaagtcctgtctcttagagtcttggagttcatgtttgatccaagcatgagcgatgctaacggtgttggtgttgcttctgctttagaggaaaaagtggagtttgatttatctttgagtaacgctgatgttctcagaggaattctgaaagagattccagtagcagaactacgagtgggcatgccagagctatcaaagttcaatgttctaccatttattgctcacaagaacttgtgtttgccacaatgtgcactagagaagctgagagatgtgagtttaatggagaatcagactagtgcaactcctttcatggaaacaaatgaccctgtttttagagatgatagatcagtgcacatggatttatgcgaggaggagccggtagatgaacagcaattacatattggtaacgcgaaggaacccactgatgagcaacatgtgcatattggtaacgagaaggaatccattgatgagcaacaagtgcatattggtttggaactaaacagaaacgagaaggataaagtaattgccatcgacgatgaagatgagccaatgcacaccaatgaaaaaggtgaagtagttgtgattaatgacgatactgagagtgatcaaggcacaaccagtgatgggaccttttctccaaggcacaacggtaatactaccgatgagaccaccttttctccaagctctagaagatctccagaggatgcacatgtaaaatgtacaaaagatggaacctggttaatcagtgggagcgatgatgagtcagataaagatccaccctcgatcaagaaaaatccaaacacttacttgaaccttcttccttcgagctcccgaacaagaccggagaatgtatgctggaagtgtgagaaagaaggaacgttattgatttgtagcagaagcgagtgtgcagcaaaagttcacaaggagtgtttgaattgtccggttaacgttgatgaatacgggaactttctctgccctctgtgctggtatgaccgactcgcaatggagtatcatgaatctcagaagttgattagctgcgcaaagagaagattggtgaagtgtttcccggtgctttccataagaagcaagagactcaagtgatgaaatccctgctgcaacttcactgtatttaatctcttctattagatatggaattgtagaatcaagtaagtgcttttgtgtagtttgaatctcgtgttcttggtatattttgggtagtagacaagttagggaagagaagtgaagcaataaagtcatgtgttgatgaaagttaaggatgtgctaaatgactgtatgttcatagattgttcttttatttgtataaattaactaacttagtcgat

SEQ ID NO: 993 - protein, 429 aa, Arabidopsis thaliana
MDDHGGSDLSLEDLMDEYSSRPAQIAEWLWCIEYVAKFVKDLSCLLDLMNIGYQYSDDYGKRINEVLSLRVLEFMFDPSMSDANGVGVASALEEKVEFDLSLSNADVLRGILKEIPVAELRVGMPELSKFNVLPFIAHKNLCLPQCALEKLRDVSLMENQTSATPFMETNDPVFRDDRSVHMDLCEEEPVDEQQLHIGNAKEPTDEQHVHIGNEKESIDEQQVHIGLELNRNEKDKVIAIDDEDEPMHTNEKGEVVVINDDTESDQGTTSDGTFSPRHNGNTTDETTFSPSSRRSPEDAHVKCTKDGTWLISGSDDESDKDPPSIKKNPNTYLNLLPSSSRTRPENVCWKCEKEGTLLICSRSECAAKVHKECLNCPVNVDEYGNFLCPLCWYDRLAMEYHESQKLISCAKRRLVKCFPVLSIRSKRLK

SEQ ID NO: 994 - protein, 415 aa, Arabidopsis thaliana
MDEYSSRPAQIAEWLWCIEYVAKFVKDLSCLLDLMNIGYQYSDDYGKRINEVLSLRVLEFMFDPSMSDANGVGVASALEEKVEFDLSLSNADVLRGILKEIPVAELRVGMPELSKFNVLPFIAHKNLCLPQCALEKLRDVSLMENQTSATPFMETNDPVFRDDRSVHMDLCEEEPVDEQQLHIGNAKEPTDEQHVHIGNEKESIDEQQVHIGLELNRNEKDKVIAIDDEDEPMHTNEKGEVVVINDDTESDQGTTSDGTFSPRHNGNTTDETTFSPSSRRSPEDAHVKCTKDGTWLISGSDDESDKDPPSIKKNPNTYLNLLPSSSRTRPENVCWKCEKEGTLLICSRSECAAKVHKECLNCPVNVDEYGNFLCPLCWYDRLAMEYHESQKLISCAKRRLVKCFPVLSIRSKRLK

SEQ ID NO: 995 - protein, 381 aa, Arabidopsis thaliana
MNIGYQYSDDYGKRINEVLSLRVLEFMFDPSMSDANGVGVASALEEKVEFDLSLSNADVLRGILKEIPVAELRVGMPELSKFNVLPFIAHKNLCLPQCALEKLRDVSLMENQTSATPFMETNDPVFRDDRSVHMDLCEEEPVDEQQLHIGNAKEPTDEQHVHIGNEKESIDEQQVHIGLELNRNEKDKVIAIDDEDEPMHTNEKGEVVVINDDTESDQGTTSDGTFSPRHNGNTTDETTFSPSSRRSPEDAHVKCTKDGTWLISGSDDESDKDPPSIKKNPNTYLNLLPSSSRTRPENVCWKCEKEGTLLICSRSECAAKVHKECLNCPVNVDEYGNFLCPLCWYDRLAMEYHESQKLISCAKRRLVKCFPVLSIRSKRLK

SEQ ID NO: 996 - DNA, 1449 bp, Arabidopsis thaliana
aagggttctttttggtaattttcccgaatcacacaagtgagctagctcatcagagtccacgagcttcccactaaaaaattgaaaattgttgcttctgtcatctgaaattaaacaaagcgagaaaaggcgatacaaacgatttcgaatgcttcatcttctcctttgaaaatccttcttctgcttaatgctgctagatatggatctcggtgttcttcttccatcattgcaatctgtttatgtgctggtgttttacttcgtttacttggccgttgccggagaaattctccccgggaaagttattcgcggcgtccttttatcagatggctctcaacttcgttaccgatgcaatggtctattggcactaatattgttggtagctattttgggaatctgtgcaaaacttggcattgtatcacctcttgtggttgcggatagaggacttgagttactctcagctacttttattttctgtgttttggtgacattagcattgtatgttactgggcgaagttcctcgaataagggttcttccctaaagcctcatgtctcaggaaatcttgtacatgactggtggtttggaatacagctgaatcctcagtttatgagcattgatctcaagtttttctttgtcagagccgggatgatgggatggctgcttatcaatctctctattctggcaaaaagtgtgcaggatggttccttgagtcagtcgatgattctttaccagatcttctgtgcgttatatatattggactactttgttcatgaagaatacatgacctctacgtgggacataattgcagagagactaggcttcatgctagtgtttggagatctcctgtggattcctttcacttttagcattcagggctggtggcttttgcacaacaaagtagaactaacagttcctgcgattgtagtcaattgccttgtcttcttgatagggtacatggtttttcgaggagctaacaaacaaaaacatatctttaagaagaacccaaaaacaccaatatggggcaagcctccagtggtagttggtggaaagttactggtttcaggctattggggaattgcaaggcactgtaattaccttggcgacttgatgcttgctctgtccttcagtttgccatgtggaataagttctccggttccatatttctacccgatataccttctgatactattgatatggagagaacgaagagacgaggttcgatgtgcagagaagtacaaggagatatgggcagagtatcttagacttgtcccctggagaatacttccttatgtttattagatgtgccaagagccaagtcatgaatcctttcagattcatcctcttgtgtcttattttttcataatcttgttttattttagcaatgctcgagtgaaactttgtagtacacgtttgagaataacttcagtccttattattattttagcattgatagc

SEQ ID NO: 997 - protein, 369 aa, Arabidopsis thaliana
MLLDMDLGVLLPSLQSVYVLVFYFVYLAVAGEILPGKVIRGVLLSDGSQLRYRCNGLLALILLVAILGICAKLGIVSPLVVADRGLELLSATFIFCVLVTLALYVTGRSSSNKGSSLKPHVSGNLVHDWWFGIQLNPQFMSIDLKFFFVRAGMMGWLLINLSILAKSVQDGSLSQSMILYQIFCALYILDYFVHEEYMTSTWDIIAERLGFMLVFGDLLWIPFTFSIQGWWLLHNKVELTVPAIVVNCLVFLIGYMVFRGANKQKHIFKKNPKTPIWGKPPVVVGGKLLVSGYWGIARHCNYLGDLMLALSFSLPCGISSPVPYFYPIYLLILLIWRERRDEVRCAEKYKEIWAEYLRLVPWRILPYVY

SEQ ID NO: 998 - protein, 365 aa, Arabidopsis thaliana
MDLGVLLPSLQSVYVLVFYFVYLAVAGEILPGKVIRGVLLSDGSQLRYRCNGLLALILLVAILGICAKLGIVSPLVVADRGLELLSATFIFCVLVTLALYVTGRSSSNKGSSLKPHVSGNLVHDWWFGIQLNPQFMSIDLKFFFVRAGMMGWLLINLSILAKSVQDGSLSQSMILYQIFCALYILDYFVHEEYMTSTWDIIAERLGFMLVFGDLLWIPFTFSIQGWWLLHNKVELTVPAIVVNCLVFLIGYMVFRGANKQKHIFKKNPKTPIWGKPPVVVGGKLLVSGYWGIARHCNYLGDLMLALSFSLPCGISSPVPYFYPIYLLILLIWRERRDEVRCAEKYKEIWAEYLRLVPWRILPYVY

SEQ ID NO: 999 - protein, 230 aa, Arabidopsis thaliana
MSIDLKFFFVRAGMMGWLLINLSILAKSVQDGSLSQSMILYQIFCALYILDYFVHEEYMTSTWDIIAERLGFMLVFGDLLWIPFTFSIQGWWLLHNKVELTVPAIVVNCLVFLIGYMVFRGANKQKHIFKKNPKTPIWGKPPVVVGGKLLVSGYWGIARHCNYLGDLMLALSFSLPCGISSPVPYFYPIYLLILLIWRERRDEVRCAEKYKEIWAEYLRLVPWRILPYVY

SEQ ID NO: 1000 - DNA, 1458 bp, Arabidopsis thaliana
ttctatcaaaccgtcaagttgggaaacaaaacaaaactcgcaagtttaacaacgcgtcttctacctcctcctcatcggactatttatctatagtcttcgttagatcaattcctctgttttactcctaagtttcgagatccacatttctctttaacctcatctcatctcttagtcgagatcttcactttctgatgacaatagggtcgtttttctcttctctcttattctggcgcaattctcaggaccaggaggcgcagagagggaggatgcaggagatagatcttagtgttcacactataaagtcccatggaggaagagtcgcttctaaacacaagcacgattggatcatactcgtcatcttgattgccatcgagataggcttgaacctcatctctcctttctaccgctacgtgggaaaagacatgatgactgacctcaagtaccctttcaaggacaacaccgtacctatctggtctgtccctgtgtacgctgtgcttcttcccatcatagtgttcgtctgcttctacctgaagaggacatgtgtgtacgatctgcaccacagcatcctcgggctgctcttcgccgtcttgataactggtgtcatcactgactccatcaaggtagccaccggacgccctcgtcctaacttctactggcgctgcttccccgacggcaaagagctgtatgatgcgttgggaggtgtggtatgccacggcaaggcagctgaggtcaaggaaggccacaagagcttcccgagcggacacacttcctggtcctttgcggggcttacattcctttccctttacctctctggcaaaatcaaggccttcaacaatgaaggacatgtggcgaaactctgcctcgtgatcttccctctgcttgccgcttgtcttgtggggatatctcgtgtggatgactactggcaccactggcaagatgtcttcgcaggagctctcattggcacccttgtagccgccttctgctaccgtcagttctaccccaacccttaccacgaagaaggatggggtccctacgcctatttcaaggcagctcaagaacgaggagtccctgtgacctcctcccaaaacggagatgccttgagggctatgtctctgcagatggattcaacatctctcgaaaacatggaatctggcacttccaccgctcccagatgatcctcctctcttattatttgattcattatttggtttttcattttgatttggccgtcgtcgtgagattgtgaatggtgtagctacatactgtatgtgtattcaaaactctacttgtaccattacatttttgtaaatccactcttcatgaaattgacgtttttctggtgtccgagaggcttgggtcgctcgaataatctcgtccaatagactaatacggctctagtgaacacggtatttacatgtttgtgatctaaactgaaatcagttatttcttaattcgtag

SEQ ID NO: 1001 - protein, 327 aa, Arabidopsis thaliana
MTIGSFFSSLLFWRNSQDQEAQRGRMQEIDLSVHTIKSHGGRVASKHKHDWIILVILIAIEIGLNLISPFYRYVGKDMMTDLKYPFKDNTVPIWSVPVYAVLLPIIVFVCFYLKRTCVYDLHHSILGLLFAVLITGVITDSIKVATGRPRPNFYWRCFPDGKELYDALGGVVCHGKAAEVKEGHKSFPSGHTSWSFAGLTFLSLYLSGKIKAFNNEGHVAKLCLVIFPLLAACLVGISRVDDYWHHWQDVFAGALIGTLVAAFCYRQFYPNPYHEEGWGPYAYFKAAQERGVPVTSSQNGDALRAMSLQMDSTSLENMESGTSTAPR

SEQ ID NO: 1002 - protein, 302 aa, Arabidopsis thaliana
MQEIDLSVHTIKSHGGRVASKHKHDWIILVILIAIEIGLNLISPFYRYVGKDMMTDLKYPFKDNTVPIWSVPVYAVLLPIIVFVCFYLKRTCVYDLHHSILGLLFAVLITGVITDSIKVATGRPRPNFYWRCFPDGKELYDALGGVVCHGKAAEVKEGHKSFPSGHTSWSFAGLTFLSLYLSGKIKAFNNEGHVAKLCLVIFPLLAACLVGISRVDDYWHHWQDVFAGALIGTLVAAFCYRQFYPNPYHEEGWGPYAYFKAAQERGVPVTSSQNGDALRAMSLQMDSTSLENMESGTSTAPR

SEQ ID NO: 1003 - protein, 250 aa, Arabidopsis thaliana
MMTDLKYPFKDNTVPIWSVPVYAVLLPIIVFVCFYLKRTCVYDLHHSILGLLFAVLITGVITDSIKVATGRPRPNFYWRCFPDGKELYDALGGVVCHGKAAEVKEGHKSFPSGHTSWSFAGLTFLSLYLSGKIKAFNNEGHVAKLCLVIFPLLAACLVGISRVDDYWHHWQDVFAGALIGTLVAAFCYRQFYPNPYHEEGWGPYAYFKAAQERGVPVTSSQNGDALRAMSLQMDSTSLENMESGTSTAPR

SEQ ID NO: 1004 - DNA, 1624 bp, Arabidopsis thaliana
attcgtgtcggaactttagatccgatatttatagaaagcaaccaaactccggctccggttactcgggagttcaagttttggattttgatgggtcatgctcgaactcgtaccggtatcatctccgtcgcttttaaattcttcaggtctctgttccctcgccatcaccgtactaacagcatgaagataaaaacaggaacgtttttgggggtttcgatatcattgattcttataaacttagctgcgatcatggaacgtgcagacgagaatctattgccttcggtttataaagaagtgagtgaagcatttaacgcaggaccatcagatttaggctacttaacattcgttagaaactttgttcaaggacttgcatcaccattagcaggagttcttgtcattacctatgatcgtcccattgttcttgcaataggtactttctgttgggctttatcaactgctgcagttggagccagcagctacttcattcaggttgctttatggagagcagtgaatggttttggattggcaattgttatacccgcgcttcaatcgtttattgcagatagttataaggatggtgcgagaggagctggtttcggaatgttgaacctcattggtacaatcggtggtataggaggaggtgttgtagcaactgttatggctggttcagagttttggggcataccgggatggcgttgtgcttttataatgatggcagcgctcagcgcagtgatcggattacttgtctttctcttcgttgttgacccgagaaagaacattgaacgagaggaactaatggctcataagatgaattcgaactcggtttggaatgattcattagcagctgcaaaatctgtcgtcaaagtaagtacctttcagataatcgtcgcgcaaggaatcattggttcgtttccgtggaccgcgatggttttctttacaatgtggtttgagcttattggcttcgatcataaccagactgcagctttgcttggggtatttgctacaggaggagcgataggaacattaatgggagggataatagcggataaaatgtcgcggatatatccgaattcgggtagagtgatgtgtgcgcagttcagtgcattcatgggaatcccattctctattattcttctgaaagtaatcccacaaagcacaagcagctactcaatcttctcgataactctcttcctgatgggtcttaccataacttggtgcggatcagcggtcaatgcaccaatgtttgcagaagtcgttcctccaaggcaccgtacaatgatctacgcgtttgaccgtgctttcgaagggtcattctcatcttttgctgcgcctttggttggaattttgtcagagaaactgtttgggtatgactcaagaggtattgatcctttgaaaggttcctctgttcgtgaggctgatgccctttcaaaggggcttctgtcaatgatggctgttccgtttgggctctgttgtctctgttacactccgttgcattttgttttccagaaagatcgagaaaacgcgaaaatcgcgagctctaaagaaactgaaatgatctgagagacttgctcatgtagtcatgttgtgattctttttataccacaaacgattttaaaaccactatgtg

SEQ ID NO: 1005 - protein, 518 aa, Arabidopsis thaliana
IRVGTLDPIFIESNQTPAPVTREFKFWILMGHARTRTGIISVAFKFFRSLFPRHHRTNSMKIKTGTFLGVSISLILINLAAIMERADENLLPSVYKEVSEAFNAGPSDLGYLTFVRNFVQGLASPLAGVLVITYDRPIVLAIGTFCWALSTAAVGASSYFIQVALWRAVNGFGLAIVIPALQSFIADSYKDGARGAGFGMLNLIGTIGGIGGGVVATVMAGSEFWGIPGWRCAFIMMAALSAVIGLLVFLFVVDPRKNIEREELMAHKMNSNSVWNDSLAAAKSVVKVSTFQIIVAQGIIGSFPWTAMVFFTMWFELIGFDHNQTAALLGVFATGGAIGTLMGGIIADKMSRIYPNSGRVMCAQFSAFMGIPFSIILLKVIPQSTSSYSIFSITLFLMGLTITWCGSAVNAPMFAEVVPPRHRTMIYAFDRAFEGSFSSFAAPLVGILSEKLFGYDSRGIDPLKGSSVREADALSKGLLSMMAVPFGLCCLCYTPLHFVFQKDRENAKIASSKETEMI

SEQ ID NO: 1006 - protein, 489 aa, Arabidopsis thaliana
MGHARTRTGIISVAFKFFRSLFPRHHRTNSMKIKTGTFLGVSISLILINLAAIMERADENLLPSVYKEVSEAFNAGPSDLGYLTFVRNFVQGLASPLAGVLVITYDRPIVLAIGTFCWALSTAAVGASSYFIQVALWRAVNGFGLAIVIPALQSFIADSYKDGARGAGFGMLNLIGTIGGIGGGVVATVMAGSEFWGIPGWRCAFIMMAALSAVIGLLVFLFVVDPRKNIEREELMAHKMNSNSVWNDSLAAAKSVVKVSTFQIIVAQGIIGSFPWTAMVFFTMWFELIGFDHNQTAALLGVFATGGAIGTLMGGIIADKMSRIYPNSGRVMCAQFSAFMGIPFSIILLKVIPQSTSSYSIFSITLFLMGLTITWCGSAVNAPMFAEVVPPRHRTMIYAFDRAFEGSFSSFAAPLVGILSEKLFGYDSRGIDPLKGSSVREADALSKGLLSMMAVPFGLCCLCYTPLHFVFQKDRENAKIASSKETEMI

SEQ ID NO: 1007 - protein, 459 aa, Arabidopsis thaliana
MKIKTGTFLGVSISLILINLAAIMERADENLLPSVYKEVSEAFNAGPSDLGYLTFVRNFVQGLASPLAGVLVITYDRPIVLAIGTFCWALSTAAVGASSYFIQVALWRAVNGFGLAIVIPALQSFIADSYKDGARGAGFGMLNLIGTIGGIGGGVVATVMAGSEFWGIPGWRCAFIMMAALSAVIGLLVFLFVVDPRKNIEREELMAHKMNSNSVWNDSLAAAKSVVKVSTFQIIVAQGIIGSFPWTAMVFFTMWFELIGFDHNQTAALLGVFATGGAIGTLMGGIIADKMSRIYPNSGRVMCAQFSAFMGIPFSIILLKVIPQSTSSYSIFSITLFLMGLTITWCGSAVNAPMFAEVVPPRHRTMIYAFDRAFEGSFSSFAAPLVGILSEKLFGYDSRGIDPLKGSSVREADALSKGLLSMMAVPFGLCCLCYTPLHFVFQKDRENAKIASSKETEMI

SEQ ID NO: 1008 - DNA, 1430 bp, Arabidopsis thaliana
tggatgcaatgtatttgtctcgttttctcatccatttatatgattgctttcttctccacctcaccaatcactcctcctctaaacttttcttcactctcttgtctcttcaaacttcggttactccgttttagtcgacaacaatggcctctgtttcaaggaggttactgaggagagagacgatcccctgtttcagccacaccgtgaggaaactcttctccaccgttggatctccttcttttgctcagagactcagagatctccccaaagacttcccctctaccaacgccaaacgtgacgcctctctgcttattgggaaaacgcctcttgtgttcctcaacaaagtcactgaaggttgtgaagcgtatgttgcagccaaacaagaacatttccagccaacttgtagcattaaagacagaccagctatagccatgattgcagatgcagagaagaaaaaactaatcatccctggaaaaacaacactgatagagcctacttcaggaaacatgggaatcagtttggctttcatggctgctatgaaagggtacaggattataatgacgatgccttcgtacactagcttggagaggagagtgacgatgagatcctttggtgctgagcttgttctcactgatccagccaaaggaatgggtggaactgttaagaaagcttatgacctccttgatagtactcctgatgctttcatgtgtcaacagtttgctaatcctgcaaacactcagattcattttgatacaactggtcctgagatttgggaagatacacttggaaatgttgatatatttgtgatgggaattggcagtggaggcacagtctctggtgttggccgataccttaaatctaaaaaccccaatgtcaagatatatggagtggagcctgctgaaagcaacatactcaacggtggcaaaccaggtccacatgctatcacaggcaatggtgttggattcaaaccagaaatcttggatatggatgttatggagagtgttcttgaggttagtagtgaggatgctataaagatggctagagaattggcattgaaagaaggtctcatggttgggatatcgtcgggagctaacaccgtggcagcaattagactggcgaaaatgccagagaataaaggcaaactcattgtgacaattcatgcgagcttcggagaaagatatctgtcgtctgttctgtttgatgagctgaggaaagaagcagaggagatgaagccagtttcagtggattgatgaaggaagactgacactttaccaaaaatctcgggagcaaaagattataaaaagaaagatgtaagagtaataagtttgtgtttatattgttctattgttgatgtataatataatcacagtattgttgatgttgatcttggatattgaagatccaactaaataaagttcatcattttctgtttc

SEQ ID NO: 1009 - protein, 368 aa, Arabidopsis thaliana
MASVSRRLLRRETIPCFSHTVRKLFSTVGSPSFAQRLRDLPKDFPSTNAKRDASLLIGKTPLVFLNKVTEGCEAYVAAKQEHFQPTCSIKDRPAIAMIADAEKKKLIIPGKTTLIEPTSGNMGISLAFMAAMKGYRIIMTMPSYTSLERRVTMRSFGAELVLTDPAKGMGGTVKKAYDLLDSTPDAFMCQQFANPANTQIHFDTTGPEIWEDTLGNVDIFVMGIGSGGTVSGVGRYLKSKNPNVKIYGVEPAESNILNGGKPGPHAITGNGVGFKPEILDMDVMESVLEVSSEDAIKMARELALKEGLMVGISSGANTVAAIRLAKMPENKGKLIVTIHASFGERYLSSVLFDELRKEAEEMKPVSVD

SEQ ID NO: 1010 - protein, 272 aa, Arabidopsis thaliana
MIADAEKKKLIIPGKTTLIEPTSGNMGISLAFMAAMKGYRIIMTMPSYTSLERRVTMRSFGAELVLTDPAKGMGGTVKKAYDLLDSTPDAFMCQQFANPANTQIHFDTTGPEIWEDTLGNVDIFVMGIGSGGTVSGVGRYLKSKNPNVKIYGVEPAESNILNGGKPGPHAITGNGVGFKPEILDMDVMESVLEVSSEDAIKMARELALKEGLMVGISSGANTVAAIRLAKMPENKGKLIVTIHASFGERYLSSVLFDELRKEAEEMKPVSVD

SEQ ID NO: 1011 - protein, 247 aa, Arabidopsis thaliana
MGISLAFMAAMKGYRIIMTMPSYTSLERRVTMRSFGAELVLTDPAKGMGGTVKKAYDLLDSTPDAFMCQQFANPANTQIHFDTTGPEIWEDTLGNVDIFVMGIGSGGTVSGVGRYLKSKNPNVKIYGVEPAESNILNGGKPGPHAITGNGVGFKPEILDMDVMESVLEVSSEDAIKMARELALKEGLMVGISSGANTVAAIRLAKMPENKGKLIVTIHASFGERYLSSVLFDELRKEAEEMKPVSVD

SEQ ID NO: 1012 - DNA, 1106 bp, Arabidopsis thaliana
catcttcttccttcaattttagttttatattaccaaaagaaaaaaaccttatcccttctctctctctttcttctttcctctattgtctgccatggcgatttctactattctctgagtctgtgatcttaaagatttgatgagacagaaacccagaaactgaaaaacaaaaacccaactcgtgatatttcgttccgaccaaatctgtctgatttgtgatctgaacaaagtacggtaatggagttgatggctaaaccaaccttctccatcgaagtctctcaatacggaaccaccgatctaccggcgacggagaaagcttcctcttcctcttcctctttcgagacaacaaacgaagaaggagtagaggaatctggtctaagtcggatctggtcaggacaaacggcggattactcatcggatagttcatcaatcggaactccgggagatagcgaagaagacgaagaagaaagcgaaaacgaaaacgatgacgtttcatctaaggagctagggcttcgagggttagcttcaatgagctctcttgaagattctctaccctcaaagagagggttatcgaatcattacaaagggaaatcaaaatcatttgggaatttaggagagattggaagtgttaaagaagtagcgaaacaagagaatccattgaataaaagaagaagattacagatctgtaataaattagcaagaaaatcgttttattcatggcaaaaccctaaatctatgcctctgttaccagtaaacgaagatgaagacgatgatgatgaagatgacgatgaagaagatctgaaatctgggtttgatgagaataaatcatcgagtgatgaagaaggagtgaagaaagttgttgtaaggaaaggatctttcaagaacagagcttataagtctaggagttgttttgcactttcagatctgattgaggaagaagatgatgatgatgatcaataattgctttgatgaaattgaatttttttttctttgttcataagtttttttttttcgtttctgaaaaaaaatataattttagtttttcgttgcgcgaattaatgtttaattttttgtgcttttaattcgggaaaattaatgatatttttttt

SEQ ID NO: 1013 - protein, 240 aa, Arabidopsis thaliana
MELMAKPTFSIEVSQYGTTDLPATEKASSSSSSFETTNEEGVEESGLSRIWSGQTADYSSDSSSIGTPGDSEEDEEESENENDDVSSKELGLRGLASMSSLEDSLPSKRGLSNHYKGKSKSFGNLGEIGSVKEVAKQENPLNKRRRLQICNKLARKSFYSWQNPKSMPLLPVNEDEDDDDEDDDEEDLKSGFDENKSSSDEEGVKKVVVRKGSFKNRAYKSRSCFALSDLIEEEDDDDDQ

SEQ ID NO: 1014 - protein, 237 aa, Arabidopsis thaliana
MAKPTFSIEVSQYGTTDLPATEKASSSSSSFETTNEEGVEESGLSRIWSGQTADYSSDSSSIGTPGDSEEDEEESENENDDVSSKELGLRGLASMSSLEDSLPSKRGLSNHYKGKSKSFGNLGEIGSVKEVAKQENPLNKRRRLQICNKLARKSFYSWQNPKSMPLLPVNEDEDDDDEDDDEEDLKSGFDENKSSSDEEGVKKVVVRKGSFKNRAYKSRSCFALSDLIEEEDDDDDQ

SEQ ID NO: 1015 - protein, 143 aa, Arabidopsis thaliana
MSSLEDSLPSKRGLSNHYKGKSKSFGNLGEIGSVKEVAKQENPLNKRRRLQICNKLARKSFYSWQNPKSMPLLPVNEDEDDDDEDDDEEDLKSGFDENKSSSDEEGVKKVVVRKGSFKNRAYKSRSCFALSDLIEEEDDDDDQ

SEQ ID NO: 1016 - DNA, 1667 bp, Arabidopsis thaliana
aagcaaagtaaaacctaaaaaaaaaaaaagaccgtaagtagttacaagggtggaagtataaaggagcagtcttttcttcttctttcaaccccacggcgcagatcctacgagtttggtctttgtctctatcttttcaatctttctctctcaatcgctcttcaatttgataacagcaaagtcatggcaggaatggcatctgatggaactcaatatgatcctcgtcagtttgatactaagatgaatgccattctcggcgaggaaggagaggaaacattctacactaactatgacgaagtttgcgacagctttgatgcaatggaattgcaaccagatcttctcaggggtatttatgcttacggtttcgagaagccttctgctattcagcaaagaggaattattccattctgcaagggtcttgatgtgatccagcaagctcaatctggaactggaaagaccgctaccttttgctctggtgttttacagcagctcgatattagtttggttcaatgccaagctcttgttttggcacctacccgagaacttgcccagcaaattgaaaaggttatgagggcacttggtgactaccttggcgtcaaggctcaggcttgtgttggtggaacaagtgttcgtgaggatcaacgtgttcttcagtctggtgttcatgttgttgttggaacccctggtcgtgtctttgacttgttacgcagacaatccctccgtgctgatgcaatcaaaatgtttgttcttgatgaagctgatgaaatgctctctcgtggtttcaaggatcagatatacgacatcttccagcttcttccttccaaggttcaggttggtgttttctctgctacaatgcctcccgaagcccttgagatcacaaggaagttcatgaacaaaccagtcaggattctggtcaagcgagacgagctgactcttgaaggtatcaagcagttttatgtcaatgtagacaaggaagagtggaaactcgagacactatgcgatctctacgagacactggccatcactcaaagcgtcatctttgtgaacacaaggcgtaaggttgattggctaaccgacaaaatgagaagccgtgaccacactgtttcagctacacacggagacatggaccagaacacaagagacatcatcatgcgcgaattccgctctgggtcttcccgtgtcctcataaccactgacctccttgctcgtggtatcgatgttcagcaagtctctctggtcataaactttgacctcccaacccaaccggagaattaccttcatcgtattggaagaagtggaaggtttgggagaaagggagtagcaatcaatttcatgacatcggaggatgagagaatgatggctgatattcagaggttttacaatgtggtcgttgaggagttgccaagcaatgttgctgatcttctctgaagcctttcttttttctgttttttactgagaaagtgctgtgtttacccctttttttggcagcttctctatgctttgatttttgttttcaggctactacttagatttatagttcttggctaaaagcgaacataactcattacatgattttgcttttttggcaatcaagaatttcggcattatttatctttttgtgaacgtggcttacaaggaaggatactctatgagactaaagacttttctct

SEQ ID NO: 1017 - protein, 414 aa, Arabidopsis thaliana
MAGMASDGTQYDPRQFDTKMNAILGEEGEETFYTNYDEVCDSFDAMELQPDLLRGIYAYGFEKPSAIQQRGIIPFCKGLDVIQQAQSGTGKTATFCSGVLQQLDISLVQCQALVLAPTRELAQQIEKVMRALGDYLGVKAQACVGGTSVREDQRVLQSGVHVVVGTPGRVFDLLRRQSLRADAIKMFVLDEADEMLSRGFKDQIYDIFQLLPSKVQVGVFSATMPPEALEITRKFMNKPVRILVKRDELTLEGIKQFYVNVDKEEWKLETLCDLYETLAITQSVIFVNTRRKVDWLTDKMRSRDHTVSATHGDMDQNTRDIIMREFRSGSSRVLITTDLLARGIDVQQVSLVINFDLPTQPENYLHRIGRSGRFGRKGVAINFMTSEDERMMADIQRFYNVVVEELPSNVADLL

SEQ ID NO: 1018 - protein, 411 aa, Arabidopsis thaliana
MASDGTQYDPRQFDTKMNAILGEEGEETFYTNYDEVCDSFDAMELQPDLLRGIYAYGFEKPSAIQQRGIIPFCKGLDVIQQAQSGTGKTATFCSGVLQQLDISLVQCQALVLAPTRELAQQIEKVMRALGDYLGVKAQACVGGTSVREDQRVLQSGVHVVVGTPGRVFDLLRRQSLRADAIKMFVLDEADEMLSRGFKDQIYDIFQLLPSKVQVGVFSATMPPEALEITRKFMNKPVRILVKRDELTLEGIKQFYVNVDKEEWKLETLCDLYETLAITQSVIFVNTRRKVDWLTDKMRSRDHTVSATHGDMDQNTRDIIMREFRSGSSRVLITTDLLARGIDVQQVSLVINFDLPTQPENYLHRIGRSGRFGRKGVAINFMTSEDERMMADIQRFYNVVVEELPSNVADLL

SEQ ID NO: 1019 - protein, 395 aa, Arabidopsis thaliana
MNAILGEEGEETFYTNYDEVCDSFDAMELQPDLLRGIYAYGFEKPSAIQQRGIIPFCKGLDVIQQAQSGTGKTATFCSGVLQQLDISLVQCQALVLAPTRELAQQIEKVMRALGDYLGVKAQACVGGTSVREDQRVLQSGVHVVVGTPGRVFDLLRRQSLRADAIKMFVLDEADEMLSRGFKDQIYDIFQLLPSKVQVGVFSATMPPEALEITRKFMNKPVRILVKRDELTLEGIKQFYVNVDKEEWKLETLCDLYETLAITQSVIFVNTRRKVDWLTDKMRSRDHTVSATHGDMDQNTRDIIMREFRSGSSRVLITTDLLARGIDVQQVSLVINFDLPTQPENYLHRIGRSGRFGRKGVAINFMTSEDERMMADIQRFYNVVVEELPSNVADLL

SEQ ID NO: 1020 - DNA, 1511 bp, Arabidopsis thaliana
tgaatcgggaatctgattcatatgtttggggtttaatagtctcagctcaaataaatctaggttaaactgtgtggatcgattcatatattctccgtcaaaaccaaaaccaaaccgatttgtcataattttttcttatcatccactttcattggctagagggacattgtaacggtgtcgtcgtcgccaaacgatttgcctcttcctaaaggagattctttcctacataggaattgagtttaaggtggaattcttctgttattttgttgttgcacgaaaatggaggacattgagaacatagaagaagatgagtatgggttttcaagaaactacttcttggcaaaagaattgggtggggcgagtaagcgttctgcccacaagctctctgatatacatattgttgatgagcaggagcttagagaaacggcttctacaattgaaatgaagcactcgaaagagatatctgagcttatgagtgattacaagactatgtactcaaagtgggtctttgagctcaggtgtggctttggccttctaatgtatggctttggatctaagaaagctttagttgaagattttgcttctgcttctttgactgactattctgttgtggtcatcaatggctacctcccttccgtaaatctaaagcaggttcttttggcattagctgaacttctatccgagcttttgaaatgtaaaagaaagagttccgggagtttgtctaaaggtcaagaaacatttccttcacgctccatggatgatattctttcctttctacatggtccacagtctggagataaagactgcttcatatgcgttgttgttcataacattgacggccctgctctaagagatcccgaatcacaacaaactcttgcccggctttcttcttgttcacacatacgcttggttgcctctattgaccatgtcaacgctccattattgtgggacaagaaaatggtgcacaaacagtttaactggctatggcaccatgttccaacatttgcaccatacaatgtcgaaggtgtattcttcccgttggttcttgcacagggaagcacagcccaaaccgccaaaacagcagccattgttttacagagtttaacaccaaacggtcagaatgtcttcaagattcttgctgagtaccaactttcacacccagatgaagatgggatgcccactgatgatctgtattcagcgtctcgggaacgcttctttgtgagcagtcaagtgactttaaactctcatctcacggaatttaaagaccacgaactggttaagaccaagagaaactccgatggtcaagagtgtttgaatataccgctcacttcggatgcaattcgacagcttttgcttgatctcaatcagtagcctgaaattgtatttctgatatgattcatttttattgcttgaacgagttattatagttcacacagtttacatgtttaattgaatgttatagtcagcactcacagctcttattatataatcatggtgtggtagtactatcagag

SEQ ID NO: 1021 - protein, 363 aa, Arabidopsis thaliana
MEDIENIEEDEYGFSRNYFLAKELGGASKRSAHKLSDIHIVDEQELRETASTIEMKHSKEISELMSDYKTMYSKWVFELRCGFGLLMYGFGSKKALVEDFASASLTDYSVVVINGYLPSVNLKQVLLALAELLSELLKCKRKSSGSLSKGQETFPSRSMDDILSFLHGPQSGDKDCFICVVVHNIDGPALRDPESQQTLARLSSCSHIRLVASIDHVNAPLLWDKKMVHKQFNWLWHHVPTFAPYNVEGVFFPLVLAQGSTAQTAKTAAIVLQSLTPNGQNVFKILAEYQLSHPDEDGMPTDDLYSASRERFFVSSQVTLNSHLTEFKDHELVKTKRNSDGQECLNIPLTSDAIRQLLLDLNQ

SEQ ID NO: 1022 - protein, 309 aa, Arabidopsis thaliana
MKHSKEISELMSDYKTMYSKWVFELRCGFGLLMYGFGSKKALVEDFASASLTDYSVVVINGYLPSVNLKQVLLALAELLSELLKCKRKSSGSLSKGQETFPSRSMDDILSFLHGPQSGDKDCFICVVVHNIDGPALRDPESQQTLARLSSCSHIRLVASIDHVNAPLLWDKKMVHKQFNWLWHHVPTFAPYNVEGVFFPLVLAQGSTAQTAKTAAIVLQSLTPNGQNVFKILAEYQLSHPDEDGMPTDDLYSASRERFFVSSQVTLNSHLTEFKDHELVKTKRNSDGQECLNIPLTSDAIRQLLLDLNQ

SEQ ID NO: 1023 - protein, 299 aa, Arabidopsis thaliana
MSDYKTMYSKWVFELRCGFGLLMYGFGSKKALVEDFASASLTDYSVVVINGYLPSVNLKQVLLALAELLSELLKCKRKSSGSLSKGQETFPSRSMDDILSFLHGPQSGDKDCFICVVVHNIDGPALRDPESQQTLARLSSCSHIRLVASIDHVNAPLLWDKKMVHKQFNWLWHHVPTFAPYNVEGVFFPLVLAQGSTAQTAKTAAIVLQSLTPNGQNVFKILAEYQLSHPDEDGMPTDDLYSASRERFFVSSQVTLNSHLTEFKDHELVKTKRNSDGQECLNIPLTSDAIRQLLLDLNQ

SEQ ID NO: 1024 - DNA, 1476 bp, Arabidopsis thaliana
aaaaagttgcgaagctctctcattgagtaaactaacggctatattctctctgatattcaaaatttgctcgaagaaacgacgatggcagccgaaacgaaggttcaggtttcagatccagaggcagagtttcttaattcgaagcaggagactggatacgagtgggagcttttcaaggagaacgtccggccattgaagagaggtcgcaatgttggtattctcaaccacgctctcaaatctcactctgaccaccaattgagaaagaatctcatcgagaaacgcaggaatttgattgaagccattgatgagtatgaaggagatgaccctttatctccatggatagagtgtataaaatgggtacaagaggcttttccaccaggaggagaatgttcaggactgttagtgatatatgagcaatgtgttcgtaaattttggcactctgaacgttacaaggatgatcttcgttatcttaaagtctggttggaatatgcggagcattgcgctgatgcggaagtgatttacaagtttttggaggtcaatgagattggaaagacacatgctgtctactatatagcttatgctttgcacattgagtttaagaataaggtcaaaactgctaatgagatcttcaatcttggaatctctagggatgcaaagccagtggaaaagttgaatgacgcgtacaagaagtttatggtgagaacgatgagaaggtccaacacagctgatgaagaaccaaaggagaataatgacttaccgtcaagaagctttggcactttattgtccaggggagataataatgcaagaaggcaggcgttaggaagttctaacccacaagccaaaaagctaaagccaaatcaatcatccaagacaccttttgctatctacgcagatgcagtttcagacaccacatcagggaatcaaccagagtcagacaagtcaagaccagagtttggtagttggctcatgcttggaggcagagcagagaggaacaaagaaaacaattctttacctagaaaatgggcatcattcaaggttcctcagaaacccattgtgagaactgttgcagcagcatctgctttcacctttgaggtttttgtcgatgaagaagaatgtacagaagaggaagaagaaaagaagaagaatgatgaaactatctcatcatcatcaaacgttctgccccttaatggcggccgtgagataaaaaaagaaacagagctgctacgacagaaccctttaagacatttcccacccaacagcttcctacgatgatgatattggactttcttctctacacgatcttatggtttgagatttgagcttttgtctataaagctccttgtgtgtttttgcctatttggatttgtttttgtgatgtactgggatatactatcctactatgtaccatgatgtgcctttcatgttttgaaattaatgtgacttgtcttgtttcaatccttatatgatttgtttctcctg

SEQ ID NO: 1025 - protein, 395 aa, Arabidopsis thaliana
MAAETKVQVSDPEAEFLNSKQETGYEWELFKENVRPLKRGRNVGILNHALKSHSDHQLRKNLIEKRRNLIEAIDEYEGDDPLSPWIECIKWVQEAFPPGGECSGLLVIYEQCVRKFWHSERYKDDLRYLKVWLEYAEHCADAEVIYKFLEVNEIGKTHAVYYIAYALHIEFKNKVKTANEIFNLGISRDAKPVEKLNDAYKKFMVRTMRRSNTADEEPKENNDLPSRSFGTLLSRGDNNARRQALGSSNPQAKKLKPNQSSKTPFAIYADAVSDTTSGNQPESDKSRPEFGSWLMLGGRAERNKENNSLPRKWASFKVPQKPIVRTVAAASAFTFEVFVDEEECTEEEEEKKKNDETISSSSNVLPLNGGREIKKETELLRQNPLRHFPPNSFLR

SEQ ID NO: 1026 - DNA, 1284 bp, Arabidopsis thaliana
aaaagccaatctgatctttgtccaaacacagaccatcatcactcatttcctacagaactcagcacaattctttcaaattctctttctaatcttcaatggaatcagaaaccctaaccgccaaggctacgatcacgaccacgaccctaccgagtcacgacgagaccaagacagaatcaacagagttcgagaaaaatcaaaaacggtatcaagacctcatctccacgtttcctcacgagaaaggctggagaccgaaagagcccctgatcgagtatggtggttactggtggctaccgtctctcctcgaaggttgtattcacgcgcaagagttctttcaagcacgacccagtgacttcctcgtctgtagctacccaaagacaggcaccacttggctcaaagccctgactttcgccatcgcaaatcgttcccgcttcgatgattcctccaaccctctcctgaaacgtaaccctcacgagtttgttccttacattgagatagatttccctttcttccctgaagttgatgttctcaaagacaaagggaacactctgttttcgactcatatcccatacgagttattacctgattcggttgtgaaatccggttgtaagatggtttacatatggagagaaccaaaggacactttcatctccatgtggactttccttcacaaggaaaggacagagcttggacctgtcagcaatcttgaggagtcttttgatatgttctgtcgtggtctgtctgggtatggtccttatcttaatcatatcctggcgtattggaaagcataccaagagaatccagataggatcttgttcctcaagtacgagacgatgagagctgatcctttaccgtacgtgaagagtctggctgagtttatgggtcatggattcacagccgaggaagaggagaaaggtgttgttgagaaagtggtgaatctttgcagcttcgagacgttgaagaatcttgaagctaacaaaggggagaaagacagagaggatcgtcctggtgtttacgcgaatagcgcgtatttcaggaaaggaaaggtgggagattggtcgaactatctgactccggagatggctgctcgtatagatgggttaatggaagagaaatttaagggcaccggcttgcttgaacatggtaaatgaatgactaactcttgttccgagcaatgactgatctttatatgctttgtttacaacataagtttgcttcttatgttagtatggctccaatgtattaagttatatagtggaagaataaatgttgcttgtgtttctatcc

SEQ ID NO: 1027 - protein, 350 aa, Arabidopsis thaliana
MESETLTAKATITTTTLPSHDETKTESTEFEKNQKRYQDLISTFPHEKGWRPKEPLIEYGGYWWLPSLLEGCIHAQEFFQARPSDFLVCSYPKTGTTWLKALTFAIANRSRFDDSSNPLLKRNPHEFVPYIEIDFPFFPEVDVLKDKGNTLFSTHIPYELLPDSVVKSGCKMVYIWREPKDTFISMWTFLHKERTELGPVSNLEESFDMFCRGLSGYGPYLNHILAYWKAYQENPDRILFLKYETMRADPLPYVKSLAEFMGHGFTAEEEEKGVVEKVVNLCSFETLKNLEANKGEKDREDRPGVYANSAYFRKGKVGDWSNYLTPEMAARIDGLMEEKFKGTGLLEHGK

SEQ ID NO: 1028 - protein, 179 aa, Arabidopsis thaliana
MVYIWREPKDTFISMWTFLHKERTELGPVSNLEESFDMFCRGLSGYGPYLNHILAYWKAYQENPDRILFLKYETMRADPLPYVKSLAEFMGHGFTAEEEEKGVVEKVVNLCSFETLKNLEANKGEKDREDRPGVYANSAYFRKGKVGDWSNYLTPEMAARIDGLMEEKFKGTGLLEHGK

SEQ ID NO: 1029 - DNA, 1294 bp, Arabidopsis thaliana
tggtcttacgagagaccaaaacgatggagagcacgaagattgctccttcattcgatcgtgccagtgagcttaaagctttcgatgagacgaagactggtgtgaaaggactcgttgactctggaatctcaaagattccacgcattttccatcactcatctgtcgaactagcaaaccctaaaccacttccctcggacctgctacatctcaagacgatcccaacgatcgatctcggaggacgggacttccaggacgcgattaagcacaagaacgcgattgaagggattaaagaagcagctgccaagtggggtttcttccaagtgatcaaccatggagtttcgctcgagcttcttgagaagatgaaagatggagttcgtgactttcatgagcaacctcctgaagtgaggaaagatttgtacagccgcgatttcggcagaaagtttatctatttaagtaatttcgatctctacactgctgcagctgcgaattggagagacacattctattgttacatggctccagatcctccagaaccacaggatctgccagagatttgtagggatgttatgatggaatactcaaagcaagtgatgattttgggtgaatttctgtttgagcttttgtcagaagcactagggttgaaccctaatcacctcaaggacatggagtgcttaaagggtttgcgcatgctttgccactacttcccaccgtgtccggagcctgacctaacttttggcacaagtaagcactccgacggctcttttcttaccgtccttctaccagataacatagaagggcttcaggtttgtcgtgagggatactggttcgatgttcctcatgttcccggcgctctcatcatcaacatcggagatcttctgcagcttataacaaacgacaagttcatcagtttgaagcatagagtattggcgaacagagccacaagagctcgagtctctgtcgcatgtttcttccatacccacgtaaaaccaaatcctagagtgtacggacccattaaagagcttgtgtccgaagaaaatcctccaaagtacagagagaccaccatcagagattacgctacttacttcaatggcaaaggacttggcgggacctctgctttgctggattttaaagtatgaatcatgccgagctactactttctcacagatatacgacatgacattatatgtaacatgttggagatgtgtgaaccaaatgtggaatttatgtattgaacattgtcatcaaggtttggtccaaataaagtgtaatcggatatggttaatcaattggattacgc

SEQ ID NO: 1030 - protein, 376 aa, Arabidopsis thaliana
VLRETKTMESTKIAPSFDRASELKAFDETKTGVKGLVDSGISKIPRIFHHSSVELANPKPLPSDLLHLKTIPTIDLGGRDFQDAIKHKNAIEGIKEAAAKWGFFQVINHGVSLELLEKMKDGVRDFHEQPPEVRKDLYSRDFGRKFIYLSNFDLYTAAAANWRDTFYCYMAPDPPEPQDLPEICRDVMMEYSKQVMILGEFLFELLSEALGLNPNHLKDMECLKGLRMLCHYFPPCPEPDLTFGTSKHSDGSFLTVLLPDNIEGLQVCREGYWFDVPHVPGALIINIGDLLQLITNDKFISLKHRVLANRATRARVSVACFFHTHVKPNPRVYGPIKELVSEENPPKYRETTIRDYATYFNGKGLGGTSALLDFKV

SEQ ID NO: 1031 - protein, 369 aa, Arabidopsis thaliana
MESTKIAPSFDRASELKAFDETKTGVKGLVDSGISKIPRIFHHSSVELANPKPLPSDLLHLKTIPTIDLGGRDFQDAIKHKNAIEGIKEAAAKWGFFQVINHGVSLELLEKMKDGVRDFHEQPPEVRKDLYSRDFGRKFIYLSNFDLYTAAAANWRDTFYCYMAPDPPEPQDLPEICRDVMMEYSKQVMILGEFLFELLSEALGLNPNHLKDMECLKGLRMLCHYFPPCPEPDLTFGTSKHSDGSFLTVLLPDNIEGLQVCREGYWFDVPHVPGALIINIGDLLQLITNDKFISLKHRVLANRATRARVSVACFFHTHVKPNPRVYGPIKELVSEENPPKYRETTIRDYATYFNGKGLGGTSALLDFKV

SEQ ID NO: 1032 - protein, 258 aa, Arabidopsis thaliana
MKDGVRDFHEQPPEVRKDLYSRDFGRKFIYLSNFDLYTAAAANWRDTFYCYMAPDPPEPQDLPEICRDVMMEYSKQVMILGEFLFELLSEALGLNPNHLKDMECLKGLRMLCHYFPPCPEPDLTFGTSKHSDGSFLTVLLPDNIEGLQVCREGYWFDVPHVPGALIINIGDLLQLITNDKFISLKHRVLANRATRARVSVACFFHTHVKPNPRVYGPIKELVSEENPPKYRETTIRDYATYFNGKGLGGTSALLDFKV

SEQ ID NO: 1033 - DNA, 1429 bp, Arabidopsis thaliana
atcatcatcatcatcttcttcaaccttgtctcgatccaaaatttcatcttttaccaaaactattacaatatccctcactctacttgtaaagcttcaatcttcttcacttctcaacaaacagataaacaaaaagcttcaatctttgatactttctcgatggaacttatccccaatcttcccgacgacgttgctcgcgagtgtctccttcgctcctcctaccaacagttccctgtcatcgcctccgtttgcagagcctggaaccgtgaagtctctctctctcagtttttacatcagcgaaaagcttcacgccatagccaagagcttcttattctgtctcaggctcgtgtcgaccccgctggatccggaaagatcatcgctacgcctgaataccggatctctgttctcgaatccgggtcgggtctttggacggagcttcctccgattcctggtcaaaccaaaggacttcctctgttctgcagattggtttccgttggatccgatcttattgtcttgggtgggcttgacccgattacgtggcaggcccatgattcggtattcgtcttcagttttctcacttccaaatggcgcgtgggggcaaccatgccaggtgtacggaggtccttcttcggatgcgcttcggattcggatcggacggtgctggttgcgggtggacacaacgaagagaaatgtgcgcttacgtcagctatggtgtatgacgtgtcagaagacaagtggacgtttttgccggatatggcgcgggaacgagacgagtgcaaagcggtattccatgctggcagattccacgtcatcggtggatatgccactgaggaacaggggcagtttagtaaaacagccgaatcgttcgatgtgtctacgtgggagtggggtccacttacggaggacttcctcgacgacaccggcgataccgttagccctccgacctgcgtcgccggtggggatttgtacgcgtgctggggtggcgatgtgatgatgtttctaaatgacaagtggcaaaaggtgggccagatccctgctgatgtgtacaatgttacttacgtagcggtgaggcccgggatgctgattgtgatcggcaacgggaaggcgttggctggatacggtgaagccaccgtagggtatatatgtgatttaagtagctcacgatgggtaaaattggaaacacacggtggtcatgttcaagctggctgcttcttggaggtctaatggaaaacctattcatctttggagtttgaacctaaaccgcaacaaaccaatgggtagtctcgtgtgtcaatctacaaatcttttcatgaacaacaaaataaagaaatattgtatttattcagtgtcactttaccaaatatttatgttctctatacaaaacttcaaaaggaagatttgaacttttaggttctctatacaaaactgatcc

SEQ ID NO: 1034 - protein, 406 aa, Arabidopsis thaliana
IIIIIFFNLVSIQNFIFYQNYYNIPHSTCKASIFFTSQQTDKQKASIFDTFSMELIPNLPDDVARECLLRSSYQQFPVIASVCRAWNREVSLSQFLHQRKASRHSQELLILSQARVDPAGSGKIIATPEYRISVLESGSGLWTELPPIPGQTKGLPLFCRLVSVGSDLIVLGGLDPITWQAHDSVFVFSFLTSKWRVGATMPGVRRSFFGCASDSDRTVLVAGGHNEEKCALTSAMVYDVSEDKWTFLPDMARERDECKAVFHAGRFHVIGGYATEEQGQFSKTAESFDVSTWEWGPLTEDFLDDTGDTVSPPTCVAGGDLYACWGGDVMMFLNDKWQKVGQIPADVYNVTYVAVRPGMLIVIGNGKALAGYGEATVGYICDLSSSRWVKLETHGGHVQAGCFLEV

SEQ ID NO: 1035 - protein, 354 aa, Arabidopsis thaliana
MELIPNLPDDVARECLLRSSYQQFPVIASVCRAWNREVSLSQFLHQRKASRHSQELLILSQARVDPAGSGKIIATPEYRISVLESGSGLWTELPPIPGQTKGLPLFCRLVSVGSDLIVLGGLDPITWQAHDSVFVFSFLTSKWRVGATMPGVRRSFFGCASDSDRTVLVAGGHNEEKCALTSAMVYDVSEDKWTFLPDMARERDECKAVFHAGRFHVIGGYATEEQGQFSKTAESFDVSTWEWGPLTEDFLDDTGDTVSPPTCVAGGDLYACWGGDVMMFLNDKWQKVGQIPADVYNVTYVAVRPGMLIVIGNGKALAGYGEATVGYICDLSSSRWVKLETHGGHVQAGCFLEV

SEQ ID NO: 1036 - protein, 328 aa, Arabidopsis thaliana
SSSSSSSTLSRSKISSFTKTITISLTLLVKLQSSSLLNKQINKKLQSLILSRWNLSPIFPTTLLASVSFAPPTNSSLSSPPFAEPGTVKSLSLSFYISEKLHAIAKSFLFCLRLVSTPLDPERSSLRLNTGSLFSNPGRVFGRSFLRFLVKPKDFLCSADWFPLDPILLSWVGLTRLRGRPMIRYSSSVFSLPNGAWGQPCQVYGGPSSDALRIRIGRCWLRVDTTKRNVRLRQLWCMTCQKTSGRFCRIWRGNETSAKRYSMLADSTSSVDMPLRNRGSLVKQPNRSMCLRGSGVHLRRTSSTTPAIPLALRPASPVGICTRAGVAM

SEQ ID NO: 1037 - DNA, 1494 bp, Arabidopsis thaliana
gtgaaaaattaattattgcccactttctctctctctctctctctgattgattcttgaaaagaaaatcaaagtctcaatagctttgttttgattctagttccattccacaattgcatctaattctcctaccgtagccttttcttctttatttgtcatcaacaactcctaaaattcatatgaaattagagaaatcgaaacgaaaagataatatttttcaagaaagagctacatatacaccttttgaccttgtaaagttggaaccctagaggcctttcaagcaaatcatcagggtaacaatttcttgatctttctttttagcgaatttccagtttttggtcaatcatggcaaacccttggtggacgaaccagagtggtttagcgggcatggtggaccattcggtctcctcaggccatcaccaaaaccatcaccaccaaagtcttcttaccaaaggagatcttggaatagccatgaatcagagccaagacaacgaccaagacgaagaagatgatcctagagaaggagccgttgaggtggtcaaccgtagaccaagaggtagaccaccaggatccaaaaacaaacccaaagctccaatctttgtgacaagagacagccccaacgcactccgtagccatgtcttggagatctccgacggcagtgacgtcgccgacacaatcgctcacttctcaagacgcaggcaacgcggcgtttgcgttctcagcgggacaggctcagtcgctaacgtcaccctccgccaagccgccgcaccaggaggtgtggtctctctccaaggcaggtttgaaatcttatctttaaccggtgctttcctccctggaccttccccacccgggtcaaccggtttaacggtttacttagccggggtccagggtcaggtcgttggaggtagcgttgtaggcccactcttagccatagggtcggtcatggtgattgctgctactttctctaacgctacttatgagagattgcccatggaagaagaggaagacggtggcggctcaagacagattcacggaggcggtgactcaccgcccagaatcggtagtaacctgcctgatctatcagggatggccgggccaggctacaatatgccgccgcatctgattccaaatggggctggtcagctagggcacgaaccatatacatgggtccacgcaagaccaccttactgactcagtgagccatttctatatataatggtctatataaataaatatatagatgaatataagcaagcaatttgaggtagtctattacaaagcttttgctctggttggaaaaataaataagtatcaaagctttgtttgttcttaatggaaatatagagcttgggaaggtagaaagagacgacattaagggactttcagattttcagtattactactccacgaaattattgaaataaataaacattgtactgtaaattagaatgtttgtctttttgtttttgtgtagtagtatttaactacaatatttgc

SEQ ID NO: 1038 - protein, 281 aa, Arabidopsis thaliana
MANPWWTNQSGLAGMVDHSVSSGHHQNHHHQSLLTKGDLGIAMNQSQDNDQDEEDDPREGAVEVVNRRPRGRPPGSKNKPKAPIFVTRDSPNALRSHVLEISDGSDVADTIAHFSRRRQRGVCVLSGTGSVANVTLRQAAAPGGVVSLQGRFEILSLTGAFLPGPSPPGSTGLTVYLAGVQGQVVGGSVVGPLLAIGSVMVIAATFSNATYERLPMEEEEDGGGSRQIHGGGDSPPRIGSNLPDLSGMAGPGYNMPPHLIPNGAGQLGHEPYTWVHARPPY

SEQ ID NO: 1039 - protein, 267 aa, Arabidopsis thaliana
MVDHSVSSGHHQNHHHQSLLTKGDLGIAMNQSQDNDQDEEDDPREGAVEVVNRRPRGRPPGSKNKPKAPIFVTRDSPNALRSHVLEISDGSDVADTIAHFSRRRQRGVCVLSGTGSVANVTLRQAAAPGGVVSLQGRFEILSLTGAFLPGPSPPGSTGLTVYLAGVQGQVVGGSVVGPLLAIGSVMVIAATFSNATYERLPMEEEEDGGGSRQIHGGGDSPPRIGSNLPDLSGMAGPGYNMPPHLIPNGAGQLGHEPYTWVHARPPY

SEQ ID NO: 1040 - protein, 239 aa, Arabidopsis thaliana
MNQSQDNDQDEEDDPREGAVEVVNRRPRGRPPGSKNKPKAPIFVTRDSPNALRSHVLEISDGSDVADTIAHFSRRRQRGVCVLSGTGSVANVTLRQAAAPGGVVSLQGRFEILSLTGAFLPGPSPPGSTGLTVYLAGVQGQVVGGSVVGPLLAIGSVMVIAATFSNATYERLPMEEEEDGGGSRQIHGGGDSPPRIGSNLPDLSGMAGPGYNMPPHLIPNGAGQLGHEPYTWVHARPPY

SEQ ID NO: 1041 - DNA, 1824 bp, Arabidopsis thaliana
ctctttatctcccaacctctcctacccagaatctgccgtcaccttttttcggtttttgcgtcttcctcaaaaattcgataacaatggtgaaacggaatcgagttccgccggcagaacaagcattacccatcgaagaagattgcaaatcgttgataaaaaagcttgcttcgtgtaagcaatcaatccgcgacagatccttgcgaactgttcttcgtacttggctcccagaacaaactgaaatctccgatgaagatatgaagaagctatggcaaggaatcttctattgtgtctggcacgctgataagtctctttaccaatcagaacttattgatcgtctctcttctgctcttcaatcacttcctcttcctttgtctatccattacttcaccgtcttcttgttcaccatgcgtcgtgagtggtctcgtattgatcggctcaggttagataagttctacctattgattcgtaggttcttgcacggtttcttctcacttattgatagcaattcatgggatttggaattcactcgtcgtttgatgggtattttgttcgacgggactttacttgctgatgataagtttcaagggaatggtgttaactatcatataacttctgcttttgttgaagagcttaggccgtttcttccattaaggaaggaggttttggaacttctttttgctccttttgtgaagattatgggtgttgttaatgataagattttggtggggaagattaagagtaatttgtttgatgagttactgaagatggggaagaagctactgataattaaacaatctggggatgatgcagtgcctgaggatgatgatgttgtggttttgggatctattgctttgtctatggagtttgcaaagaggttttatgagttgggttcttctccggagtgtcatcagggtaataggaaattgatatttgctcttcacaaggagtttttgcagttggagaaggatatgtcgagttctagtatcgaagtatctatcgtagaagcttctcgtcctggcaacgatgaagttcctgaatcggttcctgtgtctgagtctaatacaaatgttgtttctaagtctaagaagattgttgctaatgggtcttcttcaaagaagaagggtttgaagaaatgttcaaagactaaaaaagacagtgtcaagaaaggtgctgttatggatagtgttgtcgatcttggtaacaaagatgaatcctttgatgagactatgatatcagatcttcgacaggagtttgagaagattgcctctgaaatgagtccgtcaaaaagtgaggttgcaagtgtctgtgacgtggcagagcctgtgtccgtatctaaaaagaccaagaagaggaaaagagagaacaaaggggaagagcaagttagtactgttaacagagatgcagcagagacaagcttagctggcccgagcagtgagaagagctcaaagagagtaagattcgcaatgaagaacaatttggtgtggaagcctcattgccctctacctccacaagatttgaggtgtcctccgtctgctacaccaagaggaagtgctctgaagcaaggaatcccggccggtccagtgagggagttggcaagtaggaagacgaagaagaaagtgaaacccgctgctcgtagaggagtgaagtctatcaagaatttgaagaagaaattgtcgccatgaaaatggagtgtcaagtcgtttgttgctttgctgctagcttttctctaaattttcccttaaattttgttgtagtttcaattttcaatacgtatttgagattttgtttactgatttgacaattatgagaaaaattgtttgccac

SEQ ID NO: 1042 - protein, 559 aa, Arabidopsis thaliana
LYLPTSPTQNLPSPFFGFCVFLKNSITMVKRNRVPPAEQALPIEEDCKSLIKKLASCKQSIRDRSLRTVLRTWLPEQTEISDEDMKKLWQGIFYCVWHADKSLYQSELIDRLSSALQSLPLPLSIHYFTVFLFTMRREWSRIDRLRLDKFYLLIRRFLHGFFSLIDSNSWDLEFTRRLMGILFDGTLLADDKFQGNGVNYHITSAFVEELRPFLPLRKEVLELLFAPFVKIMGVVNDKILVGKIKSNLFDELLKMGKKLLIIKQSGDDAVPEDDDVVVLGSIALSMEFAKRFYELGSSPECHQGNRKLIFALHKEFLQLEKDMSSSSIEVSIVEASRPGNDEVPESVPVSESNTNVVSKSKKIVANGSSSKKKGLKKCSKTKKDSVKKGAVMDSVVDLGNKDESFDETMISDLRQEFEKIASEMSPSKSEVASVCDVAEPVSVSKKTKKRKRENKGEEQVSTVNRDAAETSLAGPSSEKSSKRVRFAMKNNLVWKPHCPLPPQDLRCPPSATPRGSALKQGIPAGPVRELASRKTKKKVKPAARRGVKSIKNLKKKLSP

SEQ ID NO: 1043 - protein, 532 aa, Arabidopsis thaliana
MVKRNRVPPAEQALPIEEDCKSLIKKLASCKQSIRDRSLRTVLRTWLPEQTEISDEDMKKLWQGIFYCVWHADKSLYQSELIDRLSSALQSLPLPLSIHYFTVFLFTMRREWSRIDRLRLDKFYLLIRRFLHGFFSLIDSNSWDLEFTRRLMGILFDGTLLADDKFQGNGVNYHITSAFVEELRPFLPLRKEVLELLFAPFVKIMGVVNDKILVGKIKSNLFDELLKMGKKLLIIKQSGDDAVPEDDDVVVLGSIALSMEFAKRFYELGSSPECHQGNRKLIFALHKEFLQLEKDMSSSSIEVSIVEASRPGNDEVPESVPVSESNTNVVSKSKKIVANGSSSKKKGLKKCSKTKKDSVKKGAVMDSVVDLGNKDESFDETMISDLRQEFEKIASEMSPSKSEVASVCDVAEPVSVSKKTKKRKRENKGEEQVSTVNRDAAETSLAGPSSEKSSKRVRFAMKNNLVWKPHCPLPPQDLRCPPSATPRGSALKQGIPAGPVRELASRKTKKKVKPAARRGVKSIKNLKKKLSP

SEQ ID NO: 1044 - protein, 475 aa, Arabidopsis thaliana
MKKLWQGIFYCVWHADKSLYQSELIDRLSSALQSLPLPLSIHYFTVFLFTMRREWSRIDRLRLDKFYLLIRRFLHGFFSLIDSNSWDLEFTRRLMGILFDGTLLADDKFQGNGVNYHITSAFVEELRPFLPLRKEVLELLFAPFVKIMGVVNDKILVGKIKSNLFDELLKMGKKLLIIKQSGDDAVPEDDDVVVLGSIALSMEFAKRFYELGSSPECHQGNRKLIFALHKEFLQLEKDMSSSSIEVSIVEASRPGNDEVPESVPVSESNTNVVSKSKKIVANGSSSKKKGLKKCSKTKKDSVKKGAVMDSVVDLGNKDESFDETMISDLRQEFEKIASEMSPSKSEVASVCDVAEPVSVSKKTKKRKRENKGEEQVSTVNRDAAETSLAGPSSEKSSKRVRFAMKNNLVWKPHCPLPPQDLRCPPSATPRGSALKQGIPAGPVRELASRKTKKKVKPAARRGVKSIKNLKKKLSP

SEQ ID NO: 1045 - DNA, 1723 bp, Arabidopsis thaliana
gaaaaaaacattatcttacaaaaatccaaatactccgacttaaccgggtcggatcctggtgagtactagtatctatctcattacaattcatatccttccttcaacattcgatcatcacgaagccaaagaacaatttctccgtcactatcataaccatggcggtgctttcatctgcagatcgagctagtaatgagaagaaggtgaagagttcatactttgatttgccacctatggaaatgtctgtagcatttcctcaagcaactccagcctctacatttccaccttgtacttcagactattatcatttcaatgatctactgactccggaagaacaagctatccggaagaaagtgagggaatgcatggagaaagaagttgctccaataatgacagagtactgggagaaagcagaatttccattccatatcactccaaagcttggggctatgggtgttgctggtggctcgatcaagggttatggatgtcctggtctctccatcaccgccaatgcaattgccacagcagaaatagctagagttgatgcaagttgttcgactttcattttggtgcattcttctttgggcatgctcactattgcactctgtggatcagaagcacagaaggagaagtatttgccttctttggctcaattgaatactgtggcttgttgggctttgacagagcccgacaatggaagcgatgcaagtggtctaggaacgactgcaacaaaggttgaaggaggttggaaaattaatggacaaaagcgttggattggaaacagcacctttgcagatctgttgatcatctttgcgaggaatacaacaactaaccaaatcaacggattcatagtcaagaaagatgcgcctggcctaaaggctactaagatcccaaataaaataggtttacgtatggttcaaaatggagatattctactacagaatgtctttgttccagatgaggatcggttacctggggtaaattcttttcaggacaccagcaaggttctggctgtctcacgtgtaatggtggcctggcaaccaatcggcatatcaatgggaatctacgatatgtgccacaggtatctgaaggagaggaaacagtttggagcaccgttggctgctttccagttaaaccaacagaagcttgtgcagatgctgggtaacgttcaagcgatgtttctaatgggttggcgtctctgcaagctgtatgagacgggtcagatgactccaggtcaagccagtttaggaaaggcatggatttcatcaaaagcgagagaaactgcttcgctaggtcgggaattacttggtgggaatggaattctagcagattttctggtagcaaaggctttctgtgaccttgaacccatttatacatacgaagggacttatgatataaacaccttagtaacagggagggaagtaacgggtattgcgagtttcaaaccggctacacgtagccgtctctaagttaaaaggttgtccattgtttgttgttgtctgttggttagtattgatattgtgatgtggggtttacatctacaaatgtgccaaataatctgacccaaaaagatttagggtccaatgggggaataatatcgttgttgcaaaacttaatccagttattgcttcttgcaatatggattcgtcttgtggcttgtactgggggaaataccatttgttaaccttttattaattcaaattgccaatgtcaataacttttggtc

SEQ ID NO: 1046 - protein, 436 aa, Arabidopsis thaliana
MAVLSSADRASNEKKVKSSYFDLPPMEMSVAFPQATPASTFPPCTSDYYHFNDLLTPEEQAIRKKVRECMEKEVAPIMTEYWEKAEFPFHITPKLGAMGVAGGSIKGYGCPGLSITANAIATAEIARVDASCSTFILVHSSLGMLTIALCGSEAQKEKYLPSLAQLNTVACWALTEPDNGSDASGLGTTATKVEGGWKINGQKRWIGNSTFADLLIIFARNTTTNQINGFIVKKDAPGLKATKIPNKIGLRMVQNGDILLQNVFVPDEDRLPGVNSFQDTSKVLAVSRVMVAWQPIGISMGIYDMCHRYLKERKQFGAPLAAFQLNQQKLVQMLGNVQAMFLMGWRLCKLYETGQMTPGQASLGKAWISSKARETASLGRELLGGNGILADFLVAKAFCDLEPIYTYEGTYDINTLVTGREVTGIASFKPATRSRL

SEQ ID NO: 1047 - protein, 411 aa, Arabidopsis thaliana
MEMSVAFPQATPASTFPPCTSDYYHFNDLLTPEEQAIRKKVRECMEKEVAPIMTEYWEKAEFPFHITPKLGAMGVAGGSIKGYGCPGLSITANAIATAEIARVDASCSTFILVHSSLGMLTIALCGSEAQKEKYLPSLAQLNTVACWALTEPDNGSDASGLGTTATKVEGGWKINGQKRWIGNSTFADLLIIFARNTTTNQINGFIVKKDAPGLKATKIPNKIGLRMVQNGDILLQNVFVPDEDRLPGVNSFQDTSKVLAVSRVMVAWQPIGISMGIYDMCHRYLKERKQFGAPLAAFQLNQQKLVQMLGNVQAMFLMGWRLCKLYETGQMTPGQASLGKAWISSKARETASLGRELLGGNGILADFLVAKAFCDLEPIYTYEGTYDINTLVTGREVTGIASFKPATRSRL

SEQ ID NO: 1048 - protein, 409 aa, Arabidopsis thaliana
MSVAFPQATPASTFPPCTSDYYHFNDLLTPEEQAIRKKVRECMEKEVAPIMTEYWEKAEFPFHITPKLGAMGVAGGSIKGYGCPGLSITANAIATAEIARVDASCSTFILVHSSLGMLTIALCGSEAQKEKYLPSLAQLNTVACWALTEPDNGSDASGLGTTATKVEGGWKINGQKRWIGNSTFADLLIIFARNTTTNQINGFIVKKDAPGLKATKIPNKIGLRMVQNGDILLQNVFVPDEDRLPGVNSFQDTSKVLAVSRVMVAWQPIGISMGIYDMCHRYLKERKQFGAPLAAFQLNQQKLVQMLGNVQAMFLMGWRLCKLYETGQMTPGQASLGKAWISSKARETASLGRELLGGNGILADFLVAKAFCDLEPIYTYEGTYDINTLVTGREVTGIASFKPATRSRL

SEQ ID NO: 1049 - DNA, 1561 bp, Arabidopsis thaliana
tgtttgggctcaatttgggctctgtctgttatccacaaattaagagacgcaaacctaaaacgacgccgttccatagttttcctttgaagaagagagagacgtcacaaaggaaagcactcaatcgtcatttcctcggtatctcctcctcgaaagaagaatgcctggaattagaggtccttcggaatactcgcaggaaccacctcgtcacccttctctcaaggtcaacgccaaggaacctttcaacgccgagcctccccgctcggccttagtctcatcttatgtcactcccgtcgaccttttctacaagcgaaatcatggtcccatccccattgttgatcaccttcaaagctactccgtcacccttactggattgatccagaacccgagaaagctctttatcaaagacatcaggtccctcccaaagtacaatgttactgctactcttcagtgtgccggtaacagaaggactgccatgagcaaagttaggaatgttagaggtgttggatgggatgtttctgctattggcaacgctgtctggggtggggcgaaactggccgatgttcttgagcttgtggggataccaaagctgactgcttctaccaatttaggagccagacatgttgagttcgttagtgttgatcgctgtaaggaggaaaatgggggcccttataaggcgtcaatcactctaagtcaagccacaaatcctgaagcggatgttctactcgcttatgagatgaatggagagaccctgaacagggatcacggatttccgttaagggtggttgtccctggtgtgattggtgctcgttcggtcaaatggcttgattccatcaatgtcatcgctgaagaaagccagggattcttcatgcaaaaagattacaaaatgtttccaccctctgtcaattgggataatatcaactggtcctctaggagaccgcaaatggatttccctgttcagagtgcaatctgctctgtggaggatgtgcaaatggtgaagcctggaaaggtaagtatcaaaggatatgcggtttcaggaggtggacgcgggatagaaagagtggacatatccctggatggaggcaaaaactgggtggaagcttctagaacgcaggaaccaggaaagcagtacatctcagaacacagctccagtgacaaatgggcatgggtgttgtttgaagccaccattgatgtttcacagactacagaggtcatcgccaaagcggttgattcggcggcgaatgttcaaccggaaaatgtggagtcggtgtggaacctaagaggagttctcaacacttcgtggcaccgtgtccttctccggcttggccactctaacttgtagaccaagttaccactatgcgtctggtctctctttatcttttctttaagaactaaaacatccttgaatatgcttgtccttgtggatctgtgagagcaaaatactgtttatagttaaataaaatgggaaaacccatctgttgtcatgtggtggattataaattatttatttatatgatagaactgttattcactattatatattaatgaaatcatatggttgagc

SEQ ID NO: 1050 - protein, 393 aa, Arabidopsis thaliana
MPGIRGPSEYSQEPPRHPSLKVNAKEPFNAEPPRSALVSSYVTPVDLFYKRNHGPIPIVDHLQSYSVTLTGLIQNPRKLFIKDIRSLPKYNVTATLQCAGNRRTAMSKVRNVRGVGWDVSAIGNAVWGGAKLADVLELVGIPKLTASTNLGARHVEFVSVDRCKEENGGPYKASITLSQATNPEADVLLAYEMNGETLNRDHGFPLRVVVPGVIGARSVKWLDSINVIAEESQGFFMQKDYKMFPPSVNWDNINWSSRRPQMDFPVQSAICSVEDVQMVKPGKVSIKGYAVSGGGRGIERVDISLDGGKNWVEASRTQEPGKQYISEHSSSDKWAWVLFEATIDVSQTTEVIAKAVDSAANVQPENVESVWNLRGVLNTSWHRVLLRLGHSNL

SEQ ID NO: 1051 - protein, 288 aa, Arabidopsis thaliana
MSKVRNVRGVGWDVSAIGNAVWGGAKLADVLELVGIPKLTASTNLGARHVEFVSVDRCKEENGGPYKASITLSQATNPEADVLLAYEMNGETLNRDHGFPLRVVVPGVIGARSVKWLDSINVIAEESQGFFMQKDYKMFPPSVNWDNINWSSRRPQMDFPVQSAICSVEDVQMVKPGKVSIKGYAVSGGGRGIERVDISLDGGKNWVEASRTQEPGKQYISEHSSSDKWAWVLFEATIDVSQTTEVIAKAVDSAANVQPENVESVWNLRGVLNTSWHRVLLRLGHSNL

SEQ ID NO: 1052 - protein, 201 aa, Arabidopsis thaliana
MNGETLNRDHGFPLRVVVPGVIGARSVKWLDSINVIAEESQGFFMQKDYKMFPPSVNWDNINWSSRRPQMDFPVQSAICSVEDVQMVKPGKVSIKGYAVSGGGRGIERVDISLDGGKNWVEASRTQEPGKQYISEHSSSDKWAWVLFEATIDVSQTTEVIAKAVDSAANVQPENVESVWNLRGVLNTSWHRVLLRLGHSNL

SEQ ID NO: 1053 - DNA, 1483 bp, Arabidopsis thaliana
acaacattctccttatccttctcctcgtgaagacttttctctctgtttattttttttagggttttcgtaagaacagagcaaaaaacatgtttggaagaggaccttcaaggaagagcgataacacaaagttctacgagatccttggtgttcctaagaccgcagcaccagaagatctcaagaaagcttataagaaagccgctatcaaaaaccatcctgataagggtggtgatcccgaaaagtttaaagagttagcacaggcttatgaagttttaagtgatcctgagaagcgtgagatctatgatcaatatggggaagatgcactcaaggaaggaatgggtggtggaggtggtggacacgatccatttgatatcttctcttccttctttggtagtggtggacacccattcggaagtcatagccggggaaggaggcagaggcgtggtgaagatgttgttcatcccttgaaggtttccttagaggatgtttatctcggaacaacaaagaagctctcactttctaggaaggctttgtgctcaaagtgtaacggcaagggttcaaagtctggagcttcaatgaaatgtggtggctgtcaaggttcgggaatgaagatctcgatcaggcagtttggacctggaatgatgcagcaggtgcagcatgcttgtaatgattgcaaaggcacaggagagaccatcaatgatcgggacaggtgtccacaatgcaaaggagagaaggttgtctctgagaagaaggtgcttgaagtaaatgtggagaagggaatgcaacacaatcagaagatcacattcagtggacaagccgatgaagcgcctgatactgtcaccggagatatagtgtttgtcattcagcagaaggagcacccaaagttcaaaagaaagggtgaggatctctttgtggagcacaccatctctctaaccgaggccttgtgtggcttccagtttgtcttgacccatttggacaaaagacagcttctcatcaaatccaagcccggagaggtcgtcaaacctgattcatacaaggcgataagtgatgagggaatgccaatataccaaaggccgttcatgaagggtaagctatacattcacttcacggttgaattcccggaatcgctgagcccggatcagacaaaggccattgaagcagttttgccaaagccaaccaaggcagctataagcgatatggaaatagacgactgcgaagagacgactctgcatgatgtgaacattgaggatgagatgaaaaggaaggcgcaagctcaaagagaggcttatgatgacgatgaggaagatcacccaggcggtgctcagcgtgtgcaatgtgcccagcagtgatcaacatgcgcatcttagtgatctccaatatttgcttctgtcttttctccttttcattgtattatttttgggtctttttatagactttgccaattcagtgggaagaacctcgtcctaattcaaatccttgttacacc

SEQ ID NO: 1054 - protein, 419 aa, Arabidopsis thaliana
MFGRGPSRKSDNTKFYEILGVPKTAAPEDLKKAYKKAAIKNHPDKGGDPEKFKELAQAYEVLSDPEKREIYDQYGEDALKEGMGGGGGGHDPFDIFSSFFGSGGHPFGSHSRGRRQRRGEDVVHPLKVSLEDVYLGTTKKLSLSRKALCSKCNGKGSKSGASMKCGGCQGSGMKISIRQFGPGMMQQVQHACNDCKGTGETINDRDRCPQCKGEKVVSEKKVLEVNVEKGMQHNQKITFSGQADEAPDTVTGDIVFVIQQKEHPKFKRKGEDLFVEHTISLTEALCGFQFVLTHLDKRQLLIKSKPGEVVKPDSYKAISDEGMPIYQRPFMKGKLYIHFTVEFPESLSPDQTKAIEAVLPKPTKAAISDMEIDDCEETTLHDVNIEDEMKRKAQAQREAYDDDEEDHPGGAQRVQCAQQ

SEQ ID NO: 1055 - protein, 337 aa, Arabidopsis thaliana
MGGGGGGHDPFDIFSSFFGSGGHPFGSHSRGRRQRRGEDVVHPLKVSLEDVYLGTTKKLSLSRKALCSKCNGKGSKSGASMKCGGCQGSGMKISIRQFGPGMMQQVQHACNDCKGTGETINDRDRCPQCKGEKVVSEKKVLEVNVEKGMQHNQKITFSGQADEAPDTVTGDIVFVIQQKEHPKFKRKGEDLFVEHTISLTEALCGFQFVLTHLDKRQLLIKSKPGEVVKPDSYKAISDEGMPIYQRPFMKGKLYIHFTVEFPESLSPDQTKAIEAVLPKPTKAAISDMEIDDCEETTLHDVNIEDEMKRKAQAQREAYDDDEEDHPGGAQRVQCAQQ

SEQ ID NO: 1056 - protein, 257 aa, Arabidopsis thaliana
MKCGGCQGSGMKISIRQFGPGMMQQVQHACNDCKGTGETINDRDRCPQCKGEKVVSEKKVLEVNVEKGMQHNQKITFSGQADEAPDTVTGDIVFVIQQKEHPKFKRKGEDLFVEHTISLTEALCGFQFVLTHLDKRQLLIKSKPGEVVKPDSYKAISDEGMPIYQRPFMKGKLYIHFTVEFPESLSPDQTKAIEAVLPKPTKAAISDMEIDDCEETTLHDVNIEDEMKRKAQAQREAYDDDEEDHPGGAQRVQCAQQ

SEQ ID NO: 1057 - DNA, 2181 bp, Arabidopsis thaliana
ccttccattttcctcgtctctcttcttccccgtaaacccaaaaacaatctctgcaaagtcctcggttctgatggagctttcagaaacctatgcttgtgttccatcgacggagagaggtagaggaattctgatctctggtaactcgaagtccgataccatcctctacactaatggtcgatccgtcgtgactctcgaccttaacaatcctttaaaggtctctatctatggtgagcacgcttacccagctactgtggcgcgatattctccgaacggagagtggatcgcgtctggtgatgtgtcggggactgttagaatctggggagcttacaacgatcatgtgttgaagaatgagtttaaggttttggctggtcggatcgatgatcttcagtggtctgctgatgggatgaggatcgttgcttctggtgatggcaaaggcaaatctcttgttcgtgctttcatgtgggattcaggatcaaatgtgggagagtttgatggtcattctaggagagttcttagctgtgctatcaagccaactaggccgttccgtattgtaacttgtggggaggattttctggtgaatttctatgaaggtcctccttttaagttcaagctctcaagcagagagcattccaactttgtcaactgtgtgaggtttgcaccagatggaagtaagttcattactgtgagttcagataagaagggaatcatatatgatggaaagacttgtgagatactgggagaactgtcttctgatgatgggcataaaggtagcatctatgcagtcagctggagtcctgatggtaaacaggtgctcactgtttccgcagacaagtcagccaaaatatgggatatatcagacaacggtagtggatcattgaatacaacattgaactgtcctggatcatcaggtggagtagacgatatgcttgttgggtgtctgtggcagaacgatcatattgtcactgtttctctaggtggcacaatcagcatattctcagcaagcgatctggataaatccccctttcagttttcgggacacatgaagaacgtctcttccttagctgtgcttaaaggaaacgctgattacatattatccggtagttatgatggactgatatgtaaatggatgctaggccgtggtttttgcggtaaattgcagcggacacaaaactctcaaataaagtgctttgctgcccatgaagaagagatcgtgacctctggatatgacaataagatatccaggatctcctataaagatgatcaatgcacaaatgaagagtctatcgacattggaaatcaaccaaaggatctaagccttgcaccactctcacccgatctccttctggtgacctttgagtcaggagttgtgtttcttcgtgatgggaaagtagtgtcaaccatcaaccttgggttcattgtcactgctttggcagtaacacctgatggaaccgaagctgtcatcggtggccaagacggtaaactccatttgtattctattaatggtgactccctcaccgaggaagcagttctcgagagacacagaggcgccatcagcgtcatacgttactctccagatttgtctatgtttgcatcagctgatttgaacagagaagcagttgtgtgggacagagtctccagagagatgaaactcaagaacatgttgtaccatagcgcccgcataaactgcttagcttggtctccaaacagcactatggttgccacaggatccttggacacgtgtgtgattgtgtatgaagtggacaaacctgcttcgtcacgcatgacaataaaaggagctcacttaggtggagtatatggtctgggttttgctgatgattcccatgtagtgagttctggtgaagatgcttgtatccgcgtctggagctttactcctcaataagacttgacgtaaattataaagatctctggacaagtcctatcttgtctctttggaaagcttctactacttttgaaggctttttttgtgaatcttccgtttggccgtggctgtgttgatgtgtgtgtctgttttttttttgtctgcatatcttttgtcaaaaatgaatgctctgttttggtctgaaactgagatcttgagtcagattttttttcattatcagaagattactgatacagaatgggacttgagattgtgctttctctcaatgatttttgggctct

SEQ ID NO: 1058 - protein, 632 aa, Arabidopsis thaliana
LPFSSSLFFPVNPKTISAKSSVLMELSETYACVPSTERGRGILISGNSKSDTILYTNGRSVVTLDLNNPLKVSIYGEHAYPATVARYSPNGEWIASGDVSGTVRIWGAYNDHVLKNEFKVLAGRIDDLQWSADGMRIVASGDGKGKSLVRAFMWDSGSNVGEFDGHSRRVLSCAIKPTRPFRIVTCGEDFLVNFYEGPPFKFKLSSREHSNFVNCVRFAPDGSKFITVSSDKKGIIYDGKTCEILGELSSDDGHKGSIYAVSWSPDGKQVLTVSADKSAKIWDISDNGSGSLNTTLNCPGSSGGVDDMLVGCLWQNDHIVTVSLGGTISIFSASDLDKSPFQFSGHMKNVSSLAVLKGNADYILSGSYDGLICKWMLGRGFCGKLQRTQNSQIKCFAAHEEEIVTSGYDNKISRISYKDDQCTNEESIDIGNQPKDLSLAPLSPDLLLVTFESGVVFLRDGKVVSTINLGFIVTALAVTPDGTEAVIGGQDGKLHLYSINGDSLTEEAVLERHRGAISVIRYSPDLSMFASADLNREAVVWDRVSREMKLKNMLYHSARINCLAWSPNSTMVATGSLDTCVIVYEVDKPASSRMTIKGAHLGGVYGLGFADDSHVVSSGEDACIRVWSFTPQ

SEQ ID NO: 1059 - protein, 609 aa, Arabidopsis thaliana
MELSETYACVPSTERGRGILISGNSKSDTILYTNGRSVVTLDLNNPLKVSIYGEHAYPATVARYSPNGEWIASGDVSGTVRIWGAYNDHVLKNEFKVLAGRIDDLQWSADGMRIVASGDGKGKSLVRAFMWDSGSNVGEFDGHSRRVLSCAIKPTRPFRIVTCGEDFLVNFYEGPPFKFKLSSREHSNFVNCVRFAPDGSKFITVSSDKKGIIYDGKTCEILGELSSDDGHKGSIYAVSWSPDGKQVLTVSADKSAKIWDISDNGSGSLNTTLNCPGSSGGVDDMLVGCLWQNDHIVTVSLGGTISIFSASDLDKSPFQFSGHMKNVSSLAVLKGNADYILSGSYDGLICKWMLGRGFCGKLQRTQNSQIKCFAAHEEEIVTSGYDNKISRISYKDDQCTNEESIDIGNQPKDLSLAPLSPDLLLVTFESGVVFLRDGKVVSTINLGFIVTALAVTPDGTEAVIGGQDGKLHLYSINGDSLTEEAVLERHRGAISVIRYSPDLSMFASADLNREAVVWDRVSREMKLKNMLYHSARINCLAWSPNSTMVATGSLDTCVIVYEVDKPASSRMTIKGAHLGGVYGLGFADDSHVVSSGEDACIRVWSFTPQ

SEQ ID NO: 1060 - protein, 498 aa, Arabidopsis thaliana
MRIVASGDGKGKSLVRAFMWDSGSNVGEFDGHSRRVLSCAIKPTRPFRIVTCGEDFLVNFYEGPPFKFKLSSREHSNFVNCVRFAPDGSKFITVSSDKKGIIYDGKTCEILGELSSDDGHKGSIYAVSWSPDGKQVLTVSADKSAKIWDISDNGSGSLNTTLNCPGSSGGVDDMLVGCLWQNDHIVTVSLGGTISIFSASDLDKSPFQFSGHMKNVSSLAVLKGNADYILSGSYDGLICKWMLGRGFCGKLQRTQNSQIKCFAAHEEEIVTSGYDNKISRISYKDDQCTNEESIDIGNQPKDLSLAPLSPDLLLVTFESGVVFLRDGKVVSTINLGFIVTALAVTPDGTEAVIGGQDGKLHLYSINGDSLTEEAVLERHRGAISVIRYSPDLSMFASADLNREAVVWDRVSREMKLKNMLYHSARINCLAWSPNSTMVATGSLDTCVIVYEVDKPASSRMTIKGAHLGGVYGLGFADDSHVVSSGEDACIRVWSFTPQ

SEQ ID NO: 1061 - DNA, 1463 bp, Arabidopsis thaliana
gaatctctccctctttcttccatttcccagaactctcagagtttcgccacttcttctgaagaatctgaaagatcacaaagtccaaagaaaaaaaatgagcgtgatcacaactccaatagagaccctgcacctaaagtcaacacttcgtcttctaccacgagctgtttatcgcagtcaacggattcaagttttcccgcccaacatcttctcgaacacttctctgagttctccacttcgcatcgacccaatctctcaagttggcggatcgaggaatttgtggcgtagatatgcatctgataatttctcggagatgggtttggatcctggagctgatccattcaaggttattgagaagccttctatagtggatagaatgaagaaagcaaactcaattcttcctcatgtagtgttggcgagtacaatattagctcttatctatcctccttctttcacttggtttacgtcgaggtactttgtgcccgctttaggttttttgatgtttgcggttggtatcaattcaaacgagaaagactttcttgaagctttcaaaagaccaaaagctatcctcctcggttatgttggacaatatctcgtaaagcctgtcctaggtttcatctttggcctagctgctgtttctcttttccaactcccaactccaattggtgctggaatcatgttggtatcatgtgttagtggagctcagttgtcaaactatgcgacattcctaactgatccagcattggcacctcttagcatcgtcatgacatctctatcaaccgctactgcggttcttgtcacaccgatgctatcactcctgctcattgggaagaaactacccgttgatgtaaaaggaatgatatccagcattcttcaggttgtaatcgcaccaatcgctgcaggattgctactaaacaagttgttcccaaaagtatcaaatgcaatccgaccatttctcccgattctatcggttctcgacacagcttgctgcgttggagcaccactcgcattgaacataaactcggtcatgtctccatttggagccaccatattgttactagtaacaatgtttcatctctcagctttcctcgctggatacttccttaccggttctgtctttagaaacgctccagacgctaaagccatgcaaagaacattgtcctatgaaactggaatgcagagtagccttttggctctagcgcttgctactaagttctttcaagatcctcttgtggggattcctcctgctatatctacggtggtaatgtcattgatggggttcactctcgttttgatctggtctaaggaaaagagtaacacattttaacattttgattttgtttcactccacattttgattatacatatatatatgtactacaaataattggaaaattcttcttgtaatataaataattcaatacagaatttgagatttttaatgtactaatctccattttgtcttt

SEQ ID NO: 1062 - protein, 440 aa, Arabidopsis thaliana
NLSLFLPFPRTLRVSPLLLKNLKDHKVQRKKMSVITTPIETLHLKSTLRLLPRAVYRSQRIQVFPPNIFSNTSLSSPLRIDPISQVGGSRNLWRRYASDNFSEMGLDPGADPFKVIEKPSIVDRMKKANSILPHVVLASTILALIYPPSFTWFTSRYFVPALGFLMFAVGINSNEKDFLEAFKRPKAILLGYVGQYLVKPVLGFIFGLAAVSLFQLPTPIGAGIMLVSCVSGAQLSNYATFLTDPALAPLSIVMTSLSTATAVLVTPMLSLLLIGKKLPVDVKGMISSILQVVIAPIAAGLLLNKLFPKVSNAIRPFLPILSVLDTACCVGAPLALNINSVMSPFGATILLLVTMFHLSAFLAGYFLTGSVFRNAPDAKAMQRTLSYETGMQSSLLALALATKFFQDPLVGIPPAISTVVMSLMGFTLVLIWSKEKSNTF

SEQ ID NO: 1063 - protein, 409 aa, Arabidopsis thaliana
MSVITTPIETLHLKSTLRLLPRAVYRSQRIQVFPPNIFSNTSLSSPLRIDPISQVGGSRNLWRRYASDNFSEMGLDPGADPFKVIEKPSIVDRMKKANSILPHVVLASTILALIYPPSFTWFTSRYFVPALGFLMFAVGINSNEKDFLEAFKRPKAILLGYVGQYLVKPVLGFIFGLAAVSLFQLPTPIGAGIMLVSCVSGAQLSNYATFLTDPALAPLSIVMTSLSTATAVLVTPMLSLLLIGKKLPVDVKGMISSILQVVIAPIAAGLLLNKLFPKVSNAIRPFLPILSVLDTACCVGAPLALNINSVMSPFGATILLLVTMFHLSAFLAGYFLTGSVFRNAPDAKAMQRTLSYETGMQSSLLALALATKFFQDPLVGIPPAISTVVMSLMGFTLVLIWSKEKSNTF

SEQ ID NO: 1064 - protein, 337 aa, Arabidopsis thaliana
MGLDPGADPFKVIEKPSIVDRMKKANSILPHVVLASTILALIYPPSFTWFTSRYFVPALGFLMFAVGINSNEKDFLEAFKRPKAILLGYVGQYLVKPVLGFIFGLAAVSLFQLPTPIGAGIMLVSCVSGAQLSNYATFLTDPALAPLSIVMTSLSTATAVLVTPMLSLLLIGKKLPVDVKGMISSILQVVIAPIAAGLLLNKLFPKVSNAIRPFLPILSVLDTACCVGAPLALNINSVMSPFGATILLLVTMFHLSAFLAGYFLTGSVFRNAPDAKAMQRTLSYETGMQSSLLALALATKFFQDPLVGIPPAISTVVMSLMGFTLVLIWSKEKSNTF

SEQ ID NO: 1065 - DNA, 1201 bp, Arabidopsis thaliana
gtagcgctcttttcgacgttttgctgtgattattttggccgtgagcttctccatttccatttccatcgccatcggactctctcctcttacaaacttttcatttttgttagctctcatctctacgtcgaattgctttttctcttcttctccgattcgaaaatgaggacaatcgtttcgcgtttgattcgttatcaatcgtctctttcccagatacggtttgtttctgcctctggtggcgggaggtatctctcgacagactctaacaaaattgatgagcccttcaatgtggaagaagctgagactgtacatgtgcctccacctcctactgagaagctgcttgtcctgggaggaaatggttttgtgggatcacatgtctgtaaagaagctttagatcgcggcttatctgtctctagccttagcaggtcaggtaggtcgtctttacaagagtcctgggcctccagagtaacatggcatcaaggaaaccttctatcatctgatttattgaaagatgctcttgagggagtgacttctgtgatttcttgtgttggtggttttggttcaaactcatatatgtataagattaacgggactgcaaacatcaacgcaattagggctgcctcagaaaaaggtgttaaaagatttgtctatatttctgctgcggatttcggattagccaactacttgttgagaggatactatgagggaaagcgagctgctgagaccgagctgctcacaagatttgcatatggaggtataatcttgcgacctggttttatatatggaactcgcagtgttgggagcatgaagatcccgttaggagtatttggttcacccatggagatggttcttcaacaagcaaaacctctgaaccagcttccattagtcggacctttgttcacacctccggtgaatgttgaatcggttgcaaaagtcgcagttagagcagccacagatccagtgttccctcccgggattgtggatgtccatggaatacaacgttacagccaacagaaatcgagataagtccgttttgaaaagcttaagtatgctcaatgtcgttttgtagagcttggctgcttttagtactctgctggattcgaatggtgggaacaaaaatgtttacttgtttctctcgccagaaatttcccacaaataaataaagaagagaagcttttatttatttattgaactatacatctct

SEQ ID NO: 1066 - protein, 340 aa, Arabidopsis thaliana
VALFSTFCCDYFGRELLHFHFHRHRTLSSYKLFIFVSSHLYVELLFLFFSDSKMRTIVSRLIRYQSSLSQIRFVSASGGGRYLSTDSNKIDEPFNVEEAETVHVPPPPTEKLLVLGGNGFVGSHVCKEALDRGLSVSSLSRSGRSSLQESWASRVTWHQGNLLSSDLLKDALEGVTSVISCVGGFGSNSYMYKINGTANINAIRAASEKGVKRFVYISAADFGLANYLLRGYYEGKRAAETELLTRFAYGGIILRPGFIYGTRSVGSMKIPLGVFGSPMEMVLQQAKPLNQLPLVGPLFTPPVNVESVAKVAVRAATDPVFPPGIVDVHGIQRYSQQKSR

SEQ ID NO: 1067 - protein, 287 aa, Arabidopsis thaliana
MRTIVSRLIRYQSSLSQIRFVSASGGGRYLSTDSNKIDEPFNVEEAETVHVPPPPTEKLLVLGGNGFVGSHVCKEALDRGLSVSSLSRSGRSSLQESWASRVTWHQGNLLSSDLLKDALEGVTSVISCVGGFGSNSYMYKINGTANINAIRAASEKGVKRFVYISAADFGLANYLLRGYYEGKRAAETELLTRFAYGGIILRPGFIYGTRSVGSMKIPLGVFGSPMEMVLQQAKPLNQLPLVGPLFTPPVNVESVAKVAVRAATDPVFPPGIVDVHGIQRYSQQKSR

SEQ ID NO: 1068 - DNA, 1119 bp, Arabidopsis thaliana
tgaagactgagaagcagagaaccgaaagaagaaaacaaaactctcgaagtcgcaacagaaaagaaacgagagagatatggtggtaggcggcggaggagaaggagatcagaagagaagcagcggagaaatgatggcgatggcgagtttattcaacgatcagcagaatccaattcaacagtttcaggttaaattcaaagaagtagaaactaatttcaagacatggttgtcgaaacagtcgattccggtggaagccgccgtcgtatccaccatgagcggtgtacaaggagctttcattggtggtctcatgggaacactctctcctgaaatgcctcaagccggcgttgaccctcaagccatagcttcgatgaaacaagctcaggctcttgtgggtggtccttgggtccaagctcggaattttgctgcaattactggtgtgaatgctggaattgcttctgttatgaagcggattagaggcaaagaggatattgaatctgcagtggtggcagcgttaggatctggatttgcatactcattggtgagccaaggattgcaaggacaacctatgaatgcaatcactactgctgctggttttgctgtttttcaaggagtgttttttaaattgggagaaagattctctaaaccgagtactgaagatccatttttcacaagaggaaggacaatgctagtgaagctaggtttggagaaatacgagaagaacttcaagaaaggacttttaactgatcccacattgccattgctcactgatagcgcgctgaaagatgcgaacatcccaccagggccaagacttatgatactagatcatatccagagggacccggagataaagggcaaacgaaagtaggagccatgttgtttaatcaaatatgttttgatggtaacgatcttcaaacacatatgtaatgccttttacttttagctgctattgccatgaagagctcttgttagatacttctgtttctattaccaatgtttgattatctttaaaaaaattgagtagttcgtctcaaatcaaattggatataggttctgaataaaacgaaaatgaaatatgctttgtatgagaataagatgtttatattatgtatagttgattgactc

SEQ ID NO: 1069 - protein, 261 aa, Arabidopsis thaliana
MVVGGGGEGDQKRSSGEMMAMASLFNDQQNPIQQFQVKFKEVETNFKTWLSKQSIPVEAAVVSTMSGVQGAFIGGLMGTLSPEMPQAGVDPQAIASMKQAQALVGGPWVQARNFAAITGVNAGIASVMKRIRGKEDIESAVVAALGSGFAYSLVSQGLQGQPMNAITTAAGFAVFQGVFFKLGERFSKPSTEDPFFTRGRTMLVKLGLEKYEKNFKKGLLTDPTLPLLTDSALKDANIPPGPRLMILDHIQRDPEIKGKRK

SEQ ID NO: 1070 - protein, 244 aa, Arabidopsis thaliana
MMAMASLFNDQQNPIQQFQVKFKEVETNFKTWLSKQSIPVEAAVVSTMSGVQGAFIGGLMGTLSPEMPQAGVDPQAIASMKQAQALVGGPWVQARNFAAITGVNAGIASVMKRIRGKEDIESAVVAALGSGFAYSLVSQGLQGQPMNAITTAAGFAVFQGVFFKLGERFSKPSTEDPFFTRGRTMLVKLGLEKYEKNFKKGLLTDPTLPLLTDSALKDANIPPGPRLMILDHIQRDPEIKGKRK

SEQ ID NO: 1071 - protein, 243 aa, Arabidopsis thaliana
MAMASLFNDQQNPIQQFQVKFKEVETNFKTWLSKQSIPVEAAVVSTMSGVQGAFIGGLMGTLSPEMPQAGVDPQAIASMKQAQALVGGPWVQARNFAAITGVNAGIASVMKRIRGKEDIESAVVAALGSGFAYSLVSQGLQGQPMNAITTAAGFAVFQGVFFKLGERFSKPSTEDPFFTRGRTMLVKLGLEKYEKNFKKGLLTDPTLPLLTDSALKDANIPPGPRLMILDHIQRDPEIKGKRK

SEQ ID NO: 1072 - DNA, 1456 bp, Arabidopsis thaliana
attcagcaaaaattaaaattgaagaacgagtcaaagatagagagagaaaaaccctattcgatcacgagatcgtaatcaacgtttttagcagaatcatcggagggtagaaaaaatgctcaacgatggcgaagtaactccttctagacatgagattctgagtatggtgaagaagcactcaaagtcattaggaaagacgtctcttgatgagcaagatgcgtctgatgtagaaatggactctaatttctggcatggtgtgtttgatgtgtactttgttcgttgcatggagtcgaggaggcgacaagacgatgatcttctgttttttgtcaggaaattgagctgtaagtcatatggtttgactgaaaatgaggatgcaccagctccttactttgtacgcaggtgggcacctaagttagatgagctgcttggtgaaagtctggctgaagttgattggaggaaatcattttatttgaacatgattgcccacacatcgttcactgttactgttgcgatttgcagtaatgaggcccttaagacgtaccaaggaagtaaagacacaaaactatctcctatatacaaggttgtaaaaactgtatatgcatcacctagtcgtgttaattttcatctggactcaaagaaggaagtggaaacaacacctgcctacccagaaatttgttttgccgtagatgattttgactcaacctttgatgctgtggttctgacagataaagatcattgctattgcgtactacttaattctcacgatggggcagcctttccaagtgcaactgttaaagattcgagtgattctaatacgaatgctgaccctagaactgtgaaagatcctaaggttactctgttttctgggtttgtcagctatcagatggttcgagaagcctatgaaggggggaggaatcggtttggaagtctcctatctctcggtcatattacaggaaaagcagacagactttatatgagaggcccaggaggacgtggagaagttgaagtagctgtttctggcgttgtagatcagagccaagtagttttagggcctgtttcacctatgtcttcaaagaagagcatcgatctcggatccattttccgtaaagcagcctctgttgcatctgtcgcagctaaacatgcaatagcagctgctactgcctcttatgatgaagacgagatgttccctcttaaatgctgcttaatgtccatttcattaccatgggacactattgctcatgatcttttattcaaggcaactccaccagtcaacatggagtagcacactctggaatgaagcgtaggaaacagaagtttgtgtgttttgtctaaatgtttttttttttttgtactttgattgaatattccttttgtgatgttactcgactatgtggtttaccacaaccactgttattacctcaaggaataaatgaaagtaaagttgtgaatttgcaatctc

SEQ ID NO: 1073 - protein, 388 aa, Arabidopsis thaliana
MLNDGEVTPSRHEILSMVKKHSKSLGKTSLDEQDASDVEMDSNFWHGVFDVYFVRCMESRRRQDDDLLFFVRKLSCKSYGLTENEDAPAPYFVRRWAPKLDELLGESLAEVDWRKSFYLNMIAHTSFTVTVAICSNEALKTYQGSKDTKLSPIYKVVKTVYASPSRVNFHLDSKKEVETTPAYPEICFAVDDFDSTFDAVVLTDKDHCYCVLLNSHDGAAFPSATVKDSSDSNTNADPRTVKDPKVTLFSGFVSYQMVREAYEGGRNRFGSLLSLGHITGKADRLYMRGPGGRGEVEVAVSGVVDQSQVVLGPVSPMSSKKSIDLGSIFRKAASVASVAAKHAIAAATASYDEDEMFPLKCCLMSISLPWDTIAHDLLFKATPPVNME

SEQ ID NO: 1074 - protein, 372 aa, Arabidopsis thaliana
MVKKHSKSLGKTSLDEQDASDVEMDSNFWHGVFDVYFVRCMESRRRQDDDLLFFVRKLSCKSYGLTENEDAPAPYFVRRWAPKLDELLGESLAEVDWRKSFYLNMIAHTSFTVTVAICSNEALKTYQGSKDTKLSPIYKVVKTVYASPSRVNFHLDSKKEVETTPAYPEICFAVDDFDSTFDAVVLTDKDHCYCVLLNSHDGAAFPSATVKDSSDSNTNADPRTVKDPKVTLFSGFVSYQMVREAYEGGRNRFGSLLSLGHITGKADRLYMRGPGGRGEVEVAVSGVVDQSQVVLGPVSPMSSKKSIDLGSIFRKAASVASVAAKHAIAAATASYDEDEMFPLKCCLMSISLPWDTIAHDLLFKATPPVNME

SEQ ID NO: 1075 - protein, 349 aa, Arabidopsis thaliana
MDSNFWHGVFDVYFVRCMESRRRQDDDLLFFVRKLSCKSYGLTENEDAPAPYFVRRWAPKLDELLGESLAEVDWRKSFYLNMIAHTSFTVTVAICSNEALKTYQGSKDTKLSPIYKVVKTVYASPSRVNFHLDSKKEVETTPAYPEICFAVDDFDSTFDAVVLTDKDHCYCVLLNSHDGAAFPSATVKDSSDSNTNADPRTVKDPKVTLFSGFVSYQMVREAYEGGRNRFGSLLSLGHITGKADRLYMRGPGGRGEVEVAVSGVVDQSQVVLGPVSPMSSKKSIDLGSIFRKAASVASVAAKHAIAAATASYDEDEMFPLKCCLMSISLPWDTIAHDLLFKATPPVNME

SEQ ID NO: 1076 - DNA, 1360 bp, Arabidopsis thaliana
atctcatttatcatcatccttcaagaacacaaagctagacagaaaaaaaaaaatgtgttcctcaaaattaaaaaatctgacccaagaaaacatttctcagatcaacggccgtccggttcttcaaccgaagtcgaaccaagttccgacattagaccgacgtaactcactaaaaaaatcgcctcctaagcctttgaatccaattgcatcaaagataccctcaccaagaccaatttctctaatctctcctcctttgtctcccaacacaaaatccttaagaaaaccggccggttcttgcaaggaacttcttaggtctagctctacaaaatcgaaaccagtgatatcaccagagaacagtgatggtggctacaaagaggttatgcctatggtgattgttcaaaagcagcctggaagtatagcagctgccagaagagaagaggttgcaatgaaacaagaagagagaaagaagaaaatttctcattacggtagaatcaaatccgtaaaatcgaatgaaaagaacttaaatgttgagcatgagaagaagaagagatgcagtttcatcactacaagttcagatccaatatatgtcgcttaccatgacaaagaatggggagttccagttcatgatgacaatctactatttgagcttctggtgttaaccggagctcaggtcggatcagattggacttcggttttaaagagaagaaacacttttagagaggctttctctggtttcgaagcagagttggtcgcagacttcaacgagaagaagatacaatcaatagtcaacgactatggcattaaccttagccaagtccttgcagttgttgacaacgctaaacaaattctcaaggtgaaaagagatttggggtcattcaacaaatacatttgggggtttatgaaacacaaaccggtcaccacaaaatacacatcatgccaaaagataccggttaagacatcgaaatcggagactataagcaaagacatggttcgtcgtgggtttagattcgttggtccgacggttatacattcgttaatgcaagccgccggtttaaccaacgaccacttgatcacatgtccgaggcatctcgagtgtacggccatggcggctttataggcaaaaggatcatgttgtaattgttgttgtagtcacattggctttaatttatatgtaaataaataatattttgtgttattattttagtactatagctcttctttttgtcaacattgtagtactatatctaccatgtgatatttaggtttgaggtcctaactttaggtattgatatttgtacaaaagctttttgtgtctgtgtttgtgattctgctttaaatttaatatatgtgtgtgtgtttattt

SEQ ID NO: 1077 - protein, 370 aa, Arabidopsis thaliana
SHLSSSFKNTKLDRKKKMCSSKLKNLTQENISQINGRPVLQPKSNQVPTLDRRNSLKKSPPKPLNPIASKIPSPRPISLISPPLSPNTKSLRKPAGSCKELLRSSSTKSKPVISPENSDGGYKEVMPMVIVQKQPGSIAAARREEVAMKQEERKKKISHYGRIKSVKSNEKNLNVEHEKKKRCSFITTSSDPIYVAYHDKEWGVPVHDDNLLFELLVLTGAQVGSDWTSVLKRRNTFREAFSGFEAELVADFNEKKIQSIVNDYGINLSQVLAVVDNAKQILKVKRDLGSFNKYIWGFMKHKPVTTKYTSCQKIPVKTSKSETISKDMVRRGFRFVGPTVIHSLMQAAGLTNDHLITCPRHLECTAMAAL

SEQ ID NO: 1078 - protein, 353 aa, Arabidopsis thaliana
MCSSKLKNLTQENISQINGRPVLQPKSNQVPTLDRRNSLKKSPPKPLNPIASKIPSPRPISLISPPLSPNTKSLRKPAGSCKELLRSSSTKSKPVISPENSDGGYKEVMPMVIVQKQPGSIAAARREEVAMKQEERKKKISHYGRIKSVKSNEKNLNVEHEKKKRCSFITTSSDPIYVAYHDKEWGVPVHDDNLLFELLVLTGAQVGSDWTSVLKRRNTFREAFSGFEAELVADFNEKKIQSIVNDYGINLSQVLAVVDNAKQILKVKRDLGSFNKYIWGFMKHKPVTTKYTSCQKIPVKTSKSETISKDMVRRGFRFVGPTVIHSLMQAAGLTNDHLITCPRHLECTAMAAL

SEQ ID NO: 1079 - protein, 245 aa, Arabidopsis thaliana
MPMVIVQKQPGSIAAARREEVAMKQEERKKKISHYGRIKSVKSNEKNLNVEHEKKKRCSFITTSSDPIYVAYHDKEWGVPVHDDNLLFELLVLTGAQVGSDWTSVLKRRNTFREAFSGFEAELVADFNEKKIQSIVNDYGINLSQVLAVVDNAKQILKVKRDLGSFNKYIWGFMKHKPVTTKYTSCQKIPVKTSKSETISKDMVRRGFRFVGPTVIHSLMQAAGLTNDHLITCPRHLECTAMAAL

SEQ ID NO: 1080 - DNA, 1237 bp, Arabidopsis thaliana
aaagaaataaagtaatgaagaaaactagaaatgttgcttcttctcctattgaatgtgtccacctccagaccaaacccaccaccactcttgttcggtctttcttcttcttcctcttcaactctcaaacaatctcttcctttatcatcttctatctcttcctctgttccttcttctggttttgccaatcaccaaacctgactaacccttctcctcctcctctctccgtcgctccccttcgcggggatgccaattctccaccgccggaatcttcttcttctccggcgacgaaatcttctttaatgatttcttctagagatcccaatgccctctttagcggcggtggaatcagctttttagcaggagttagaactgtgaagtttagttatggttattctagtcttaaaggtaaaagagcaacaatggaggattacttcgaaactagaatctctgatgttaatggacaaatggttgctttctttggtgtctttgatggtcatggtggagcaagaactgcagaatatcttaaaaacaatcttttcaagaatttagttagtcatgatgattttatctcagacactaagaaagctattgttgaagtttttaagcagacagatgaagagtatcttattgaagaggcaggacaaccgaagaatgctggctcgactgctgcgactgcttttcttataggtgataagttgattgttgctaacgttggtgattctagagttgtagcgtcaagaaatggttcagctgttccactctctgatgatcataaacctgatagatcagatgagcgacaacggattgaagatgctggtggctttattatttgggctggaacatggcgagttggtggaattcttgcggtctctcgggcttttggagataagcaacttaagccatatgtgattgcggagccagaaattcaggaggaggatataagcacattggagtttattgttgttgctagtgatggactgtggaatgtgttgtcaaacaaggatgccgtggcaatagtacgagacatttcagatgcggaaacagcagcaagaaagcttgtgcaagaaggttacgcacggggtagctgcgacaatatcacttgcattgttgtacgattcgaggtttcttgagcaagaaccaaattcatattgttcttgttctatgaatgtaccatcttcagctgttgaatacactaacatatttgggttatacaattttataaaagaaagatatattt

SEQ ID NO: 1081 - protein, 375 aa, Arabidopsis thaliana
RNKVMKKTRNVASSPIECVHLQTKPTTTLVRSFFFFLFNSQTISSFIIFYLFLCSFFWFCQSPNLTNPSPPPLSVAPLRGDANSPPPESSSSPATKSSLMISSRDPNALFSGGGISFLAGVRTVKFSYGYSSLKGKRATMEDYFETRISDVNGQMVAFFGVFDGHGGARTAEYLKNNLFKNLVSHDDFISDTKKAIVEVFKQTDEEYLIEEAGQPKNAGSTAATAFLIGDKLIVANVGDSRVVASRNGSAVPLSDDHKPDRSDERQRIEDAGGFIIWAGTWRVGGILAVSRAFGDKQLKPYVIAEPEIQEEDISTLEFIVVASDGLWNVLSNKDAVAIVRDISDAETAARKLVQEGYARGSCDNITCIVVRFEVS

SEQ ID NO: 1082 - protein, 371 aa, Arabidopsis thaliana
MKKTRNVASSPIECVHLQTKPTTTLVRSFFFFLFNSQTISSFIIFYLFLCSFFWFCQSPNLTNPSPPPLSVAPLRGDANSPPPESSSSPATKSSLMISSRDPNALFSGGGISFLAGVRTVKFSYGYSSLKGKRATMEDYFETRISDVNGQMVAFFGVFDGHGGARTAEYLKNNLFKNLVSHDDFISDTKKAIVEVFKQTDEEYLIEEAGQPKNAGSTAATAFLIGDKLIVANVGDSRVVASRNGSAVPLSDDHKPDRSDERQRIEDAGGFIIWAGTWRVGGILAVSRAFGDKQLKPYVIAEPEIQEEDISTLEFIVVASDGLWNVLSNKDAVAIVRDISDAETAARKLVQEGYARGSCDNITCIVVRFEVS

SEQ ID NO: 1083 - protein, 276 aa, Arabidopsis thaliana
MISSRDPNALFSGGGISFLAGVRTVKFSYGYSSLKGKRATMEDYFETRISDVNGQMVAFFGVFDGHGGARTAEYLKNNLFKNLVSHDDFISDTKKAIVEVFKQTDEEYLIEEAGQPKNAGSTAATAFLIGDKLIVANVGDSRVVASRNGSAVPLSDDHKPDRSDERQRIEDAGGFIIWAGTWRVGGILAVSRAFGDKQLKPYVIAEPEIQEEDISTLEFIVVASDGLWNVLSNKDAVAIVRDISDAETAARKLVQEGYARGSCDNITCIVVRFEVS

SEQ ID NO: 1084 - DNA, 1879 bp, Arabidopsis thaliana
tggatctacttagtacttacttagtagttacttctctgtcttatttgattttgagtctctgttttgtctcttctcttgagattgcgataatgagagaacggattattacattcgtttcgctgcttcttgtagctttgctttcgtttcccagtgttagctactgtgacgaccaaacgatcctgtatgaatcgtttgacgagccttttgatggtcgctgggtcgtttcagagaaagctgaataccaaggtgtgtggaagcacgagaagagtgaagggcatgatgattatggacttctagtgagtgagaaagctaagaagtacggaatagttaaagagcttgatgttgatgagcctctaaaccttaacgaaggaactgttgttcttcaatacgaggctcgtttccaagaagggcttgagtgtggtggtgcttacttaaagtatcttcgtcctcaagaagctggatgggttcctcaagggtttgataatgattctccttactctatcatgtttggacctgataagtgtggtgctaccaacaaggttcatttcatcttgaagcataagaatcccaagagtggcgagtttgttgagcaccatctcaagttccctccttctgttccgtttgacatgctttctcatgtctacactgcggtcttgaaatctgataatgaggtgaggattttggtcgatggtgaggagaagaagaagggtaatttactgtctgctgaagactttgagcctccgttgattccttccaagaccatccctgatccagaggacaagaagccagaagactgggatgagagagccaagattcctgatcctaatgctgtgaagcctgatgactgggatgaggatgcacccatggagattgaagatgaggaagctgagaaacccgaaggatggttggatgatgagcctgtagaggttgaagaccccgaggcaagcaagccagaagattgggatgacgaggaagatggtgagtgggaggctcctaaggtttccaacaccaagtgtgaggcagcacccggatgtggcgaatggaagagaccgatgaagaggaaccctgcttacaagggcaaatggagctcacctctcatagataacccagcttacaagggaatctggaaaccaagagacattccaaatcctgattattttgagcttgagaggccgaatttggagcccattgctgccattggtattgagatatggacaatgcaagacggtatcttatttgacaacatcttgatatctaaagacgagaaggttgctgaaacttacagacaaagcacttggaagcccaagtttgatgtggagaaagagaaacaaaaggcagaggatgaagctgctggtgaggcagatggtctcaagagttaccagaagaaggtgttcgacctcttgtacaaggttgcagacatttctttccttagtgcgtacaagtcaaagattatggaacttattgagaaagctgaaacacagccaaacttaaccatcggtgtgctcatttccatcgtgatcgtcttcctctctctcttcttcaagctcatatttggtggtgcaaaggctaaggtagaaaagaagaaaccggaaacagctgcagagacctcgacaagcgaggcaaagacagaggagaaagcagaagcggtggctgcaccacgaaagaggcagacgaggcgtgagagttagataaaaagaggattagattttgatttttggggctttttgttttgatttatcaccgtatagacaaacagtagtggacctgatattaagacgattattgtaacatgttttttttgtatgcttttagtttcacatgaatctgaatgtggatcacaacatttatgagttgaaatttgataagtaatgggttgtgt

SEQ ID NO: 1085 - protein, 561 aa, Arabidopsis thaliana
DLLSTYLVVTSLSYLILSLCFVSSLEIAIMRERIITFVSLLLVALLSFPSVSYCDDQTILYESFDEPFDGRWVVSEKAEYQGVWKHEKSEGHDDYGLLVSEKAKKYGIVKELDVDEPLNLNEGTVVLQYEARFQEGLECGGAYLKYLRPQEAGWVPQGFDNDSPYSIMFGPDKCGATNKVHFILKHKNPKSGEFVEHHLKFPPSVPFDMLSHVYTAVLKSDNEVRILVDGEEKKKGNLLSAEDFEPPLIPSKTIPDPEDKKPEDWDERAKIPDPNAVKPDDWDEDAPMEIEDEEAEKPEGWLDDEPVEVEDPEASKPEDWDDEEDGEWEAPKVSNTKCEAAPGCGEWKRPMKRNPAYKGKWSSPLIDNPAYKGIWKPRDIPNPDYFELERPNLEPIAAIGIEIWTMQDGILFDNILISKDEKVAETYRQSTWKPKFDVEKEKQKAEDEAAGEADGLKSYQKKVFDLLYKVADISFLSAYKSKIMELIEKAETQPNLTIGVLISIVIVFLSLFFKLIFGGAKAKVEKKKPETAAETSTSEAKTEEKAEAVAAPRKRQTRRES

SEQ ID NO: 1086 - protein, 532 aa, Arabidopsis thaliana
MRERIITFVSLLLVALLSFPSVSYCDDQTILYESFDEPFDGRWVVSEKAEYQGVWKHEKSEGHDDYGLLVSEKAKKYGIVKELDVDEPLNLNEGTVVLQYEARFQEGLECGGAYLKYLRPQEAGWVPQGFDNDSPYSIMFGPDKCGATNKVHFILKHKNPKSGEFVEHHLKFPPSVPFDMLSHVYTAVLKSDNEVRILVDGEEKKKGNLLSAEDFEPPLIPSKTIPDPEDKKPEDWDERAKIPDPNAVKPDDWDEDAPMEIEDEEAEKPEGWLDDEPVEVEDPEASKPEDWDDEEDGEWEAPKVSNTKCEAAPGCGEWKRPMKRNPAYKGKWSSPLIDNPAYKGIWKPRDIPNPDYFELERPNLEPIAAIGIEIWTMQDGILFDNILISKDEKVAETYRQSTWKPKFDVEKEKQKAEDEAAGEADGLKSYQKKVFDLLYKVADISFLSAYKSKIMELIEKAETQPNLTIGVLISIVIVFLSLFFKLIFGGAKAKVEKKKPETAAETSTSEAKTEEKAEAVAAPRKRQTRRES

SEQ ID NO: 1087 - protein, 394 aa, Arabidopsis thaliana
MFGPDKCGATNKVHFILKHKNPKSGEFVEHHLKFPPSVPFDMLSHVYTAVLKSDNEVRILVDGEEKKKGNLLSAEDFEPPLIPSKTIPDPEDKKPEDWDERAKIPDPNAVKPDDWDEDAPMEIEDEEAEKPEGWLDDEPVEVEDPEASKPEDWDDEEDGEWEAPKVSNTKCEAAPGCGEWKRPMKRNPAYKGKWSSPLIDNPAYKGIWKPRDIPNPDYFELERPNLEPIAAIGIEIWTMQDGILFDNILISKDEKVAETYRQSTWKPKFDVEKEKQKAEDEAAGEADGLKSYQKKVFDLLYKVADISFLSAYKSKIMELIEKAETQPNLTIGVLISIVIVFLSLFFKLIFGGAKAKVEKKKPETAAETSTSEAKTEEKAEAVAAPRKRQTRRES

SEQ ID NO: 1088 - DNA, 1775 bp, Arabidopsis thaliana
gcaaccattcgtcttctcgcttcatcgttttctcttttccgatggcaaaagcttgcctcttgcagtctactctactcccagcttactctccacttcacaaacttcgtaatcaaaacatcaccctctctttctcaccgcttccgctgtcccgatgccgtcccggaatccactgctcagtttcggccggtgagactacaatacaatccatggaggaagctccgaagatatcatggggatgcgagattgattcacttgagaacgctacttctcttcagaactggctctctgattcaggtctccctccgcagaaaatggctattgatagagtcgacatcggtgagcgaggcctcgtcgcttcacagaatctcagaaaaggagagaaattgctcttcgttcctccttctctcgtcatcagtgctgattccgaatggaccaacgcagaagctggtgaagtgatgaaacgttatgatgttccagattggcctttgctcgccacttatcttataagtgaagcaagtcttcagaaaagctcaagatggtttaactatatctcagctcttccccgacaaccttactcgcttttatactggactcggacagagcttgatatgtacttggaagcttctcagattcgagaacgggcaattgaaagaatcaccaatgttgttggaacttatgaagatctaagaagcaggatattttccaaacaccctcaacttttccctaaagaggttttcaatgatgagacatttaagtggtcttttggaatcctattctcacggttggtgcggttgccttctatggatggaagatttgccttagttccatgggcagatatgcttaatcataattgtgaggttgagacgttcctggattatgataaatcttcaaaaggagttgtctttacaacagatcgaccatatcaaccaggtgagcaggttttcatatcctatgggaataaatctaacggagagctattgttatcttatgggtttgttcccagagaaggaaccaatcctagtgattcagtagaactagcattatcacttaggaaaaacgataagtgttacgaggaaaagctggatgctttaaagaaacacggattatcgacacctcaatgctttcccgtaaggataacgggttggccaatggagctaatggcatatgcttatcttgtggtgagccctccagatatgagaaacaactttgaagagatggcgaaagctgcttcaaataagacatcaacaaagaatgatctaaaatatcctgaaatcgaggaagacgcattgcagttcatactggactcatgcgaaacaagcatatcaaagtacagccgatttctaaaggaaagtggatcaatggatttggacataacatctccaaaacagttgaaccgaaaagcgtttctgaaacagctagctgtagacttgtccactagtgagcgcaggatactgtaccgtgctcaatacattctgaggaggagactgagagatatcagaagtggtgagctgaaggctctacggctcttcagtggacttaggaacttcttcaagtgaatgttgaatgaggacatttcaacagctttaagatggatcaaaggtaggcctcgttgtgcttcaaccaaaaatgtagttttttattacaaaaaaattgaacgttggtgtaggcatggttggatctgtctcactcgtataggaatatattggtccagccatatatgtaatttgatcattttctataaactcaaaacctgaacctaaattgattaattaagg

SEQ ID NO: 1089 - protein, 517 aa, Arabidopsis thaliana
NHSSSRFIVFSFPMAKACLLQSTLLPAYSPLHKLRNQNITLSFSPLPLSRCRPGIHCSVSAGETTIQSMEEAPKISWGCEIDSLENATSLQNWLSDSGLPPQKMAIDRVDIGERGLVASQNLRKGEKLLFVPPSLVISADSEWTNAEAGEVMKRYDVPDWPLLATYLISEASLQKSSRWFNYISALPRQPYSLLYWTRTELDMYLEASQIRERAIERITNVVGTYEDLRSRIFSKHPQLFPKEVFNDETFKWSFGILFSRLVRLPSMDGRFALVPWADMLNHNCEVETFLDYDKSSKGVVFTTDRPYQPGEQVFISYGNKSNGELLLSYGFVPREGTNPSDSVELALSLRKNDKCYEEKLDALKKHGLSTPQCFPVRITGWPMELMAYAYLVVSPPDMRNNFEEMAKAASNKTSTKNDLKYPEIEEDALQFILDSCETSISKYSRFLKESGSMDLDITSPKQLNRKAFLKQLAVDLSTSERRILYRAQYILRRRLRDIRSGELKALRLFSGLRNFFK

SEQ ID NO: 1090 - protein, 504 aa, Arabidopsis thaliana
MAKACLLQSTLLPAYSPLHKLRNQNITLSFSPLPLSRCRPGIHCSVSAGETTIQSMEEAPKISWGCEIDSLENATSLQNWLSDSGLPPQKMAIDRVDIGERGLVASQNLRKGEKLLFVPPSLVISADSEWTNAEAGEVMKRYDVPDWPLLATYLISEASLQKSSRWFNYISALPRQPYSLLYWTRTELDMYLEASQIRERAIERITNVVGTYEDLRSRIFSKHPQLFPKEVFNDETFKWSFGILFSRLVRLPSMDGRFALVPWADMLNHNCEVETFLDYDKSSKGVVFTTDRPYQPGEQVFISYGNKSNGELLLSYGFVPREGTNPSDSVELALSLRKNDKCYEEKLDALKKHGLSTPQCFPVRITGWPMELMAYAYLVVSPPDMRNNFEEMAKAASNKTSTKNDLKYPEIEEDALQFILDSCETSISKYSRFLKESGSMDLDITSPKQLNRKAFLKQLAVDLSTSERRILYRAQYILRRRLRDIRSGELKALRLFSGLRNFFK

SEQ ID NO: 1091 - protein, 449 aa, Arabidopsis thaliana
MEEAPKISWGCEIDSLENATSLQNWLSDSGLPPQKMAIDRVDIGERGLVASQNLRKGEKLLFVPPSLVISADSEWTNAEAGEVMKRYDVPDWPLLATYLISEASLQKSSRWFNYISALPRQPYSLLYWTRTELDMYLEASQIRERAIERITNVVGTYEDLRSRIFSKHPQLFPKEVFNDETFKWSFGILFSRLVRLPSMDGRFALVPWADMLNHNCEVETFLDYDKSSKGVVFTTDRPYQPGEQVFISYGNKSNGELLLSYGFVPREGTNPSDSVELALSLRKNDKCYEEKLDALKKHGLSTPQCFPVRITGWPMELMAYAYLVVSPPDMRNNFEEMAKAASNKTSTKNDLKYPEIEEDALQFILDSCETSISKYSRFLKESGSMDLDITSPKQLNRKAFLKQLAVDLSTSERRILYRAQYILRRRLRDIRSGELKALRLFSGLRNFFK

SEQ ID NO: 1092 - DNA, 1452 bp, Arabidopsis thaliana
tggagtgagttcgatccaaagacatttaggtatcaatattcaatatcatctcctcttattcaattctcttgatttctccgaaatcgtctcttgttgtaatggtggatttgattttgtaacgagtagaagaaaaaaaacaaaaatcagaaagatgacaacttcacaagtagaaactggtttcttcgttgaattaaacaaaggacatgtattcatcactagacgcgatttagcttctcttcttcttcaatctcgtaatggatggcgtttagcttgagaccttaagaatcaagtactccaacttctcgaattgacttatctattagctcagaaccaaagtctgtaacaagcaaaggcatgacttttcagacagaggttcctgatgatggttctagacaagcttcttcttcgccttactctggaaaaggcaagattgttccggaatgtggtcttgttggtgatatgtatgatccttttgtagacagttttgaaccagcgtctgtgaaattagattgtgttcaggagcatgaaccagataacgacttgtgcattgtaccgaaggcgagcatttcttcgaatagaccgcttagtatggaagaaaacaaccaagctgttgataaggaacctttatgtgagtcagaaatgactgctcgggtcagtgtttcctcgaacaaaccagctgatgttgaagaaaacactgctggaattgagattggagaagttgtttctggagaggatgatgagtttggtaagaatgtggacgatggaagagaatgtaatagccatgagactttgactccaaactctgataatgagaatccgaaggtagagaacaatgtacatgaaggcgataacacaaggaaaaagtctcgagagaaatcaaaggagagagattcatcaaggtccatgaagcttttcaaagtcgtgcttacaaaattcgtcaaggatcttctgaaaccatcgtggagacaagggaatatgagcaaggaggcgtttaagactattgtgaagagagtggtggataaagtatcaaactcaatggagggtcgtcgtattcccaaatcaagagctaagatcgataagtacattgattcttcacagcagaagcttaccaaactggttatgggttatgtagacaagtatgtcaaagcatagtagataagcgaatcaaaggggatttcacataacacttttgcccagctggagaagattctacatttttgtcttgtctgataaacgatgtttagtcagaatcgttcttcttctgtggtgagttttacaatgcagaatttacctctactttcataacatgtaaatgaagaatccatccttttaaactgtagttgaaacgcatgtatgaacctaaagtcacatcacatatgactgcattcataaaacctttataggtaggttcatgtacaatcacattcaattaaatgatcttttgtcttactt

SEQ ID NO: 1093 - protein, 265 aa, Arabidopsis thaliana
MTFQTEVPDDGSRQASSSPYSGKGKIVPECGLVGDMYDPFVDSFEPASVKLDCVQEHEPDNDLCIVPKASISSNRPLSMEENNQAVDKEPLCESEMTARVSVSSNKPADVEENTAGIEIGEVVSGEDDEFGKNVDDGRECNSHETLTPNSDNENPKVENNVHEGDNTRKKSREKSKERDSSRSMKLFKVVLTKFVKDLLKPSWRQGNMSKEAFKTIVKRVVDKVSNSMEGRRIPKSRAKIDKYIDSSQQKLTKLVMGYVDKYVKA

SEQ ID NO: 1094 - protein, 230 aa, Arabidopsis thaliana
MYDPFVDSFEPASVKLDCVQEHEPDNDLCIVPKASISSNRPLSMEENNQAVDKEPLCESEMTARVSVSSNKPADVEENTAGIEIGEVVSGEDDEFGKNVDDGRECNSHETLTPNSDNENPKVENNVHEGDNTRKKSREKSKERDSSRSMKLFKVVLTKFVKDLLKPSWRQGNMSKEAFKTIVKRVVDKVSNSMEGRRIPKSRAKIDKYIDSSQQKLTKLVMGYVDKYVKA

SEQ ID NO: 1095 - protein, 187 aa, Arabidopsis thaliana
MEENNQAVDKEPLCESEMTARVSVSSNKPADVEENTAGIEIGEVVSGEDDEFGKNVDDGRECNSHETLTPNSDNENPKVENNVHEGDNTRKKSREKSKERDSSRSMKLFKVVLTKFVKDLLKPSWRQGNMSKEAFKTIVKRVVDKVSNSMEGRRIPKSRAKIDKYIDSSQQKLTKLVMGYVDKYVKA

SEQ ID NO: 1096 - DNA, 1479 bp, Arabidopsis thaliana
ataacacttccaattcaaaggaagacaacataaactcttattctctacctgtcctctcttctctgcaactcggccatggggaagaagcttgacgctttgcttggtcgcagtttcaagaccaacaagttcaagtctcttatcaccttagctctcacaaggctctctattctcaagaaccagcgtcaagccagactctctcaagccatctctgatgtcaccgagcttcttaagctcggccaacatgagcacgcttaccatagagtcgatcaagtcgtcaaagaccaaaacactctcgacgttctcttcttcatccatggctacttcactctctgtctcgatcgtattcacctctttgaacacaacagagattgtcctgaagagcttctagaagctgtttcgggtttgctatttgcagcttctagaatcggtgaattccctgagcttcaagagattcgtaatgttttgatttcgcgttttggcaaagatctcgcggctcggtctattgagttgcgcagtaattgtggggttgatcccaaaataattcagaagttgtcgacaagacctccaccgaaagaagttagaatgaaggctttgaaggagattgctgcagagaataacattgttctgaaactagaccaagcttctacgtccactgagggaacaacaaatatgcagggaacatcagatgttagtaagactaagctaacaagtaaagatggcagaggagaaggttatggtttatctgattcggtcaagagaggaaagaagaagtacaaagatgtggctgatgctgcacaagcagcgtttgagtcagcagctcatgcagcagaggctgcacaagcggctgtggagctttctcagttttctcctcgtggacatgacagtccgggtaacattggtggggaaaattcatttcatggttctgaaaacaaagagtcagaacaagaacaagaaggtaatgatgattcttcagaaggggaaggggatgtgatgtcagaatctaaaaggtcgatgtcagattcagaagatattattgatgtcccagtgatgtcattcagagaagaccctgtgaagctattggagaaggatactattatctacgatagtgaagaagaaacccaacctagtgttgagactattactattagtaagtctaaagatgagcaaaatcgtatggttggttcgaatagagcggatacaagacatgtggaccacatggttcgttcaattgaagatcctattatgcgtaaagcaggtttgaagggtccagtttcagtcaggacaagacaggttcgtggatactaagtacaaatgttataagtttttcaggtgcatctacggtgtaatcactcagttttgtacttttctatgttctttttgtggtcaaagatgtaagattattgtgttctttatggatataagctttcaatgatgttgtacagttgcatatgtgtgtgtttatacaagaaacgtttctag

SEQ ID NO: 1097 - protein, 409 aa, Arabidopsis thaliana
MGKKLDALLGRSFKTNKFKSLITLALTRLSILKNQRQARLSQAISDVTELLKLGQHEHAYHRVDQVVKDQNTLDVLFFIHGYFTLCLDRIHLFEHNRDCPEELLEAVSGLLFAASRIGEFPELQEIRNVLISRFGKDLAARSIELRSNCGVDPKIIQKLSTRPPPKEVRMKALKEIAAENNIVLKLDQASTSTEGTTNMQGTSDVSKTKLTSKDGRGEGYGLSDSVKRGKKKYKDVADAAQAAFESAAHAAEAAQAAVELSQFSPRGHDSPGNIGGENSFHGSENKESEQEQEGNDDSSEGEGDVMSESKRSMSDSEDIIDVPVMSFREDPVKLLEKDTIIYDSEEETQPSVETITISKSKDEQNRMVGSNRADTRHVDHMVRSIEDPIMRKAGLKGPVSVRTRQVRGY

SEQ ID NO: 1098 - protein, 240 aa, Arabidopsis thaliana
MKALKEIAAENNIVLKLDQASTSTEGTTNMQGTSDVSKTKLTSKDGRGEGYGLSDSVKRGKKKYKDVADAAQAAFESAAHAAEAAQAAVELSQFSPRGHDSPGNIGGENSFHGSENKESEQEQEGNDDSSEGEGDVMSESKRSMSDSEDIIDVPVMSFREDPVKLLEKDTIIYDSEEETQPSVETITISKSKDEQNRMVGSNRADTRHVDHMVRSIEDPIMRKAGLKGPVSVRTRQVRGY

SEQ ID NO: 1099 - protein, 211 aa, Arabidopsis thaliana
MQGTSDVSKTKLTSKDGRGEGYGLSDSVKRGKKKYKDVADAAQAAFESAAHAAEAAQAAVELSQFSPRGHDSPGNIGGENSFHGSENKESEQEQEGNDDSSEGEGDVMSESKRSMSDSEDIIDVPVMSFREDPVKLLEKDTIIYDSEEETQPSVETITISKSKDEQNRMVGSNRADTRHVDHMVRSIEDPIMRKAGLKGPVSVRTRQVRGY

SEQ ID NO: 1100 - DNA, 1211 bp, Arabidopsis thaliana
attactattgcaaatccattactgggtcagatttagtttcacaaaatcctttattgctgaatggttatgttgttacatagtgtgggactaattccatgttcaaaccaacaaaagtcttttctcttccatagttattaccgttacagatgcatagtttgttcatctgaaacaggtttgtccataagaagacaagctttggagcaagttgattctaagttgtctagtggagacgaaagagctgcattgtctcttgtcaaagatctccaaggaaacctgatggccttcgatgttttggcgctgcaaggcaggtgcctcagagactctacacgttggaggaactgaaactgaatggtattaacgcagcttcacttctctcgccaacagatacaacgcttggctccatcgaaagaaaccttcagatcgcagctgtctcagggggaatagttgcttggaaagcctttgacttgagttctcaacagcttttctttcttactcttgggtttatgttcctgtggactttggatttggtctcttttaatggcggaattgggagtttggttcttgatacaactggtcatacgtttagccaacgataccataacagagttgttcagcacgaagcgggtcatttcttggtggcctacttagtcgggattctaccacgcggatacacgctctctagccttgaagctttacagaaagaaggatctctcaacattcaagctggctcagcttttgtagactatgaattccttgaagaagttaattctggaaaagtctccgctacgatgctgaacagattctcatgcattgctctggctggtgtagcaacagaatatctcctgtatggttatgctgaaggaggccttgacgatatcagcaagttagatggtttggtgaagagtttggggttcacacagaagaaagcggactcgcaggtgaggtggtcagtccttaacaccatactgctactacgtcgccatgagatagctcgatcgaagctcgcgcaggctatgtccaaaggagaatctgtcggatcttgtatccaaatcatcgaagattctatcgatccttctgatatctagaaatacatgctctcatctattttctgtaaatccagcatatgaagaagcatttatataatacactaaaaagagctatctcagaaccaaatctaccttccccaagaaattcagaacatgagctatatg

SEQ ID NO: 1101 - protein, 193 aa, Arabidopsis thaliana
MFLWTLDLVSFNGGIGSLVLDTTGHTFSQRYHNRVVQHEAGHFLVAYLVGILPRGYTLSSLEALQKEGSLNIQAGSAFVDYEFLEEVNSGKVSATMLNRFSCIALAGVATEYLLYGYAEGGLDDISKLDGLVKSLGFTQKKADSQVRWSVLNTILLLRRHEIARSKLAQAMSKGESVGSCIQIIEDSIDPSDI

SEQ ID NO: 1102 - protein, 98 aa, Arabidopsis thaliana
MLNRFSCIALAGVATEYLLYGYAEGGLDDISKLDGLVKSLGFTQKKADSQVRWSVLNTILLLRRHEIARSKLAQAMSKGESVGSCIQIIEDSIDPSDI

SEQ ID NO: 1103 - DNA, 1463 bp, Arabidopsis thaliana
atattatttgcactctttcaagttcacaaggtgaatctgatcttactttctggtccacctctaagcacttttaaatggagaagaaaggccagcatggtacatatgaatcaatgatgactcatcatccgatcctctgtatcattgctttatctgtacttttcatagcaatcgacccctttcacatgagtccaatcgggggtcgtgagttcaaacccgtgaagcatgaggttgctccatataaggaagtcatgggaagctggcctagagacaaccttagtcgactgggtaatcatgggaaactggagttcgtggaccaagtctttggtccagagtcattagagtttgatagtttaggtcgtggtccatacacagggttggctgatggaagagtggttagatggatgggtgaagcaatcggatgggagacattttcggtggtaacatcaaaatggtcagaggaagcttgtgtgagaggtgtggattcaacaacaaacaagcaatggaagcacgagaagctgtgtgggaggcctcttggactgagatttcataaagagacaggaaatttgtatattgcagacgcttactatggtctacttgtggttggtcctgaaggagggattgctacgcctttagctactcatgtggaaggaaagcctatactctttgccaatgaccttgacatccatagaaatggctccatcttcttcactgacaccagcaaaagatatgacagagcgaatcatttctttatattactggaaggagaatcaacaggaaggcttctaagatatgacccacctaccaaaacaacacacattgtgctggagggtttggcttttcccaatggaattcaactctctaaagaccaatctttcctcctcttcaccgaaacaaccaattgcagattggtgaagtactggctggagggtccaaagatgggtgaagtcgaggtggtggcagatctcccgggattcccagacaatgtaagaataaatgaagagggtcagttttgggttgcaattgattgttgcagaacaccggcacaagaggttcttacaaacaacccttggataagaagcatctactttcggttgccaataccgatgaagctgcttgcgaaaacgatggggatgagaatgtacactgtgatatcgagattcgacgaggaaggtaaagtcctggaggtgctcgaggatagacaagggaaggtaatgaagcttgtgagtgaagtgagggaagttcaagggaagctttggattggaacagtggctcataaccacattgccactctaccttatcctttgacaatgaatcaatgaaggactttgttgtgtagttcctgaactaaatcatctctctgtaacttaattatcttcgttttgattcaagttcctttggaccggtttgtcttttgttgatattatgtgtgaccttagattcctcatgaaattctctttctttct

SEQ ID NO: 1104 - protein, 414 aa, Arabidopsis thaliana
MEKKGQHGTYESMMTHHPILCIIALSVLFIAIDPFHMSPIGGREFKPVKHEVAPYKEVMGSWPRDNLSRLGNHGKLEFVDQVFGPESLEFDSLGRGPYTGLADGRVVRWMGEAIGWETFSVVTSKWSEEACVRGVDSTTNKQWKHEKLCGRPLGLRFHKETGNLYIADAYYGLLVVGPEGGIATPLATHVEGKPILFANDLDIHRNGSIFFTDTSKRYDRANHFFILLEGESTGRLLRYDPPTKTTHIVLEGLAFPNGIQLSKDQSFLLFTETTNCRLVKYWLEGPKMGEVEVVADLPGFPDNVRINEEGQFWVAIDCCRTPAQEVLTNNPWIRSIYFRLPIPMKLLAKTMGMRMYTVISRFDEEGKVLEVLEDRQGKVMKLVSEVREVQGKLWIGTVAHNHIATLPYPLTMNQ

SEQ ID NO: 1105 - protein, 402 aa, Arabidopsis thaliana
MMTHHPILCIIALSVLFIAIDPFHMSPIGGREFKPVKHEVAPYKEVMGSWPRDNLSRLGNHGKLEFVDQVFGPESLEFDSLGRGPYTGLADGRVVRWMGEAIGWETFSVVTSKWSEEACVRGVDSTTNKQWKHEKLCGRPLGLRFHKETGNLYIADAYYGLLVVGPEGGIATPLATHVEGKPILFANDLDIHRNGSIFFTDTSKRYDRANHFFILLEGESTGRLLRYDPPTKTTHIVLEGLAFPNGIQLSKDQSFLLFTETTNCRLVKYWLEGPKMGEVEVVADLPGFPDNVRINEEGQFWVAIDCCRTPAQEVLTNNPWIRSIYFRLPIPMKLLAKTMGMRMYTVISRFDEEGKVLEVLEDRQGKVMKLVSEVREVQGKLWIGTVAHNHIATLPYPLTMNQ

SEQ ID NO: 1106 - protein, 401 aa, Arabidopsis thaliana
MTHHPILCIIALSVLFIAIDPFHMSPIGGREFKPVKHEVAPYKEVMGSWPRDNLSRLGNHGKLEFVDQVFGPESLEFDSLGRGPYTGLADGRVVRWMGEAIGWETFSVVTSKWSEEACVRGVDSTTNKQWKHEKLCGRPLGLRFHKETGNLYIADAYYGLLVVGPEGGIATPLATHVEGKPILFANDLDIHRNGSIFFTDTSKRYDRANHFFILLEGESTGRLLRYDPPTKTTHIVLEGLAFPNGIQLSKDQSFLLFTETTNCRLVKYWLEGPKMGEVEVVADLPGFPDNVRINEEGQFWVAIDCCRTPAQEVLTNNPWIRSIYFRLPIPMKLLAKTMGMRMYTVISRFDEEGKVLEVLEDRQGKVMKLVSEVREVQGKLWIGTVAHNHIATLPYPLTMNQ

SEQ ID NO: 1107 - DNA, 1404 bp, Arabidopsis thaliana
aaaagtcgaagggtctctttatattttcagaatcagaatctgaaatttatctctcggtcgatccagtcttcgtgagtgacttcgacgacgacgacgagtcacactactcttgagcttctcatacttcacccaggttgatttgggaaataatggatgaatctctggagcatcaaactcaaacacatgaccaagagagcgaaatagttactgaaggaagtgccgttgtgcatagtgagccatctcaagagggtaatgttcctcctaaagttgatagtgaagctgaggtcttggatgagaaagtcagtaagcagattataaaggaaggtcacggttccaaaccatccaagtactctacatgctttttgcactacagggcatggaccaaaaactcgcagcacaaatttgaggatacatggcatgagcagcaacctattgaattggttcttggaaaagagaaaaaagaactagccggtttagccatcggtgttgctagcatgaagtctggtgaacgtgcgcttgtgcatgttggctgggaattagcttatgggaaagaaggaaacttttcttttcccaatgttccacctatggcagacttgttatatgaggtggaagttattgggtttgatgaaacaaaggagggaaaagctcgcagtgatatgactgtagaggaaaggattggtgcagcagacagaagaaaaatggatgggaattctctttttaaggaggagaaactggaggaagccatgcaacagtatgaaatggccatagcatacatgggggacgattttatgtttcagctgtatgggaagtaccaggatatggctttagcagttaaaaacccatgccatcttaacatagcagcttgcctcatcaaactaaaacgatacgatgaagcaattggtcactgcaacattgtgttgacagaagaagagaaaaacccaaaagcactgttcagaagagggaaagcaaaggcagagctaggacagatggactcagcacgtgatgatttccgaaaggcacaaaagtatgctcctgacgacaaggcgattagaagagagctacgagcacttgcagagcaagagaaagccttgtaccaaaagcagaaagaaatgtacaaaggaatattcaaagggaaagatgaaggtggtgctaagtcaaagagccttttttggttgatagtgttatggcaatggtttgtttcccttttctcccgtatctttcgacgccacagagttaaagcagattaatgtatgaagaagggtaacaattcaactctaaaagaccaacgtgaaagatctacccccatttcttattagtgagaattttgaaaaatattttatataagagaaaaaaatagtctctattgttttcgattataaattagtaactttatatttttgatcc

SEQ ID NO: 1108 - protein, 365 aa, Arabidopsis thaliana
MDESLEHQTQTHDQESEIVTEGSAVVHSEPSQEGNVPPKVDSEAEVLDEKVSKQIIKEGHGSKPSKYSTCFLHYRAWTKNSQHKFEDTWHEQQPIELVLGKEKKELAGLAIGVASMKSGERALVHVGWELAYGKEGNFSFPNVPPMADLLYEVEVIGFDETKEGKARSDMTVEERIGAADRRKMDGNSLFKEEKLEEAMQQYEMAIAYMGDDFMFQLYGKYQDMALAVKNPCHLNIAACLIKLKRYDEAIGHCNIVLTEEEKNPKALFRRGKAKAELGQMDSARDDFRKAQKYAPDDKAIRRELRALAEQEKALYQKQKEMYKGIFKGKDEGGAKSKSLFWLIVLWQWFVSLFSRIFRRHRVKAD

SEQ ID NO: 1109 - protein, 250 aa, Arabidopsis thaliana
MKSGERALVHVGWELAYGKEGNFSFPNVPPMADLLYEVEVIGFDETKEGKARSDMTVEERIGAADRRKMDGNSLFKEEKLEEAMQQYEMAIAYMGDDFMFQLYGKYQDMALAVKNPCHLNIAACLIKLKRYDEAIGHCNIVLTEEEKNPKALFRRGKAKAELGQMDSARDDFRKAQKYAPDDKAIRRELRALAEQEKALYQKQKEMYKGIFKGKDEGGAKSKSLFWLIVLWQWFVSLFSRIFRRHRVKAD

SEQ ID NO: 1110 - protein, 220 aa, Arabidopsis thaliana
MADLLYEVEVIGFDETKEGKARSDMTVEERIGAADRRKMDGNSLFKEEKLEEAMQQYEMAIAYMGDDFMFQLYGKYQDMALAVKNPCHLNIAACLIKLKRYDEAIGHCNIVLTEEEKNPKALFRRGKAKAELGQMDSARDDFRKAQKYAPDDKAIRRELRALAEQEKALYQKQKEMYKGIFKGKDEGGAKSKSLFWLIVLWQWFVSLFSRIFRRHRVKAD

SEQ ID NO: 1111 - DNA, 1397 bp, Arabidopsis thaliana
gctctcaaagttcctaaagcttttggcaatatgataatggcgtgatacctttttctctcctctcaacaaacgcgcctctaatctctcaatcttctccaactccaatttcttgcaattcactccaacttcttcttcatcttcttcttctctctctctctgagattctagatttcgtttctcacgttttcttcaccaaatatgggaacctgcttctccagctcaactaaatccacggctgagatctctccctttgacctcgtcgtcaaacctcctcctccttccgccgccgccaccgcaccaccaacccaacgaatccccaccgcgaaaacagaaacatcgacggtgagcttcaccgcaacagtgagattatacggaccacctaacagtctagtgacgtcgtatctccgtttcgctcttctccacaagaaagttccgctccgtttcgttccatcggaagaccaaaaaccgacgattcaagtcggatcggagactgtatcaggttctcgagaggttcttctccgttacatcgaggataagttcccagagccgcgtttgatgatttggaagtttaatctggaaggcttcgacgaagcgactccattgatagtgaagatgatttggcttcagcataggagtatgttgtggcatatggagaggatgttgagatggtcggaggatctggcggcgcgtggaggtaaaaaagcggtggatccgtctgtgggaacaccgaagatggagattaggaaatttgcaaagagttatactcatttacaggagcttatgctcgaacatgctcaaatggaagagagaatcttgttccctgttcttgaatctgttgatcgagggatgtgtaaaagtgcaaatgaagaacatgggagagaattaccaatgatgaatggtatcaaagaagatatcaaatctattggagttttggattctgggatttgttcagaagctctctttagtcttgcttctcgtttcaaatcattgcagatgatgtgtaaaacacattttgaagaggaagagaaagatttattgccaatggtggaagctgcagaaatggggaaagagaagcagaagaaattgatgaatcaaagcttagaagttatgagtgggactcattctaactcgtttgatttcctactagaaggtctcactccacaagaagctatgcagtatattgacttgctcatgacatttggtgatccaaatcttatctcatcttttctctgctctgatgttgttgactgattttatcctttttaggctcactttgtgaaaaactgttgttgtgtgtggggttgtgaattttgtgtatatagagtcagatttgtcgattcaggtgttgctatgttttctcattctgttaaattaaaaacaaaacaaaaataggttat

SEQ ID NO: 1112 - protein, 350 aa, Arabidopsis thaliana
MGTCFSSSTKSTAEISPFDLVVKPPPPSAAATAPPTQRIPTAKTETSTVSFTATVRLYGPPNSLVTSYLRFALLHKKVPLRFVPSEDQKPTIQVGSETVSGSREVLLRYIEDKFPEPRLMIWKFNLEGFDEATPLIVKMIWLQHRSMLWHMERMLRWSEDLAARGGKKAVDPSVGTPKMEIRKFAKSYTHLQELMLEHAQMEERILFPVLESVDRGMCKSANEEHGRELPMMNGIKEDIKSIGVLDSGICSEALFSLASRFKSLQMMCKTHFEEEEKDLLPMVEAAEMGKEKQKKLMNQSLEVMSGTHSNSFDFLLEGLTPQEAMQYIDLLMTFGDPNLISSFLCSDVVD

SEQ ID NO: 1113 - protein, 231 aa, Arabidopsis thaliana
MIWKFNLEGFDEATPLIVKMIWLQHRSMLWHMERMLRWSEDLAARGGKKAVDPSVGTPKMEIRKFAKSYTHLQELMLEHAQMEERILFPVLESVDRGMCKSANEEHGRELPMMNGIKEDIKSIGVLDSGICSEALFSLASRFKSLQMMCKTHFEEEEKDLLPMVEAAEMGKEKQKKLMNQSLEVMSGTHSNSFDFLLEGLTPQEAMQYIDLLMTFGDPNLISSFLCSDVVD

SEQ ID NO: 1114 - protein, 212 aa, Arabidopsis thaliana
MIWLQHRSMLWHMERMLRWSEDLAARGGKKAVDPSVGTPKMEIRKFAKSYTHLQELMLEHAQMEERILFPVLESVDRGMCKSANEEHGRELPMMNGIKEDIKSIGVLDSGICSEALFSLASRFKSLQMMCKTHFEEEEKDLLPMVEAAEMGKEKQKKLMNQSLEVMSGTHSNSFDFLLEGLTPQEAMQYIDLLMTFGDPNLISSFLCSDVVD

SEQ ID NO: 1115 - DNA, 1607 bp, Arabidopsis thaliana
agtttcttacaatttgtaaagagatctgttttagggttttgccttgttcttgtggcgggaataacaaagacatcgccgatatggggaaagacgaagaggaaatgcgaggtgagatcgaggagcgactaatcaatgaagagtacaagatctggaagaagaacactcctttcctctacgatctcgttattactcacgctctcgagtggccttcacttactgttgaatggcttcctgaccgtgaagaaccttccggtaaagactactccgttcagaagatgattctcggtacccatacctccgagagcgagcccaattacttgatgctagcccaagttcagcttcctcttgacgataccgagagtgaagctcgtcagtacgatgatgaccgctctgaatttggtggctttggctgtgcaactggaaaggtacaaattatccagcagataaatcatgatggtgaggttaatcgagctcgctatatgcctcaaaaccctttcataattgctaccaagacagttaatgcggaggtctatgttttcgattacagtaagcatccatctaagcctcctcttgatggggcttgtaatcctgatttaaagcttagaggtcacagctctgagggatatggtctctcttggagtaagttcaagcagggtcatttgcttagtggctctgatgatgctcagatctgcttgtgggatattaacgctactcctaaaaacaaatctctggacgctcagcagatttttaaggctcatgaaggggttgtggaagatgttgcatggcatctgagacatgagtacctgtttggatcagttggagatgaccaataccttctcatatgggatctgcgttctccatctgccagtaaaccagtacagtctgtggttgctcattcgatggaggttaactgcttagccttcaatccatttaatgagtgggttgtggcaacaggatcaactgacaagactgttaaattattcgatctacggaagctaagcaccgctcttcacacatttgatagccacaaagaggaggtttttcaagttggttggaacccaaagaacgagactattttagcttcatgttgccttggtagaagacttatggtttgggaccttagcaggatcgatgaggaacagacagtggaggacgcagaagacggcccacctgagctgctgtttattcacggtggtcacactagcaaaatttcagatttctcgtggaacccttgtgaagattgggttatttccagtgttgctgaggacaacatactccaaatatggcaaatggctgaaaacatctatcatgatgaggatgacgctccaggggaagaaccatcaaaagcttcttagcttgttatttagtatccaaagcgcactgatcttatgggacagtatttatttatacatctctgctattgtttagttcaagtatttagtgttcattgtgtaaaatgaggcatgagaggatggtagcaagtgggaatttttctttataacatgaaggagttgattctaatctcactaagtagtgtcaaccaaagctataactcttagtttatacccagattgggcgacattagaaagaaattacaaatttgaatt

SEQ ID NO: 1116 - protein, 450 aa, Arabidopsis thaliana
FLTICKEICFRVLPCSCGGNNKDIADMGKDEEEMRGEIEERLINEEYKIWKKNTPFLYDLVITHALEWPSLTVEWLPDREEPSGKDYSVQKMILGTHTSESEPNYLMLAQVQLPLDDTESEARQYDDDRSEFGGFGCATGKVQIIQQINHDGEVNRARYMPQNPFIIATKTVNAEVYVFDYSKHPSKPPLDGACNPDLKLRGHSSEGYGLSWSKFKQGHLLSGSDDAQICLWDINATPKNKSLDAQQIFKAHEGVVEDVAWHLRHEYLFGSVGDDQYLLIWDLRSPSASKPVQSVVAHSMEVNCLAFNPFNEWVVATGSTDKTVKLFDLRKLSTALHTFDSHKEEVFQVGWNPKNETILASCCLGRRLMVWDLSRIDEEQTVEDAEDGPPELLFIHGGHTSKISDFSWNPCEDWVISSVAEDNILQIWQMAENIYHDEDDAPGEEPSKAS

SEQ ID NO: 1117 - protein, 424 aa, Arabidopsis thaliana
MGKDEEEMRGEIEERLINEEYKIWKKNTPFLYDLVITHALEWPSLTVEWLPDREEPSGKDYSVQKMILGTHTSESEPNYLMLAQVQLPLDDTESEARQYDDDRSEFGGFGCATGKVQIIQQINHDGEVNRARYMPQNPFIIATKTVNAEVYVFDYSKHPSKPPLDGACNPDLKLRGHSSEGYGLSWSKFKQGHLLSGSDDAQICLWDINATPKNKSLDAQQIFKAHEGVVEDVAWHLRHEYLFGSVGDDQYLLIWDLRSPSASKPVQSVVAHSMEVNCLAFNPFNEWVVATGSTDKTVKLFDLRKLSTALHTFDSHKEEVFQVGWNPKNETILASCCLGRRLMVWDLSRIDEEQTVEDAEDGPPELLFIHGGHTSKISDFSWNPCEDWVISSVAEDNILQIWQMAENIYHDEDDAPGEEPSKAS

SEQ ID NO: 1118 - protein, 417 aa, Arabidopsis thaliana
MRGEIEERLINEEYKIWKKNTPFLYDLVITHALEWPSLTVEWLPDREEPSGKDYSVQKMILGTHTSESEPNYLMLAQVQLPLDDTESEARQYDDDRSEFGGFGCATGKVQIIQQINHDGEVNRARYMPQNPFIIATKTVNAEVYVFDYSKHPSKPPLDGACNPDLKLRGHSSEGYGLSWSKFKQGHLLSGSDDAQICLWDINATPKNKSLDAQQIFKAHEGVVEDVAWHLRHEYLFGSVGDDQYLLIWDLRSPSASKPVQSVVAHSMEVNCLAFNPFNEWVVATGSTDKTVKLFDLRKLSTALHTFDSHKEEVFQVGWNPKNETILASCCLGRRLMVWDLSRIDEEQTVEDAEDGPPELLFIHGGHTSKISDFSWNPCEDWVISSVAEDNILQIWQMAENIYHDEDDAPGEEPSKAS

SEQ ID NO: 1119 - DNA, 1833 bp, Arabidopsis thaliana
ccctgacgtagcaaaacacacatcacacaccattttcacaacatcgtacttatcgccttcctctctctctcaatacctctctcaatttctggatccaccatgcaagctcttcaatcttcatctctccgtgcttctcctccaaacccacttcgcttaccatcaaatcgtcaatcacatcagctaattaccaatgcgagacctttgcgaagacaacaacgttccttcatctccgcatcagcatccactgtctccgctcctaaacgcgaaacagatccgaagaaacgagttgtcattactggtatgggtctcgtctctgtgtttggtaacgatgttgatgcttactacgagaaattgttgtctggtgagagtggaatcagtttgattgatcgtttcgatgcttccaagttccctactcgattcggtggtcagatccgtgggtttagctctgaaggttatattgatggcaagaatgagcgtaggcttgatgattgtttgaaatattgcattgttgctggtaaaaaagctcttgaaagtgccaatcttggtggtgataagcttaacacgattgataagaggaaagctggagtactagttgggactggaatgggaggtttaactgtgttttcagaaggtgttcagaatttgattgagaagggtcataggaggattagtccattttttataccttatgctataacaaatatgggttctgctttgttggcgattgatcttggtcttatgggtcctaactattcgatttcaactgcttgtgctacttcgaattactgcttttacgctgctgcgaatcacattcgtcgtggtgaagctgatatgatgattgctggtgggactgaggctgctattattcctattgggttgggaggttttgttgcttgtagggcattgtcccagagaaatgatgaccctcaaactgcttccaggccgtgggataaagcaagagatgggtttgttatgggtgaaggagctggtgttctggtgatggaaagcttggaacatgcaatgaaacgtggtgctccaattgtagcagaatatcttggaggtgctgttaattgtgatgctcaccatatgactgatccaagagctgatggtcttggggtttcttcatgcattgaaagatgcctggaagatgctggtgtatcacctgaggaggtaaattacatcaatgcacatgcaacttccactcttgctggtgatcttgctgagattaatgccattaaaaaggtattcaagagcacttcagggatcaaaatcaacgccaccaagtctatgataggtcactgcctcggtgcagctggaggtctagaagccatcgccaccgtgaaggctatcaacactggatggctgcatccttccatcaaccaatttaacccagaacaagctgtggactttgacacggtcccaaacgagaagaagcaacacgaggttgatgttgccatatcaaactcgttcgggttcggtggacacaactcggtagtcgccttctctgccttcaaaccctgatttcttcataccttttagattctctgccctatcggttactatcatcatccatcatccatcaccaccacttgcagcttcttggttcacaagttggagctcttcctctggccttttgcggttctttcattccccgtttcttacggttgctgagatttcagattttgtttgttctctctcttgtctgcggaatgttgtgtatcttagttcgttccatatttgcgtaatttataaaaacagaaactgagagaatcttgtagtaacggtgttattgtcagaataatccaattaggggattctcatcttttatttctc

SEQ ID NO: 1120 - protein, 473 aa, Arabidopsis thaliana
MQALQSSSLRASPPNPLRLPSNRQSHQLITNARPLRRQQRSFISASASTVSAPKRETDPKKRVVITGMGLVSVFGNDVDAYYEKLLSGESGISLIDRFDASKFPTRFGGQIRGFSSEGYIDGKNERRLDDCLKYCIVAGKKALESANLGGDKLNTIDKRKAGVLVGTGMGGLTVFSEGVQNLIEKGHRRISPFFIPYAITNMGSALLAIDLGLMGPNYSISTACATSNYCFYAAANHIRRGEADMMIAGGTEAAIIPIGLGGFVACRALSQRNDDPQTASRPWDKARDGFVMGEGAGVLVMESLEHAMKRGAPIVAEYLGGAVNCDAHHMTDPRADGLGVSSCIERCLEDAGVSPEEVNYINAHATSTLAGDLAEINAIKKVFKSTSGIKINATKSMIGHCLGAAGGLEAIATVKAINTGWLHPSINQFNPEQAVDFDTVPNEKKQHEVDVAISNSFGFGGHNSVVAFSAFKP

SEQ ID NO: 1121 - protein, 406 aa, Arabidopsis thaliana
MGLVSVFGNDVDAYYEKLLSGESGISLIDRFDASKFPTRFGGQIRGFSSEGYIDGKNERRLDDCLKYCIVAGKKALESANLGGDKLNTIDKRKAGVLVGTGMGGLTVFSEGVQNLIEKGHRRISPFFIPYAITNMGSALLAIDLGLMGPNYSISTACATSNYCFYAAANHIRRGEADMMIAGGTEAAIIPIGLGGFVACRALSQRNDDPQTASRPWDKARDGFVMGEGAGVLVMESLEHAMKRGAPIVAEYLGGAVNCDAHHMTDPRADGLGVSSCIERCLEDAGVSPEEVNYINAHATSTLAGDLAEINAIKKVFKSTSGIKINATKSMIGHCLGAAGGLEAIATVKAINTGWLHPSINQFNPEQAVDFDTVPNEKKQHEVDVAISNSFGFGGHNSVVAFSAFKP

SEQ ID NO: 1122 - protein, 305 aa, Arabidopsis thaliana
MGGLTVFSEGVQNLIEKGHRRISPFFIPYAITNMGSALLAIDLGLMGPNYSISTACATSNYCFYAAANHIRRGEADMMIAGGTEAAIIPIGLGGFVACRALSQRNDDPQTASRPWDKARDGFVMGEGAGVLVMESLEHAMKRGAPIVAEYLGGAVNCDAHHMTDPRADGLGVSSCIERCLEDAGVSPEEVNYINAHATSTLAGDLAEINAIKKVFKSTSGIKINATKSMIGHCLGAAGGLEAIATVKAINTGWLHPSINQFNPEQAVDFDTVPNEKKQHEVDVAISNSFGFGGHNSVVAFSAFKP

SEQ ID NO: 1123 - DNA, 1373 bp, Arabidopsis thaliana
gtgaatcgaaagattaaaggtcaaatttttgtgtcttctcttcctctgtctcatgccacaatttttagatttcaaactttgatccatgacactctccatagcttcctctctcattcccttcagctttctcagagaattgaagtcgagacattagaagtgtttgttgtgtgtgtgtgtgtgtttctatagaatttttgaattttgtgataaaattgtgtgaatgggagctccaaagctgaagtggacaccagaagaagaaacagctcttaaagctggagtacttaaacatggaactggaaaatggcgtaccattctctcagatcctgtgtatagcacaattctgaagtctcgttctaatgtggatctcaaggacaaatggagaaatataagtgtaacagctttatggggatctaggaagaaggctaagcttgctcttaaaagaactcctttgtcgggtagtaggcaagacgataacgctacagctattaccattgtgtctttagctaatggtgatgtaggaggacaacagattgatgcaccatctcctcctgcaggttcttgtgaacctccaagaccttctacaagtgtggataagattatattggaggctattaccagcttgaagagaccatttggtcctgacggaaagtcgatcttgatgtatatagaggagaatttcaagatgcaaccggatatgaaacggcttgtgacttcaaggctgaagtatttgacaaatgttggaacattagttaagaaaaagcacaaatacaggatttctcagaattatatggctgaaggagaaggacaaaggtctcctcaactcttgttggaaggaaacaaggaaaacactccgaaaccggaggagaatggcgtcaaaaatcttactaaatcccaagtaggtggagaagttatgataatgggtatgacagaaaaagaagctgctgcagcagctgcaagagctgtggcagaagcagaatttgcaatggcagaagctgaagaagcagcaagagaggcagataaagcagaagccgaagctgaagctgcccatatttttgcaaaagcggcgatgaaagctgtgaagtatagaatgcatagccaaactcggtaagaattaagaaaatcattgatgttgtatcggttgatatatcttcaattcttcatgttatgtcaagtttcgatcttgcatcgaaatcaacattttacaatcgccgcagtgtttttagtcagtaacagtgtcttctaactcagatgattatgtaaaacctgttccttctcttgcttctgttgatctggttttgttagtaacttcacaggtttctcgtgaaccattttgaaactggtttgaaaagatataaataaggcctttgatttgt

SEQ ID NO: 1124 - protein, 295 aa, Arabidopsis thaliana
MGAPKLKWTPEEETALKAGVLKHGTGKWRTILSDPVYSTILKSRSNVDLKDKWRNISVTALWGSRKKAKLALKRTPLSGSRQDDNATAITIVSLANGDVGGQQIDAPSPPAGSCEPPRPSTSVDKIILEAITSLKRPFGPDGKSILMYIEENFKMQPDMKRLVTSRLKYLTNVGTLVKKKHKYRISQNYMAEGEGQRSPQLLLEGNKENTPKPEENGVKNLTKSQVGGEVMIMGMTEKEAAAAAARAVAEAEFAMAEAEEAAREADKAEAEAEAAHIFAKAAMKAVKYRMHSQTR

SEQ ID NO: 1125 - protein, 149 aa, Arabidopsis thaliana
MYIEENFKMQPDMKRLVTSRLKYLTNVGTLVKKKHKYRISQNYMAEGEGQRSPQLLLEGNKENTPKPEENGVKNLTKSQVGGEVMIMGMTEKEAAAAAARAVAEAEFAMAEAEEAAREADKAEAEAEAAHIFAKAAMKAVKYRMHSQTR

SEQ ID NO: 1126 - DNA, 1301 bp, Arabidopsis thaliana
atcatttcttcgtgagatgatgttttcggtaacgaaaggtttaatcagaaacttggccttgttccaagttcgtcttcctcctctcgtagcagcagtaatggctccttcaagcgtcgttagggtttactctaccgctacctctccttctccttctgaactttccgtcaagaaagttggtactcataatggaagctttcactgcgacgaagctctcggttgcttcatgattcgcctcgtcgataaattctccggcgctgatatcgtccgttctcgtgaccctaagatattggcagaacttgatgcagtgcttgatgttggaggtgtttatgatccggagcatgaccgttatgatcatcaccagaaaggttttgaagaggtttttggacatggcttcaacactaagctcagtagtgctggtcttgtttacaagcattttggaaaggagatcatagctaaggaacttaatgttgaacaagatcaccctgatgttcttcgattgtttttagctgtctacaaaagcttcatggaggcaattgatgctgtggacaatggaattaatcggtatgatactgatcagcctccacgatatgtgaacaacacacatctgtccgcaagggttgggagattaaatctggattggattgatcctgaccagtcacaagagaaggagaatgaagctttccaacgtgcaatggctctagctggaaaagagttcctcgaaagtgttcagttccatgcaagatcgtggttaccggctcgatcaattgtgatgcagtgtcttgaagaaagattcaagacagaccccagcggtgagatcatgatattggatagattttgcccttggaagcttcatttgttcgagcttgagcaagaaatgaagatcgagcctctcatcaaatacgtcatctaccaggacgagagagcaaagcagtggagagttcaagcagtggcggtcgcaccagacaggtttgagaaccgaaagcctctccctgagaaatggagaggccttagggatgaggaactctctaaagctgctgagattcccggttgcgtctttgtccatatgagtggctttattggcggaaaccaatcctatgacggcgctctatccatggctcgaaccgcactcactctctgactcagctttggctcggcatcaaaagaatcatttacccattaaaccatagagagagacagagagagttttgatattgccattatcttttacaatttctgtttcattgagtgaccattgaatgattcttcttttcataagcgagtcttctcgtgacaaaaaattt

SEQ ID NO: 1127 - protein, 378 aa, Arabidopsis thaliana
SFLREMMFSVTKGLIRNLALFQVRLPPLVAAVMAPSSVVRVYSTATSPSPSELSVKKVGTHNGSFHCDEALGCFMIRLVDKFSGADIVRSRDPKILAELDAVLDVGGVYDPEHDRYDHHQKGFEEVFGHGFNTKLSSAGLVYKHFGKEIIAKELNVEQDHPDVLRLFLAVYKSFMEAIDAVDNGINRYDTDQPPRYVNNTHLSARVGRLNLDWIDPDQSQEKENEAFQRAMALAGKEFLESVQFHARSWLPARSIVMQCLEERFKTDPSGEIMILDRFCPWKLHLFELEQEMKIEPLIKYVIYQDERAKQWRVQAVAVAPDRFENRKPLPEKWRGLRDEELSKAAEIPGCVFVHMSGFIGGNQSYDGALSMARTALTL

SEQ ID NO: 1128 - protein, 373 aa, Arabidopsis thaliana
MMFSVTKGLIRNLALFQVRLPPLVAAVMAPSSVVRVYSTATSPSPSELSVKKVGTHNGSFHCDEALGCFMIRLVDKFSGADIVRSRDPKILAELDAVLDVGGVYDPEHDRYDHHQKGFEEVFGHGFNTKLSSAGLVYKHFGKEIIAKELNVEQDHPDVLRLFLAVYKSFMEAIDAVDNGINRYDTDQPPRYVNNTHLSARVGRLNLDWIDPDQSQEKENEAFQRAMALAGKEFLESVQFHARSWLPARSIVMQCLEERFKTDPSGEIMILDRFCPWKLHLFELEQEMKIEPLIKYVIYQDERAKQWRVQAVAVAPDRFENRKPLPEKWRGLRDEELSKAAEIPGCVFVHMSGFIGGNQSYDGALSMARTALTL

SEQ ID NO: 1129 - protein, 372 aa, Arabidopsis thaliana
MFSVTKGLIRNLALFQVRLPPLVAAVMAPSSVVRVYSTATSPSPSELSVKKVGTHNGSFHCDEALGCFMIRLVDKFSGADIVRSRDPKILAELDAVLDVGGVYDPEHDRYDHHQKGFEEVFGHGFNTKLSSAGLVYKHFGKEIIAKELNVEQDHPDVLRLFLAVYKSFMEAIDAVDNGINRYDTDQPPRYVNNTHLSARVGRLNLDWIDPDQSQEKENEAFQRAMALAGKEFLESVQFHARSWLPARSIVMQCLEERFKTDPSGEIMILDRFCPWKLHLFELEQEMKIEPLIKYVIYQDERAKQWRVQAVAVAPDRFENRKPLPEKWRGLRDEELSKAAEIPGCVFVHMSGFIGGNQSYDGALSMARTALTL

SEQ ID NO: 1130 - DNA, 1240 bp, Arabidopsis thaliana
agatcgttatcgtttcggggtcacagggactttcactctttctctctctctgcaacaaagaagaaatggaggtagcagcagcgactgcgacgagcttcacaacgcttcgagctcgtacgtcagcgattatcccgtcttctacacgtaatctgagatctaaaccgagattttcttcatcttcatctctcagagcttctctttcgaatggctttctttcgccgtataccggaggaagcatctctagtgacttatgcggcgctaagcttcgtgcggaatcgcttaatccgttaaatttttccagttccaagcctaaacgcggagttgtcactatggttatacctttctcaaagggaagtgcacacgaacaacctcctcctgatttggcatcatatttgttcaagaaccgaattgtatatttgggaatgtctctcgtaccttcagttactgagttgatacttgcggagtttctttaccttcagtatgaagacgagaaaaagcctatttacctttacataaactcgactgggacaaccaagaatggtgaaaagttgggctatgatactgaggcttttgcaatctatgatgtcatggggtatgtcaaaccaccaatctttactctttgcgtcgggaatgcttggggtgaagctgctttgcttctgactgctggtgcaaaaggaaatcgatctgcgttgccctcatcaactattatgataaagcagcccattgctcgatttcaaggccaagcaactgatgttgaaattgcaaggaaagaaatcaagcacataaagacagaaatggtcaagctgtattcaaagcatattggtaaatccccggagcagattgaagctgacatgaaacgcccgaaatattttagtcccactgaggctgttgaatatgggatcattgataaggtggtttacaatgaaaggggcagccaagacagaggagttgtgtctgaccttaaaaaggcacaactcatttgaatgtcagaactgtcttccgaaatcccatgattaacaggttggagatcttaccgctgatcaaatggggaatcagtgaaccattcaccggcacagaactgaggtaaagtctggaaaacatgttaaaaaaggttactagtaatgctgcaattgtagggttatttgaacagaaacaaacccatatgtgtaggcttgtgaatgcctagaaacaggattggtgtatcttcaatatatgtttctaagatgaatcaatttcatat

SEQ ID NO: 1131 - protein, 326 aa, Arabidopsis thaliana
IVIVSGSQGLSLFLSLCNKEEMEVAAATATSFTTLRARTSAIIPSSTRNLRSKPRFSSSSSLRASLSNGFLSPYTGGSISSDLCGAKLRAESLNPLNFSSSKPKRGVVTMVIPFSKGSAHEQPPPDLASYLFKNRIVYLGMSLVPSVTELILAEFLYLQYEDEKKPIYLYINSTGTTKNGEKLGYDTEAFAIYDVMGYVKPPIFTLCVGNAWGEAALLLTAGAKGNRSALPSSTIMIKQPIARFQGQATDVEIARKEIKHIKTEMVKLYSKHIGKSPEQIEADMKRPKYFSPTEAVEYGIIDKVVYNERGSQDRGVVSDLKKAQLI

SEQ ID NO: 1132 - protein, 305 aa, Arabidopsis thaliana
MEVAAATATSFTTLRARTSAIIPSSTRNLRSKPRFSSSSSLRASLSNGFLSPYTGGSISSDLCGAKLRAESLNPLNFSSSKPKRGVVTMVIPFSKGSAHEQPPPDLASYLFKNRIVYLGMSLVPSVTELILAEFLYLQYEDEKKPIYLYINSTGTTKNGEKLGYDTEAFAIYDVMGYVKPPIFTLCVGNAWGEAALLLTAGAKGNRSALPSSTIMIKQPIARFQGQATDVEIARKEIKHIKTEMVKLYSKHIGKSPEQIEADMKRPKYFSPTEAVEYGIIDKVVYNERGSQDRGVVSDLKKAQLI

SEQ ID NO: 1133 - protein, 217 aa, Arabidopsis thaliana
MVIPFSKGSAHEQPPPDLASYLFKNRIVYLGMSLVPSVTELILAEFLYLQYEDEKKPIYLYINSTGTTKNGEKLGYDTEAFAIYDVMGYVKPPIFTLCVGNAWGEAALLLTAGAKGNRSALPSSTIMIKQPIARFQGQATDVEIARKEIKHIKTEMVKLYSKHIGKSPEQIEADMKRPKYFSPTEAVEYGIIDKVVYNERGSQDRGVVSDLKKAQLI

SEQ ID NO: 1134 - DNA, 1565 bp, Arabidopsis thaliana
ataaatgggtgtatatatacatctttggctataaatataaggtcgaaccaaaataaaatatagatttggggaaactaataaatgatatagagaatccacctctctcccttatttttttttcttggtttcttgacctattattattgattagtaatagtgagagaggcatattttggagatacacataaacacataaattggaagaataaaataaaagagagtgagagatggctaaatcagatatgttgccgttcttggcgatggtgttggtgcaaatcggctacgcaggcatgaacattacgtcgaagatggctatggaggccggtatgaagccactcatcctggtcgcttatcgtcagatatttgccactatcgccacttttccggtcgcattttttctcgaacggaagacaagaccgaagatcacacttaggattcttgtccaagtcttcttctgctccattactggtgcgactggaaaccaagtgctatatttcgtaggacttcagaattcatctccgaccattgcttgtgccttaactaatctcttaccagcggtcactttcctcctcgccgcaatattcagacaagaaaccgtggggatcaagaaggcatcaggacaagccaaagtgatagggacgctagtatgtgtgatcggagccatggttctctccttctaccatggtcacaccatcggcattggagaatccaagatccattgggcctacgctgaaaacatcacgaaacatggttccagttctggccattctaatttcttcttgggaccttttcttattatggctgctgccgtttcttgggccgcttggttcattatccagacgaagatgagtgaaacatttgcagcaccgtacacgagcacactactaatgtgtttgatgggaagtatccaatgtggagccattgctttgatctccgatcatacaatctctgattggtctctcagctctcctctccgcttcatatccgccctttatgccggagtggtggcgtctgcgttagctttctgcctaatgtcatgggctatgcagaggaaaggtcctctgtacgtctctgttttcagccctttacttctcgtagttgtcgccattttcagctgggctcttcttgaagagaaactctacaccggcacgtttatgggatcagcacttgtggttattggtctctatggcgtattgtgggggaaagacagagaggtgagtgagaaggaagaagaaagggagaaggtgaaacaacaaaaccataaagtcaagagtgaaagtaatgaagatattgaatcgagattaccggtagcaagtagtggaaatggttccacaaggtctacatcgccttaaaatggtgattgcttcttcatcatatataagtatgagctatggaagaacctttttgggatttcttgttatctaagttactgcaactaaattggattttcggagtgtttaattttgtatcccattttgaggctaatgatggagtgttgatttgtgtgttcatcctatggacaacaaatatcacctgtttgatctctatatatattcagtattctt

SEQ ID NO: 1135 - protein, 374 aa, Arabidopsis thaliana
MAKSDMLPFLAMVLVQIGYAGMNITSKMAMEAGMKPLILVAYRQIFATIATFPVAFFLERKTRPKITLRILVQVFFCSITGATGNQVLYFVGLQNSSPTIACALTNLLPAVTFLLAAIFRQETVGIKKASGQAKVIGTLVCVIGAMVLSFYHGHTIGIGESKIHWAYAENITKHGSSSGHSNFFLGPFLIMAAAVSWAAWFIIQTKMSETFAAPYTSTLLMCLMGSIQCGAIALISDHTISDWSLSSPLRFISALYAGVVASALAFCLMSWAMQRKGPLYVSVFSPLLLVVVAIFSWALLEEKLYTGTFMGSALVVIGLYGVLWGKDREVSEKEEEREKVKQQNHKVKSESNEDIESRLPVASSGNGSTRSTSP

SEQ ID NO: 1136 - protein, 369 aa, Arabidopsis thaliana
MLPFLAMVLVQIGYAGMNITSKMAMEAGMKPLILVAYRQIFATIATFPVAFFLERKTRPKITLRILVQVFFCSITGATGNQVLYFVGLQNSSPTIACALTNLLPAVTFLLAAIFRQETVGIKKASGQAKVIGTLVCVIGAMVLSFYHGHTIGIGESKIHWAYAENITKHGSSSGHSNFFLGPFLIMAAAVSWAAWFIIQTKMSETFAAPYTSTLLMCLMGSIQCGAIALISDHTISDWSLSSPLRFISALYAGVVASALAFCLMSWAMQRKGPLYVSVFSPLLLVVVAIFSWALLEEKLYTGTFMGSALVVIGLYGVLWGKDREVSEKEEEREKVKQQNHKVKSESNEDIESRLPVASSGNGSTRSTSP

SEQ ID NO: 1137 - protein, 363 aa, Arabidopsis thaliana
MVLVQIGYAGMNITSKMAMEAGMKPLILVAYRQIFATIATFPVAFFLERKTRPKITLRILVQVFFCSITGATGNQVLYFVGLQNSSPTIACALTNLLPAVTFLLAAIFRQETVGIKKASGQAKVIGTLVCVIGAMVLSFYHGHTIGIGESKIHWAYAENITKHGSSSGHSNFFLGPFLIMAAAVSWAAWFIIQTKMSETFAAPYTSTLLMCLMGSIQCGAIALISDHTISDWSLSSPLRFISALYAGVVASALAFCLMSWAMQRKGPLYVSVFSPLLLVVVAIFSWALLEEKLYTGTFMGSALVVIGLYGVLWGKDREVSEKEEEREKVKQQNHKVKSESNEDIESRLPVASSGNGSTRSTSP

SEQ ID NO: 1138 - DNA, 1259 bp, Arabidopsis thaliana
gagaccccattaagaccagaagtagtcagagtttttcaataattgtaccaaattctctctattcttcttctctttcattttagatattttctcttacgcagactcattgctttcctctctccatggaagctactgagttatgatccttaccctcaccggtctttaactatgcttagaaacaaacctagagcagccgtgacgactaagaaacaaacatctctgttaatggctgatcaacctccacctccaaagcctgacacttgccactgctcaccatctctctttagctctcccaagtttaggtttttcacttctaagatgatgatgactccctttgactctgatttctcactcgttagccctacgtctatactcgaagctaacccatccatcttctcctccaaaaaccctaaacccgtttcctatttcgagccaactatccctaatccccagcgttttcactctccagacgtctttggcctagccgatctcgtgaaagacggagacagtaacagagaccactctagaaaacctgtcaacaagatggtccttttcgggtcaaagctcagagtccagatcccatcatcagctgattttggaactaaaaccggcatcagatatcctccttgtcaacttagtccttgtgtccaaacgaaggtcttagcagtgagcgagattgaccagacggaggactacacgcgcgtcatctctcacggtcctaacccaaccatcactcatatcttcgacaactctgttttcgtggaggctactccttgctctgttcctttaccccaaccagccatggagaccaagagcaccgagagttttctaagccgttgcttcacctgcaagaagaatcttgaccagaaacaggacatctacatatacaggggagagaaaggtttttgcagcagcgagtgcaggtaccaggagatgcttcttgatcaaatggagacctagctagcactccttctccatctcttttcatttttattgattttgtcacagcatcatctacttttgtattattcttttagttctctgatgcttcttctctttctttctttttttgggtgggggtatttgtatttctagtcataacctttctcgcctgcagatatgtgaaagatagagagagagttgataacttttttctttgtgtcatgagagtgagtgactcggagggctcaataatatcataaacttgcagaatactgccatctgaatcagaaaatatcaaaagcatcagtcttttccat

SEQ ID NO: 1139 - protein, 263 aa, Arabidopsis thaliana
MLRNKPRAAVTTKKQTSLLMADQPPPPKPDTCHCSPSLFSSPKFRFFTSKMMMTPFDSDFSLVSPTSILEANPSIFSSKNPKPVSYFEPTIPNPQRFHSPDVFGLADLVKDGDSNRDHSRKPVNKMVLFGSKLRVQIPSSADFGTKTGIRYPPCQLSPCVQTKVLAVSEIDQTEDYTRVISHGPNPTITHIFDNSVFVEATPCSVPLPQPAMETKSTESFLSRCFTCKKNLDQKQDIYIYRGEKGFCSSECRYQEMLLDQMET

SEQ ID NO: 1140 - protein, 244 aa, Arabidopsis thaliana
MADQPPPPKPDTCHCSPSLFSSPKFRFFTSKMMMTPFDSDFSLVSPTSILEANPSIFSSKNPKPVSYFEPTIPNPQRFHSPDVFGLADLVKDGDSNRDHSRKPVNKMVLFGSKLRVQIPSSADFGTKTGIRYPPCQLSPCVQTKVLAVSEIDQTEDYTRVISHGPNPTITHIFDNSVFVEATPCSVPLPQPAMETKSTESFLSRCFTCKKNLDQKQDIYIYRGEKGFCSSECRYQEMLLDQMET

SEQ ID NO: 1141 - protein, 213 aa, Arabidopsis thaliana
MMMTPFDSDFSLVSPTSILEANPSIFSSKNPKPVSYFEPTIPNPQRFHSPDVFGLADLVKDGDSNRDHSRKPVNKMVLFGSKLRVQIPSSADFGTKTGIRYPPCQLSPCVQTKVLAVSEIDQTEDYTRVISHGPNPTITHIFDNSVFVEATPCSVPLPQPAMETKSTESFLSRCFTCKKNLDQKQDIYIYRGEKGFCSSECRYQEMLLDQMET

SEQ ID NO: 1142 - DNA, 1194 bp, Arabidopsis thaliana
tgccctcttaccttttcagagagagaaacaatatttctaatctattacaagtaacatgatcggccaacttatgaacctcaaggccacggagctctgtctcggcctccccggcggcgctgaagcagttgagagtcctgccaaatcggcggtgggaagcaagagaggcttctccgaaaccgttgatctcatgctcaatcttcaatctaacaaagaaggctccgttgatctcaaaaacgtttctgctgttcccaaggagaagactacccttaaagatccttctaagcctcctgctaaagcacaagtggtgggatggccacctgtgaggaactacaggaagaacatgatgactcagcagaagaccagtagtggtgcggaggaggccagcagtgagaaggccgggaactttggtggaggagcagccggagccggcttggtgaaggtctccatggacggtgctccatatctgaggaaagttgacctcaagatgtacaaaagctaccaggatctttctgatgcattggccaaaatgttcagctcctttactatgggaaactatggagcacaaggaatgatagatttcatgaacgagagcaagctaatgaatctgctgaatagctctgagtatgtgccaagctacgaggacaaagatggtgactggatgctcgttggcgatgtcccatgggaaatgtttgtcgagtcttgcaaacgtttgcgcattatgaagggatctgaagcagttggacttgctccgagagcaatggagaagtactgcaagaacagatcttgaattaataataaaaaaaaagaagcatcaatgatcaacaatatgacgggttcttgattttatatgtatttttatgattgtatgtggctatcacctatatatgtgtgttgtaattttaaatacttgatgggtatatagggcagtattttaccagtaagatgtggacaaacttgtaatgtgaccaaaagagaggaaacttcaatatctctgtgtttgtgtcatatttattgcccaacatgtgtctgtcggtttgatgatcaatcacaacttgatatgtgcatacatataaatgtgtgtatgtaggtgtgtgtacatgtacatgtgttttgatccctactctgctacttgtcgtttcttgtgtgtgttatctaatagttttttcccaaaatgaataattcgttgttatgttt

SEQ ID NO: 1143 - protein, 243 aa, Arabidopsis thaliana
MIGQLMNLKATELCLGLPGGAEAVESPAKSAVGSKRGFSETVDLMLNLQSNKEGSVDLKNVSAVPKEKTTLKDPSKPPAKAQVVGWPPVRNYRKNMMTQQKTSSGAEEASSEKAGNFGGGAAGAGLVKVSMDGAPYLRKVDLKMYKSYQDLSDALAKMFSSFTMGNYGAQGMIDFMNESKLMNLLNSSEYVPSYEDKDGDWMLVGDVPWEMFVESCKRLRIMKGSEAVGLAPRAMEKYCKNRS

SEQ ID NO: 1144 - protein, 238 aa, Arabidopsis thaliana
MNLKATELCLGLPGGAEAVESPAKSAVGSKRGFSETVDLMLNLQSNKEGSVDLKNVSAVPKEKTTLKDPSKPPAKAQVVGWPPVRNYRKNMMTQQKTSSGAEEASSEKAGNFGGGAAGAGLVKVSMDGAPYLRKVDLKMYKSYQDLSDALAKMFSSFTMGNYGAQGMIDFMNESKLMNLLNSSEYVPSYEDKDGDWMLVGDVPWEMFVESCKRLRIMKGSEAVGLAPRAMEKYCKNRS

SEQ ID NO: 1145 - protein, 199 aa, Arabidopsis thaliana
MLNLQSNKEGSVDLKNVSAVPKEKTTLKDPSKPPAKAQVVGWPPVRNYRKNMMTQQKTSSGAEEASSEKAGNFGGGAAGAGLVKVSMDGAPYLRKVDLKMYKSYQDLSDALAKMFSSFTMGNYGAQGMIDFMNESKLMNLLNSSEYVPSYEDKDGDWMLVGDVPWEMFVESCKRLRIMKGSEAVGLAPRAMEKYCKNRS

SEQ ID NO: 1146 - DNA, 1592 bp, Arabidopsis thaliana
atcgccgagtctgcttcttcttctctctctctctctctagtggtcacactcacttcacacccgtgaaaaaaccctaggaaccaaatatggtgaacctctcgagatccgtcgcgttgatctctgtattcctccttcctttacttagcttctctttctccgtcgataatccgacggatcggcgtgttcttgttcttctcgatgatttatcactcaaatcctctcattctatcttcttcaacactctcaagtctcgtggattcgatctcgatttcaagttagctgaagattcgaagcttgcgcttcaacgatacggccagtacttgtacgatgggttgatcatcttcgccccatcaacagaacggtttggaggatccttggattcgaaatccattgctgattttgttgattccggtcgtgacttgatcttatcggcggatactgctgcatctgatttgattaggggtattgccacagagtgtggggttgatttcgatgaggattcttcagctatggttattgatcatactagcttctccgtctctgatgttgacggcgaccacaccttgattgctgccgacgatttagtgaaatccgatgtcattttgggaaaaaccaagattgaggctcccgtgctcttcagaggagttgcacattcgttgaaccctactaacaatctggttttgaaagttctttcagcctctccatcagcttattctgctaacccaagctcgaagttgtctagtcccccccagctcactgggtcttcaatttcgctagtctcggtcatgcaggccaggaacaatgctagggttgtgatctcaggctcagtgcagttgtttagcgataggttaatcagatctggtgtccagaaagcagggagtccgaaccaatacgaaaaatctggcaacgaacagtttgtgactgaactaagcaaatgggtcttccacgaaaggggccatctgaaggctggtaatcttgtacaccatagggttggagaaacagatgagccagctatatataggataaaggatgacctggaattttctgtagagatatatgagtggtcaggaaagagctgggagccgtatgttgctaacgatgtgcaggttcagttttacatgatgagcccgtatgtgttgaaaaccctgtcaacagacaagaagggtctgtttcatacatctttcaaggttcctgatgtctacggtgtattccagtttaaggttgaatatgaaaagctaggctacactacattatctctttcgaagcagattccggtgcggccttacagacacaatgagtatgagagatttatcccaactgcgtatccttattatggagcctgctttacgacgatggctggtttcttcgtcttcagcttcgtctacctctaccataagtagaatcccttaaatggtggccaagtcccataaagtaagccaaacctccatatttagatgagaaaaaacaactttcgaactagagaccaatatttttgggcagcaaggttttcatatgtttctagttttagccaaacagttgcaaccttctttttgtttcccagatatttctatgttaacgtaactttacacccc

SEQ ID NO: 1147 - protein, 437 aa, Arabidopsis thaliana
MVNLSRSVALISVFLLPLLSFSFSVDNPTDRRVLVLLDDLSLKSSHSIFFNTLKSRGFDLDFKLAEDSKLALQRYGQYLYDGLIIFAPSTERFGGSLDSKSIADFVDSGRDLILSADTAASDLIRGIATECGVDFDEDSSAMVIDHTSFSVSDVDGDHTLIAADDLVKSDVILGKTKIEAPVLFRGVAHSLNPTNNLVLKVLSASPSAYSANPSSKLSSPPQLTGSSISLVSVMQARNNARVVISGSVQLFSDRLIRSGVQKAGSPNQYEKSGNEQFVTELSKWVFHERGHLKAGNLVHHRVGETDEPAIYRIKDDLEFSVEIYEWSGKSWEPYVANDVQVQFYMMSPYVLKTLSTDKKGLFHTSFKVPDVYGVFQFKVEYEKLGYTTLSLSKQIPVRPYRHNEYERFIPTAYPYYGACFTTMAGFFVFSFVYLYHK

SEQ ID NO: 1148 - protein, 296 aa, Arabidopsis thaliana
MVIDHTSFSVSDVDGDHTLIAADDLVKSDVILGKTKIEAPVLFRGVAHSLNPTNNLVLKVLSASPSAYSANPSSKLSSPPQLTGSSISLVSVMQARNNARVVISGSVQLFSDRLIRSGVQKAGSPNQYEKSGNEQFVTELSKWVFHERGHLKAGNLVHHRVGETDEPAIYRIKDDLEFSVEIYEWSGKSWEPYVANDVQVQFYMMSPYVLKTLSTDKKGLFHTSFKVPDVYGVFQFKVEYEKLGYTTLSLSKQIPVRPYRHNEYERFIPTAYPYYGACFTTMAGFFVFSFVYLYHK

SEQ ID NO: 1149 - DNA, 1267 bp, Arabidopsis thaliana
aaattggcatgttcaccatttttccacaaactcaaatttgctccaatgcctgtacttttctcctctcgttctctcatactctccattattgtccccttacttatatctatcgctctctacaaactcgacacattcgaccccgctattgttccttccgatgcattcacatcctctgctacttcactcccgccgcttataaacgacgaatttctcaccggagctgagtttatcggtgtcggtcttctcaatatacccgaagatatcgcctaccataaggaatctaatctcatctacactggttgtgttgatggatgggtgaaacgagtcaaggtcgccgactcggttaatgactcagtcgttgaggattgggtcaatactggtggtagaccgctcggaatcgcgttcggaatccacggcgaagtcattgtcgcagacgtacacaagggactgttgaatataagcggtgacggaaagaagacggaattgttgacggacgaagcggacggtgtgaagtttaagctgacggatgcagttaccgttgcagataacggcgttttgtatttcacagatgcttcttacaagtacactctcaatcaattgagtttagacatgttagaagggaaaccttttggacgactcttgagctttgatcccaccacacgtgttacaaaagtacttctcaaagacctctacttcgctaatggcatcaccatctctcctgatcaaactcatctcatcttctgtgaaactccaatgaaaaggtgcagcaagtattacatcagtgaggagcgtgtggaggtattcactcaaagcttaccaggttatccagataacattcgttacgatggagatggacattactggattgcattgccttcgggagtcacgacattgtggaatatctcgttgaaataccctttcttgaggaaactcacagcaatggtggctaagtacggcgtggatcttatgtttatggagaatgcaggcgttttacaggtggatttggatggaaatcccatcgcgtactaccatgatccaaaactctctcacatagccacatgtgacaagattgggaaatatctctattgtggaagtctctcgcaatcacatatcctccgacttgatctcctgaaatatcctgcacagaacaagaaactttgaaatattatgttttcacaaataaggaaagtttccattttaggaaggagcattcactgtcacaaaaaatgtaaactcatttcctgagaatgaatgatgattgtatctc

SEQ ID NO: 1150 - protein, 386 aa, Arabidopsis thaliana
KLACSPFFHKLKFAPMPVLFSSRSLILSIIVPLLISIALYKLDTFDPAIVPSDAFTSSATSLPPLINDEFLTGAEFIGVGLLNIPEDIAYHKESNLIYTGCVDGWVKRVKVADSVNDSVVEDWVNTGGRPLGIAFGIHGEVIVADVHKGLLNISGDGKKTELLTDEADGVKFKLTDAVTVADNGVLYFTDASYKYTLNQLSLDMLEGKPFGRLLSFDPTTRVTKVLLKDLYFANGITISPDQTHLIFCETPMKRCSKYYISEERVEVFTQSLPGYPDNIRYDGDGHYWIALPSGVTTLWNISLKYPFLRKLTAMVAKYGVDLMFMENAGVLQVDLDGNPIAYYHDPKLSHIATCDKIGKYLYCGSLSQSHILRLDLLKYPAQNKKL

SEQ ID NO: 1151 - protein, 371 aa, Arabidopsis thaliana
MPVLFSSRSLILSIIVPLLISIALYKLDTFDPAIVPSDAFTSSATSLPPLINDEFLTGAEFIGVGLLNIPEDIAYHKESNLIYTGCVDGWVKRVKVADSVNDSVVEDWVNTGGRPLGIAFGIHGEVIVADVHKGLLNISGDGKKTELLTDEADGVKFKLTDAVTVADNGVLYFTDASYKYTLNQLSLDMLEGKPFGRLLSFDPTTRVTKVLLKDLYFANGITISPDQTHLIFCETPMKRCSKYYISEERVEVFTQSLPGYPDNIRYDGDGHYWIALPSGVTTLWNISLKYPFLRKLTAMVAKYGVDLMFMENAGVLQVDLDGNPIAYYHDPKLSHIATCDKIGKYLYCGSLSQSHILRLDLLKYPAQNKKL

SEQ ID NO: 1152 - DNA, 1267 bp, Arabidopsis thaliana
aataatgtgttgcaaaagaggcaaactatacaacgtgaaagtggtaggtctaccagatcccataccctcattttaatggcggagattacaagggaaagagacaactccaattcaaagctctgattttttccaccaatccccattttttcccttttacaattcttaagctagttttatacttttcttcttcctttcatttgggttaagagaagccatggataccgagtttctccgaaccctagatcgtcagattcttttgggtgtcttcgttgctttcgtcgccgttggtgctggtgctgcttattttcttacatcctccaagaaacgcagagtgtgtttggatccagagaatttcaaggagttcaagcttgttaagagacatcagcttagtcacaatgtggccaagttcgtttttgaactcccaacttctacttctgtgttgggtcttcccattggacaacacatcagttgcaggggaaaggatggtcaaggagaggatgttattaagccatacaccccgactacgttagactctgacgttggacgtttcgaacttgtcattaagatgtatccgcaaggacggatgtctcatcatttcagggagatgcgtgttggagaccatcttgccgtaaagggaccaaagggtaggttcaagtatcaaccaggtcagtttagggcatttggaatgcttgctggaggttcaggcatcactcccatgttccaagtggccagagcaattctagaaaacccaacagacaagacaaaggtgcatctcatttacgccaacgtcacatacgacgacattctcttgaaggaagaattggagggtcttactaccaattaccctgaacaatttaaaatcttctatgttttgaaccagcctccggaagtatgggatggtggtgttggatttgtatcaaaggaaatgattcagactcattgccctgcacctgcatctgatattcagatcctaagatgcggaccaccgccaatgaacaaggccatggctgcaaaccttgaagctctgggatactctccggagatgcaattccagttctgatctgaatatcttcttttggttgctctgaaacggaactcataataatttagttacaatcccaactacgagagttgtgtcttaactgagtgagagttgtatttctgttgtgtgtttgttagcccacttgaaagtttccattgattggtttacgaattggttagacattttggttcacctataccggtttggtgcaaacactttgatgct

SEQ ID NO: 1153 - protein, 281 aa, Arabidopsis thaliana
MDTEFLRTLDRQILLGVFVAFVAVGAGAAYFLTSSKKRRVCLDPENFKEFKLVKRHQLSHNVAKFVFELPTSTSVLGLPIGQHISCRGKDGQGEDVIKPYTPTTLDSDVGRFELVIKMYPQGRMSHHFREMRVGDHLAVKGPKGRFKYQPGQFRAFGMLAGGSGITPMFQVARAILENPTDKTKVHLIYANVTYDDILLKEELEGLTTNYPEQFKIFYVLNQPPEVWDGGVGFVSKEMIQTHCPAPASDIQILRCGPPPMNKAMAANLEALGYSPEMQFQF

SEQ ID NO: 1154 - protein, 164 aa, Arabidopsis thaliana
MYPQGRMSHHFREMRVGDHLAVKGPKGRFKYQPGQFRAFGMLAGGSGITPMFQVARAILENPTDKTKVHLIYANVTYDDILLKEELEGLTTNYPEQFKIFYVLNQPPEVWDGGVGFVSKEMIQTHCPAPASDIQILRCGPPPMNKAMAANLEALGYSPEMQFQF

SEQ ID NO: 1155 - protein, 158 aa, Arabidopsis thaliana
MSHHFREMRVGDHLAVKGPKGRFKYQPGQFRAFGMLAGGSGITPMFQVARAILENPTDKTKVHLIYANVTYDDILLKEELEGLTTNYPEQFKIFYVLNQPPEVWDGGVGFVSKEMIQTHCPAPASDIQILRCGPPPMNKAMAANLEALGYSPEMQFQF

SEQ ID NO: 1156 - DNA, 1458 bp, Arabidopsis thaliana
aaagtattattccgaatgtaaatagtggaacaaaaagaacagctgggaggattttgtttaaaaggacactacacttcccagctttccctcactgcccgaaaagaacactgcagaaacactttcctctgttcacagagaaagagagagatgatgctttacagcaacaatagttggagatcgaattccattttaatacttctacttggtctctccattgtggccgccgcagactccgccggcaaaacttcaccggtcgaagacggcttggtggttaacggcgactttgagacaccgccgtcaaacggcttccctgatgacgcaatcatcgaggacacctccgagatcccgagctggcgatccgatggtacggtggagctaatcaagtccggtcaaaaacaaggcgggatgatcttgatcgtgcctgagggccgtcacgctgttagattaggaaacgatgcagagatcagccaagaacttacggtggagaaaggctctatctactccgtcacgttcagtgcagcccgcacatgtgcacaactcgagtcgctgaatgtttcggtagcttcttctgatgaacctatcgcatcgcaaaccattgacttgcaaacggtgtacagcgttcaaggatgggatccatatgcatgggcgtttgaagcggttgtggatcgcgtccggttggtttttaagaaccctggcatggaggatgatcctacttgtggacctatcattgacgacattgccgttaagaagctctttactcctgataaacccaaaggcaatgcagtgattaatggagattttgaagaaggtccatggatgtttaggaacactaccttaggtgttctgcttccaacaaacctcgatgaagaaatatcgtctcttcctggatggaccgtctaatcgaaccgagcagtacggtttattgactcagaccatttctcggtccccgaggggaagcgagctttggaacttttatcgggcaaagaaggcataatttctcaaatggttgagacaaaggcgaacattccgtacaagatgtctttctctttgggacacgcaggggacaagtgtaaggaacctttggctgtaatggcttttgctggagatcaagcacagaactttcattatatggcgcaagcaaactcgagtttcgaaagatcggagttgaacttcactgcgaaagctgaacgtacgaggatcgccttctacagcatttattacaatacgaggacggacgatatgacttcattgtgtggacctgtgattgatgacgttaaggtttggttctccgggtctagtagaattggatttagttttccgctttttattcttctttctttggttttcatctagattgttccggttcagaaattgtattggtagaccgggaattaagacgggattccacgttgtatgatgtatcgttgtatgatggatcggttcaaggtacaagaaatg

SEQ ID NO: 1157 - protein, 250 aa, Arabidopsis thaliana
MMLYSNNSWRSNSILILLLGLSIVAAADSAGKTSPVEDGLVVNGDFETPPSNGFPDDAIIEDTSEIPSWRSDGTVELIKSGQKQGGMILIVPEGRHAVRLGNDAEISQELTVEKGSIYSVTFSAARTCAQLESLNVSVASSDEPIASQTIDLQTVYSVQGWDPYAWAFEAVVDRVRLVFKNPGMEDDPTCGPIIDDIAVKKLFTPDKPKGNAVINGDFEEGPWMFRNTTLGVLLPTNLDEEISSLPGWTV

SEQ ID NO: 1158 - protein, 249 aa, Arabidopsis thaliana
MLYSNNSWRSNSILILLLGLSIVAAADSAGKTSPVEDGLVVNGDFETPPSNGFPDDAIIEDTSEIPSWRSDGTVELIKSGQKQGGMILIVPEGRHAVRLGNDAEISQELTVEKGSIYSVTFSAARTCAQLESLNVSVASSDEPIASQTIDLQTVYSVQGWDPYAWAFEAVVDRVRLVFKNPGMEDDPTCGPIIDDIAVKKLFTPDKPKGNAVINGDFEEGPWMFRNTTLGVLLPTNLDEEISSLPGWTV

SEQ ID NO: 1159 - protein, 164 aa, Arabidopsis thaliana
MILIVPEGRHAVRLGNDAEISQELTVEKGSIYSVTFSAARTCAQLESLNVSVASSDEPIASQTIDLQTVYSVQGWDPYAWAFEAVVDRVRLVFKNPGMEDDPTCGPIIDDIAVKKLFTPDKPKGNAVINGDFEEGPWMFRNTTLGVLLPTNLDEEISSLPGWTV

SEQ ID NO: 1160 - DNA, 1272 bp, Arabidopsis thaliana
cttggcgaccttaaatacaaaatggtactctgtttccaactcaacttagcctctctgtctctcatactcttctcttcattccctggacttttagcacaatctcaacaacatttcttgggacaaaacaacacaagcttgttgagtggagggagatgcaatttggctagaggcaaatgggtctatgattcttcatatcctctctatagtgcttttagttgtcccttcatcgattccgaattcaactgccagaaagcgggtcgtccggacactaactatcaacacttccgttggcagcctttctcctgtcctctccctagattcgatggggcgaattttatgaggagaatgagagggaagaagataatgatggtaggtgactcactgagtcttaacatgttcgaatcgttggcctgcttgcttcatgcttctctccctaatgctaagtactctcttcgtcgaagccaacctctcacttccctcactttccaggattatggagtgacgataaatttgtatagaacacagtttctagtagatgtggttcaagaaaaggcaggacgagtgcttgtgcttgactccatcaaacaagccgatgcttggcttggcatggatgttcttatcttcaactcgtggcactggtggactcacacctccggacttcagccctgggattatatgagggaaggaaaccaattgtacaaagacatgaacaggcttgtggcttattacaaaggacttaacacatgggctcgttggattaacaataacattgtcccttcacgtactcaagtcttctttcaaggtgtttctcctgtccactatgacggaagagagtggaacgaaccattgaagtcgtgcaatggtcaaactcagccgttcatgggacaaagatatccaggaggattgcccttaggttgggttgtggttaacaaagtgttgagccgaattagaaaaccggtccatcttctcgatctcactactctctcggagtatcgcaaagacgcacatccaagtctctacaatggtatctcaaaggatctagactgtagccattggtgcctccctggactccctgatacttggaacttacttctctactcatctcttacttcctagtccttgttttacatatttgtttgtttctaccattttataaatagtttgtgatgatcctgtgtgattgtgattgatatttttccttcgttaatttaatcttaaatgtaattaacattgttactagtttacttgcagcatcgatcagcttaaattctc

SEQ ID NO: 1161 - protein, 371 aa, Arabidopsis thaliana
LGDLKYKMVLCFQLNLASLSLILFSSFPGLLAQSQQHFLGQNNTSLLSGGRCNLARGKWVYDSSYPLYSAFSCPFIDSEFNCQKAGRPDTNYQHFRWQPFSCPLPRFDGANFMRRMRGKKIMMVGDSLSLNMFESLACLLHASLPNAKYSLRRSQPLTSLTFQDYGVTINLYRTQFLVDVVQEKAGRVLVLDSIKQADAWLGMDVLIFNSWHWWTHTSGLQPWDYMREGNQLYKDMNRLVAYYKGLNTWARWINNNIVPSRTQVFFQGVSPVHYDGREWNEPLKSCNGQTQPFMGQRYPGGLPLGWVVVNKVLSRIRKPVHLLDLTTLSEYRKDAHPSLYNGISKDLDCSHWCLPGLPDTWNLLLYSSLTS

SEQ ID NO: 1162 - protein, 364 aa, Arabidopsis thaliana
MVLCFQLNLASLSLILFSSFPGLLAQSQQHFLGQNNTSLLSGGRCNLARGKWVYDSSYPLYSAFSCPFIDSEFNCQKAGRPDTNYQHFRWQPFSCPLPRFDGANFMRRMRGKKIMMVGDSLSLNMFESLACLLHASLPNAKYSLRRSQPLTSLTFQDYGVTINLYRTQFLVDVVQEKAGRVLVLDSIKQADAWLGMDVLIFNSWHWWTHTSGLQPWDYMREGNQLYKDMNRLVAYYKGLNTWARWINNNIVPSRTQVFFQGVSPVHYDGREWNEPLKSCNGQTQPFMGQRYPGGLPLGWVVVNKVLSRIRKPVHLLDLTTLSEYRKDAHPSLYNGISKDLDCSHWCLPGLPDTWNLLLYSSLTS

SEQ ID NO: 1163 - protein, 259 aa, Arabidopsis thaliana
MRRMRGKKIMMVGDSLSLNMFESLACLLHASLPNAKYSLRRSQPLTSLTFQDYGVTINLYRTQFLVDVVQEKAGRVLVLDSIKQADAWLGMDVLIFNSWHWWTHTSGLQPWDYMREGNQLYKDMNRLVAYYKGLNTWARWINNNIVPSRTQVFFQGVSPVHYDGREWNEPLKSCNGQTQPFMGQRYPGGLPLGWVVVNKVLSRIRKPVHLLDLTTLSEYRKDAHPSLYNGISKDLDCSHWCLPGLPDTWNLLLYSSLTS

SEQ ID NO: 1164 - DNA, 1185 bp, Arabidopsis thaliana
aattttccccaatcttcataagtcataagaaaaatctcagcaattgtcaaaattttccagcaatcgagagagcagcacaagagagcatagaaggaccgattggggattagttagcgtgaaaggagatcctagtagcagctatggatagagaatggggttccaagcctggtagtggaggcgccgcctccggccaaaacgaggccatagatcgccgtgagcgtctccgtcgtcttgctcttgaaaccatagaccttgctaaagatccctatttcatgcgaaatcatcttggaagctatgagtgtaaactatgtctaacgctgcataacaatgaaggaaactacttggcacatactcaaggtaagaggcatcagacaaacttggcaaagagagctgctcgagaggctaaggacgctcctactaagccgcagccacttaagcgcaatgtctcagttcgcagaacagttaaaattggtagaccagggtaccgggttacaaaacagtatgatcccgagctgcaacaaagatctcttctgttccagattgaatatcctgagatagaggacaacataaagccaagacatcgtttcatgtcatcttatgagcagaaagttcaaccgtatgacaagagctatcaataccttctatttgcagctgaaccatatgaaatcatagctttcaaggttcctagcacagaggttgataaatcaaccccaaagtttttctctcactgggatccagactccaagatgtttacactgcaggtgtatttcaagcctaccaagccagaaccaaacaagcctcagtcagctgttggagcaaatggtcttccaccgccaccaccacccccgcctcatcaagctcaaccgccaccaccacctccatctggtttattcccaccgccaccacctccaatggctaacaatggttttaggcccatgccaccagctggaggtttcggacatcctaacatgtgaaagagaatccagcgaagcagtttaaaaacacagtactctgatcatggtttactaagagagacttgctctttgactgaaaaacaaatctgttctgacatctctacggatgtattatctctctagataccttctttgagtttcttctatctgcttctcgtatgtaccattttgacaagattgttttccgttaatagtacaattagcgttggcg

SEQ ID NO: 1165 - protein, 277 aa, Arabidopsis thaliana
MDREWGSKPGSGGAASGQNEAIDRRERLRRLALETIDLAKDPYFMRNHLGSYECKLCLTLHNNEGNYLAHTQGKRHQTNLAKRAAREAKDAPTKPQPLKRNVSVRRTVKIGRPGYRVTKQYDPELQQRSLLFQIEYPEIEDNIKPRHRFMSSYEQKVQPYDKSYQYLLFAAEPYEIIAFKVPSTEVDKSTPKFFSHWDPDSKMFTLQVYFKPTKPEPNKPQSAVGANGLPPPPPPPPHQAQPPPPPPSGLFPPPPPPMANNGFRPMPPAGGFGHPNM

SEQ ID NO: 1166 - protein, 233 aa, Arabidopsis thaliana
MRNHLGSYECKLCLTLHNNEGNYLAHTQGKRHQTNLAKRAAREAKDAPTKPQPLKRNVSVRRTVKIGRPGYRVTKQYDPELQQRSLLFQIEYPEIEDNIKPRHRFMSSYEQKVQPYDKSYQYLLFAAEPYEIIAFKVPSTEVDKSTPKFFSHWDPDSKMFTLQVYFKPTKPEPNKPQSAVGANGLPPPPPPPPHQAQPPPPPPSGLFPPPPPPMANNGFRPMPPAGGFGHPNM

SEQ ID NO: 1167 - DNA, 1169 bp, Arabidopsis thaliana
attctcacaagtcataaacagtcgtttatagttcaatccttttcctcttctttgtttctaaaaagagaaaagtcacttatggcggatatctcgggaaacggctatggcaacgccagagaagaagtagtaatggtgaatctcaaggatgaagtcgaacatcaacaagaaatggaagacattcataacccaagacccttgaagaaacaagactctctactctcagtctctgtccctttcttacaaaagttgatcgcggagtttcttggaacctactttttggtattcaccggttgtgcatcggtggttgtaaacatgcaaaacgacaatgtcgtgactcttccagggatcgctatcgtttggggactcaccattatggtcctcatttactctcttggtcacatctctggtgctcatatcaatccggccgttaccattgccttcgcctcttgtggccgtttccctctcaaacaggttccagcttatgtcatatcacaagtgataggatcaacgctcgcggctgcgacattacggttgttgttcggacttgatcacgacgtttgtagcggaaaacacgatgtgtttatcggatcatcaccagtgggatcagatcttcaggcgtttacgatggagtttatcgtcactttctatctaatgttcatcatttctggcgttgctaccgataatagagcgatcggagaacttgctggattagcaataggatcaacggtgctacttaacgtgctaattgccgcaccggtatcgagtgcgtcgatgaatccaggaagaagtttaggacctgcactggtctatggttgctacaaaggaatttggatatacttagttgcgccaactcttggtgcgattgcgggtgcatgggtttataacacagttagatataccgataaaccattgcgagaaatcactaaaagtggttcatttctaaagaccgtgagaatcggtagcacttgataagagaaaagaaaacatgggtggagttgatggagtattttcaaatgaatgtaacaactttcaccacaccttacgtatatggcctttgtattaattgctacgtttatctcttttattgttaacgccaagattctctatcttgttattaatgtgtaactgtatcgtatattttttaaataataaaattcaattttcgaaag

SEQ ID NO: 1168 - protein, 322 aa, Arabidopsis thaliana
ILTSHKQSFIVQSFSSSLFLKREKSLMADISGNGYGNAREEVVMVNLKDEVEHQQEMEDIHNPRPLKKQDSLLSVSVPFLQKLIAEFLGTYFLVFTGCASVVVNMQNDNVVTLPGIAIVWGLTIMVLIYSLGHISGAHINPAVTIAFASCGRFPLKQVPAYVISQVIGSTLAAATLRLLFGLDHDVCSGKHDVFIGSSPVGSDLQAFTMEFIVTFYLMFIISGVATDNRAIGELAGLAIGSTVLLNVLIAAPVSSASMNPGRSLGPALVYGCYKGIWIYLVAPTLGAIAGAWVYNTVRYTDKPLREITKSGSFLKTVRIGST

SEQ ID NO: 1169 - protein, 296 aa, Arabidopsis thaliana
MADISGNGYGNAREEVVMVNLKDEVEHQQEMEDIHNPRPLKKQDSLLSVSVPFLQKLIAEFLGTYFLVFTGCASVVVNMQNDNVVTLPGIAIVWGLTIMVLIYSLGHISGAHINPAVTIAFASCGRFPLKQVPAYVISQVIGSTLAAATLRLLFGLDHDVCSGKHDVFIGSSPVGSDLQAFTMEFIVTFYLMFIISGVATDNRAIGELAGLAIGSTVLLNVLIAAPVSSASMNPGRSLGPALVYGCYKGIWIYLVAPTLGAIAGAWVYNTVRYTDKPLREITKSGSFLKTVRIGST

SEQ ID NO: 1170 - protein, 279 aa, Arabidopsis thaliana
MVNLKDEVEHQQEMEDIHNPRPLKKQDSLLSVSVPFLQKLIAEFLGTYFLVFTGCASVVVNMQNDNVVTLPGIAIVWGLTIMVLIYSLGHISGAHINPAVTIAFASCGRFPLKQVPAYVISQVIGSTLAAATLRLLFGLDHDVCSGKHDVFIGSSPVGSDLQAFTMEFIVTFYLMFIISGVATDNRAIGELAGLAIGSTVLLNVLIAAPVSSASMNPGRSLGPALVYGCYKGIWIYLVAPTLGAIAGAWVYNTVRYTDKPLREITKSGSFLKTVRIGST

SEQ ID NO: 1171 - DNA, 1271 bp, Arabidopsis thaliana
atctcagaatcatcaacggcccaaaacacattgcaaattaaagaaaaagcaaagattttcctcattcttttgccattattatctctcatcgatttggcttgctacttttgaatttacccgtgttctactacgattcgggattagggttttttcttgagttagaaaagattgtttcttgattcttgggaatggctgggatttgaggaagaagaagtgcaaaagggttctttttttgagtttgtgaatttgctgcggagatgagtgcttcgaggtttataaagtgtgtcaccgtcggcgatggtgccgtcggaaaaacttgtatgctgatttcttacacaagcaacactttccctacggactatgttccaactgttttcgacaacttcagtgctaatgtggttgtagatgggaacacggtgaatcttggattgtgggatacagctggtcaagaagactataacaggttaagaccgttgagttaccgtggtgccgatgtcttcattcttgcattctcgcttattagcaaagctagctacgagaatgtagccaagaagtggattcctgagcttaggcattatgcccctggtgttcctataatcctcgttggaacgaaactcgatcttcgagatgacaagcaattcttcatagaccatcctggtgcagtgcctattactacaaaccagggagaggaactaaagaaactgataggatcaccaatctacattgaatgtagttcaaagactcagcagaatgtgaaagcagtctttgacgcagccataaaagtggtgcttcagccaccgaaacagaagaagaagaaaaagaacaagaaccgctgcgtgttcttgtgatcgaacatctcttaaaacgaaaaaaggtttaggtaacaaaagaagctgaaggaaaacgaacacctgcaacattgtatagttgttgaatccggcttgtttcggtctttactcttctttttgctggtgaatctaatgagtgaactgaggccaagaggaggattctgggtaagagaaggggatgtgttcttttcttggtgtgttgttgttgttgttgtacttttgctatgtagactaatctcttaatactatgttgtctttgtttttgctgttggggtccattttgtattttctttaacagaaatcttaattaattttttagtgacttttttaagcttccgttgatcttatggtcttgtattggtatgtaattagattcagacaacgaagaacatcttgagatagatctctatatacaataagatt

SEQ ID NO: 1172 - protein, 196 aa, Arabidopsis thaliana
MSASRFIKCVTVGDGAVGKTCMLISYTSNTFPTDYVPTVFDNFSANVVVDGNTVNLGLWDTAGQEDYNRLRPLSYRGADVFILAFSLISKASYENVAKKWIPELRHYAPGVPIILVGTKLDLRDDKQFFIDHPGAVPITTNQGEELKKLIGSPIYIECSSKTQQNVKAVFDAAIKVVLQPPKQKKKKKNKNRCVFL

SEQ ID NO: 1173 - protein, 175 aa, Arabidopsis thaliana
MLISYTSNTFPTDYVPTVFDNFSANVVVDGNTVNLGLWDTAGQEDYNRLRPLSYRGADVFILAFSLISKASYENVAKKWIPELRHYAPGVPIILVGTKLDLRDDKQFFIDHPGAVPITTNQGEELKKLIGSPIYIECSSKTQQNVKAVFDAAIKVVLQPPKQKKKKKNKNRCVFL

SEQ ID NO: 1174 - DNA, 450 bp, Arabidopsis thaliana
tgattgtggatgagatcaagattgcgatttcgatgaatgaatcagagacgggtttcgtgagctctacagaggtggagaaacgagtccaagagataattggggagtgtccggttagggagagaaccatggctatgaagaacgcagccgaattagccttgacagaaactgattgcaattccgatggataaatcagacatgggtttcgtgagctcaacggaggtggtgaatcgagaccgcgaggtactgctggatggtccggttaggaagaaaaccaaagaacgcagccgaatcagccttggcagaaaccggttcatctcatgccgtgttgactacgttactcctcagtcatggtgcccaaaatgttcttaaaaatcaagccttgtagtattaattaatggtaggaatgtttctaaacttataaattcccatatctctaatgaatgatctttg

SEQ ID NO: 1175 - protein, 62 aa, Arabidopsis thaliana
MDKSDMGFVSSTEVVNRDREVLLDGPVRKKTKERSRISLGRNRFISCRVDYVTPQSWCPKCS

SEQ ID NO: 1176 - protein, 61 aa, Arabidopsis thaliana
IVDEIKIAISMNESETGFVSSTEVEKRVQEIIGECPVRERTMAMKNAAELALTETDCNSDG

SEQ ID NO: 1177 - protein, 57 aa, Arabidopsis thaliana
MGFVSSTEVVNRDREVLLDGPVRKKTKERSRISLGRNRFISCRVDYVTPQSWCPKCS

SEQ ID NO: 1178 - DNA, 619 bp, Arabidopsis thaliana
atcatttcatatcttagatcatctctcttctctctctttctcttaagaatattggaaatttctgaagcttttctattagttgatctcgagccatgcctccaatgaaagctgtgttgcaattgagcattcacgaggaaagaatcaggaagaaagcgtttgtcaccgtttctcgatgtccaggtgttacttcgataacaatggatgacaaaaccgggaaaatgacggtagttggtgaagttgatgtaccggttatcgtgatgaagctaaggaagctatgtaacacagagcttgtttcggttgaagttgttaaaccaccagagaaaaagcctgaaccagagaaaccggctccacctaaaccagctccagctccagctaaaccggctgaaattgttgcctggccggttcagatgaacaacccttaccaatacaatcctgcctatgcaaattcttactatcaaccatatgggaactctagatttgtaacggacgaatcaaattgtgtgattatgtgataacttatttcaaataatgtgttaagttagttttgatggaagagtgtaattttttagctactgtaatatacatttctcatatgagcttattcagaaaaatttatgtc

SEQ ID NO: 1179 - protein, 139 aa, Arabidopsis thaliana
MPPMKAVLQLSIHEERIRKKAFVTVSRCPGVTSITMDDKTGKMTVVGEVDVPVIVMKLRKLCNTELVSVEVVKPPEKKPEPEKPAPPKPAPAPAKPAEIVAWPVQMNNPYQYNPAYANSYYQPYGNSRFVTDESNCVIM

SEQ ID NO: 1180 - protein, 136 aa, Arabidopsis thaliana
MKAVLQLSIHEERIRKKAFVTVSRCPGVTSITMDDKTGKMTVVGEVDVPVIVMKLRKLCNTELVSVEVVKPPEKKPEPEKPAPPKPAPAPAKPAEIVAWPVQMNNPYQYNPAYANSYYQPYGNSRFVTDESNCVIM

SEQ ID NO: 1181 - protein, 104 aa, Arabidopsis thaliana
MDDKTGKMTVVGEVDVPVIVMKLRKLCNTELVSVEVVKPPEKKPEPEKPAPPKPAPAPAKPAEIVAWPVQMNNPYQYNPAYANSYYQPYGNSRFVTDESNCVIM

SEQ ID NO: 1182 - DNA, 1534 bp, Arabidopsis thaliana
tggtcggttctcgagtcatcgctgtctggaacagcgatgatcgggaaaacccaacacaccgtctctctctcactctcacttcccatcggcgaaaatggcgtcggtggcggcatcatcgtcgatatcattcgctgcatcattcctcaaaatcaaagcattccctctctcccctcgcttcttccccatccgtacactccgttgctctgtctcctcctcctcctctgagcccattgaattcgacatctccttcgctcctcccaaacccaaaccctcctccactcacggcggcgtcacccctcaacaactcttcatcccttggatcgtccgtagtgatgacggcactctcaaactccaatctcaacctcctgctcgtttaatccacaacctcgccatcgatgccactactcaaaaccctaagaagaaagataaatctaagaagaaacaacctcaagctacctcctcttcctccgccaccaccaccgcctcatctccagcttcacactcagaggtaaagccaaagctatccaaagcggcgcgtaggttttacaatgagaattttaaagaacaacctcaacgtttaagcaaagttctcgctgctgctggagtggcatcaagaagaacctctgaagaacttatttttgatggcaaggttactgttaatggtattctctgcaacactccacagactcgagttgatccatcaagagacattatttatgttaatggaaatcgtattcctaagaaacttcctccaaaggtttattttgctctgaacaagcctaaaggatatatttgttcttccggagagaaagagatcaaatctgctattagtttgtttgacgagtacttgtcctcttgggataaaaggaatccggggactcccaaacctcgcctttttactgttggtcgtcttgatgttgccacaacgggattgatagttgttacaaatgatggagatttcgcacagaaactttcacatccttcatctagtttaccgaaagaatatattaccacggttgtcggtgatatacacaaacgacacttaatggctatcagtgaaggcacaatggtggaaggagtccactgtgtcccagattcagttgagttgatgccaaagcagcatgatataccaagagcaaggctgcgtatagtggttcacgaaggaagaaatcatgaagtcagggaattagtgaaaaatgctgggcttgaggttcattcattgaagcgtgtccgtataggtggattcagacttccttcagatcttgggctagggaagcatgtggaattgaagcagagcgagctaaaggcattgggttggaagaattgaagatgtccaattcatcaaacaattaaaaacctctgttacctttagttaaaacagaatataattgtttagattatagtatatctttatcttagtttttttttttgtcaaagatctttatcttagttaggaatacttttttgttgtaagtagtttattgatattcattatgaatttattaataaactaatcttttgttttcttggaact

SEQ ID NO: 1183 - protein, 410 aa, Arabidopsis thaliana
MASVAASSSISFAASFLKIKAFPLSPRFFPIRTLRCSVSSSSSEPIEFDISFAPPKPKPSSTHGGVTPQQLFIPWIVRSDDGTLKLQSQPPARLIHNLAIDATTQNPKKKDKSKKKQPQATSSSSATTTASSPASHSEVKPKLSKAARRFYNENFKEQPQRLSKVLAAAGVASRRTSEELIFDGKVTVNGILCNTPQTRVDPSRDIIYVNGNRIPKKLPPKVYFALNKPKGYICSSGEKEIKSAISLFDEYLSSWDKRNPGTPKPRLFTVGRLDVATTGLIVVTNDGDFAQKLSHPSSSLPKEYITTVVGDIHKRHLMAISEGTMVEGVHCVPDSVELMPKQHDIPRARLRIVVHEGRNHEVRELVKNAGLEVHSLKRVRIGGFRLPSDLGLGKHVELKQSELKALGWKN

SEQ ID NO: 1184 - DNA, 1554 bp, Arabidopsis thaliana
aaagtctgataatttttccgacagaagtttcatctgagaaaagatggctacatttgcacttcccttctgcgaaattcccgaggatctccagctccgaatcttatccctcctcacaccagcggagatctccagcttcgcctgcacatcgaaacgcttcgcctcgctatgtcaagaagacggcaaaatctggcacgttatgtgcgatcagagatgggggaagaaaactaagatccagaaatgggcaaacggtcaaatcccttatagacacctttacaagactctaaagggattggagaatctaattggcttctggcgtctctgcggcagagcaaatcccgccgcttcatcgccgccgcttgttttcttcgattggggttcttcttttatattgggatctagagttttatccaccggagatgatacttatgaggtaaagaagacaccttttctcttaatggggatttcgccggagggacgatctgagaatttcttggatctcgtcggtggtaatctcagatctgtggatgatgatttgaaagaattagaagcttctaacaatctcgtctcggtggatgtgaatttcatggggaatggtcatatcatggtggaggagaatcgatgttttaccaacaacaatcgtagagaagaccagaggagctcaggggatgagagtgatgatttgatctcatcgcccaatttttcggaaatgtacactcaattggcgaataagacgagtccaggcggtgacaggaggagacagaagaggaaggagaaggagaggcaagcgtcgaggactaagtgggaaccagaacactttctcaaagttgctgattgctcccccacgcctactagacccttacaaggcttatggaagggtttctgtgagggaagcatcgagttgtatttggtcaaatatgatgaagttggaggcattatatgcagaaaagtagaggacttgtccctctcacggtacactcctcctgtgttctggacacccaaacatacgttcatcagatctcctttttcagctgaagaagagctgctactgaatagtcgaatccatattagccctttcgctgaagttcatgaaaatgttgtatctggaatgttgtacatgaagtctagctgcgatctggtgttgccaggagaacctggcaatggcattggttttcttagaggtgaagggcgggtctggttgtatgacaatgggactttcggtttcgggtttcttcgagatcaatttatcattgatctgaaacgtgttgctctggaagatgggtgtctagctgacgaggtagaagcttgtatgtgatttgctctttggttgtgatttttaaattctgatggtgatagatgatcacctctttctgtacataaaagagtttggtgactttagaagtttgaactttcaagtttagtctcattttagtggacgtaaactaggatgatggaatatcaccttgtatttttacttgtttatgtagatatggttctaaataagagatttgtagaggttcatgtatcaattgttgaaaaagaataataaacttgcat

SEQ ID NO: 1185 - protein, 422 aa, Arabidopsis thaliana
MATFALPFCEIPEDLQLRILSLLTPAEISSFACTSKRFASLCQEDGKIWHVMCDQRWGKKTKIQKWANGQIPYRHLYKTLKGLENLIGFWRLCGRANPAASSPPLVFFDWGSSFILGSRVLSTGDDTYEVKKTPFLLMGISPEGRSENFLDLVGGNLRSVDDDLKELEASNNLVSVDVNFMGNGHIMVEENRCFTNNNRREDQRSSGDESDDLISSPNFSEMYTQLANKTSPGGDRRRQKRKEKERQASRTKWEPEHFLKVADCSPTPTRPLQGLWKGFCEGSIELYLVKYDEVGGIICRKVEDLSLSRYTPPVFWTPKHTFIRSPFSAEEELLLNSRIHISPFAEVHENVVSGMLYMKSSCDLVLPGEPGNGIGFLRGEGRVWLYDNGTFGFGFLRDQFIIDLKRVALEDGCLADEVEACM

SEQ ID NO: 1186 - protein, 371 aa, Arabidopsis thaliana
MCDQRWGKKTKIQKWANGQIPYRHLYKTLKGLENLIGFWRLCGRANPAASSPPLVFFDWGSSFILGSRVLSTGDDTYEVKKTPFLLMGISPEGRSENFLDLVGGNLRSVDDDLKELEASNNLVSVDVNFMGNGHIMVEENRCFTNNNRREDQRSSGDESDDLISSPNFSEMYTQLANKTSPGGDRRRQKRKEKERQASRTKWEPEHFLKVADCSPTPTRPLQGLWKGFCEGSIELYLVKYDEVGGIICRKVEDLSLSRYTPPVFWTPKHTFIRSPFSAEEELLLNSRIHISPFAEVHENVVSGMLYMKSSCDLVLPGEPGNGIGFLRGEGRVWLYDNGTFGFGFLRDQFIIDLKRVALEDGCLADEVEACM

SEQ ID NO: 1187 - protein, 285 aa, Arabidopsis thaliana
MGISPEGRSENFLDLVGGNLRSVDDDLKELEASNNLVSVDVNFMGNGHIMVEENRCFTNNNRREDQRSSGDESDDLISSPNFSEMYTQLANKTSPGGDRRRQKRKEKERQASRTKWEPEHFLKVADCSPTPTRPLQGLWKGFCEGSIELYLVKYDEVGGIICRKVEDLSLSRYTPPVFWTPKHTFIRSPFSAEEELLLNSRIHISPFAEVHENVVSGMLYMKSSCDLVLPGEPGNGIGFLRGEGRVWLYDNGTFGFGFLRDQFIIDLKRVALEDGCLADEVEACM

SEQ ID NO: 1188 - DNA, 1572 bp, Arabidopsis thaliana
aatgagaaaaaccttatccaaacttttaaaatgcccgtggcgatctctctcccaacctcatctacttctcatttcttccctcgccgccgcggccatgcaaatcaccgatatcaacgcttttccggagctcaatcttccacggaagatccgtacattcggaagaatcaaactggcgtcatcatcatcggcgctggactcgctggtttagccgccgcaaaccagctcacctccaaacgaatccctttcctactcctcgaagcttccgatggcgtcggcggacgcgtccgtacagatatcgtcgacggcttctttctcgacagaggatttcagattttcatcaccgcgtaccccgaagctaaaaagcttctagattatgaagcactggatctgcagagattctacgccggagctaaggtgttttacggcggtaaatttcacaccgtcgctgatcctctccgacatttttgggattcggtggcatctctcgcgaatccgatcggatccgtcgttgacaaagggcttatcgctttgacgagagctagggttctaatcaagtcagacgaagagatattgactgccgccgatgaagttcccaccattgatctcctccgtaagatcggtttctccgaaacgattcttgatcggttcttccgaccattcttcggcggaattttcttcgacagagacctcgagacgacctcgaagctcttcgatttcgttttccggtgtcttgctctcggagaaaacacacttccagccatgggaatcggagaaatctcgaaccagttggcagcgaagttacccgctaagtccgtcttgttgaacacaagggtcgcttctattgagtatccaaatggatcgggttcggatccacctagcgtgaggctccaagacggcagcgttatgaaggcagagctaggtgtcataatcgccgtcgagcaaccggaagtgaataagcttctcgatgggatcagagacccggttataacaaaaccagctcggagcactatttgtctttacttcacagctgaaccgaaccaaataccggtacaagacccggttctatttctcaacgggtcaaattccggtataatcaacaacatgttcttcgctacaaacgttgctcggacatacgcgccaccgggaaaggctctggtttcggtatcattgatcggattgtttgaggatagaaccgatgatgatttagcagcagaagttcttagagaactctctggttggtttggtgagtctccggttatgtcatggaaacatttgaaaacataccggatccaattcgctcagcctaaccaatgtccacccactgatttggtcaagagtcctcgggtcgggtcgggtctttacttgagcggtgattacatgacttctgctacatttgatggagctttggtctctgggagacgagccgtggaagttttgctacgagaaacgggactaatcaaatagattttttttgttatttaagattctttgtatggcttaattcatgtcttgtatgtagaagtatgtatcctctaagatcatgttggcaaattaagcattatggttaatgct

SEQ ID NO: 1189 - protein, 487 aa, Arabidopsis thaliana
NEKNLIQTFKMPVAISLPTSSTSHFFPRRRGHANHRYQRFSGAQSSTEDPYIRKNQTGVIIIGAGLAGLAAANQLTSKRIPFLLLEASDGVGGRVRTDIVDGFFLDRGFQIFITAYPEAKKLLDYEALDLQRFYAGAKVFYGGKFHTVADPLRHFWDSVASLANPIGSVVDKGLIALTRARVLIKSDEEILTAADEVPTIDLLRKIGFSETILDRFFRPFFGGIFFDRDLETTSKLFDFVFRCLALGENTLPAMGIGEISNQLAAKLPAKSVLLNTRVASIEYPNGSGSDPPSVRLQDGSVMKAELGVIIAVEQPEVNKLLDGIRDPVITKPARSTICLYFTAEPNQIPVQDPVLFLNGSNSGIINNMFFATNVARTYAPPGKALVSVSLIGLFEDRTDDDLAAEVLRELSGWFGESPVMSWKHLKTYRIQFAQPNQCPPTDLVKSPRVGSGLYLSGDYMTSATFDGALVSGRRAVEVLLRETGLIK

SEQ ID NO: 1190 - protein, 477 aa, Arabidopsis thaliana
MPVAISLPTSSTSHFFPRRRGHANHRYQRFSGAQSSTEDPYIRKNQTGVIIIGAGLAGLAAANQLTSKRIPFLLLEASDGVGGRVRTDIVDGFFLDRGFQIFITAYPEAKKLLDYEALDLQRFYAGAKVFYGGKFHTVADPLRHFWDSVASLANPIGSVVDKGLIALTRARVLIKSDEEILTAADEVPTIDLLRKIGFSETILDRFFRPFFGGIFFDRDLETTSKLFDFVFRCLALGENTLPAMGIGEISNQLAAKLPAKSVLLNTRVASIEYPNGSGSDPPSVRLQDGSVMKAELGVIIAVEQPEVNKLLDGIRDPVITKPARSTICLYFTAEPNQIPVQDPVLFLNGSNSGIINNMFFATNVARTYAPPGKALVSVSLIGLFEDRTDDDLAAEVLRELSGWFGESPVMSWKHLKTYRIQFAQPNQCPPTDLVKSPRVGSGLYLSGDYMTSATFDGALVSGRRAVEVLLRETGLIK

SEQ ID NO: 1191 - DNA, 1429 bp, Arabidopsis thaliana
agatatttttttacgaaaatccacggccactaaccgtaaaggacactcttttgatttttctcttcttctacttaactcgctttgcctgactcactgagtcatggcgcttctgaggccgcatcttcatcgctttcactccaacactctccgccactcagcctatccttccgccgacgctggcggtggccttgtcgtctatcccacgtatggtcgtcaccgttgctccgcgattgcgatcgacgctccgtcgtctctgactggcgtgacgccgattcgttggggttacacgagtgttcaaggattccgagatgagatggaagacgacatcgtaatccgttctgatgctgtcgatagcttctcctacgcagcggtcttcgacggccacgctgggtcgtcctctgtcaaattcctcagggaagagctgtataaagagtgtgttggtgcattgcaagctggatcgttgttgaatggaggcgatttcgcagcaatcaaggaagctttgattaaggcctttgaaagcgttgaccgcaatttgctcaaatggctagaagctaacggtgacgaagaagatgaatcaggttcaacagccactgtaatgatcatcagaaatgatgtttccttcattgctcatattggtgattcgtgtgcagtcttatctcgatctgggcaaatcgaggaattgactgattatcaccgtccatatggaagcagtagagcagctattcaggaagtgaaaagggtcaaagaagcaggtggatggattgtcaatggaaggatttgtggagacatagctgtatctcgtgcttttggtgacatccggtttaagacaaagaagaatgatatgttaaagaagggtgttgatgaaggaagatggtccgagaagtttgtttccagaatcgagtttaaaggggacatggttgtggcgactccagatatcttccaagtacctctgacatctgatgtggaattcattattttagcttctgatggattatgggactacatgaagagctcagatgtggttagttatgttagggatcagctccggaaacatgggaatgtgcagcttgcttgtgaatctcttgcgcaagtagctttggaccggcgatctcaggacaacattagcatcattattgctgatctaggaagaacagagtggaagaatctccccgcgcagcgacaaaacgtagtggttgaactggttcaggctgcaacgactatcggtttagttactgttggcatatggatgtcttcacatctatcttaagtgaattgaacattctatctctttcgttagtgtatataaaacctgtaactatgtctaacactctagtcttcccatagaaatggagatatgaagatacctcacaaacagaaccagctttatattattatatatcccactttcacaagcgttgaaactacattt

SEQ ID NO: 1192 - protein, 388 aa, Arabidopsis thaliana
MALLRPHLHRFHSNTLRHSAYPSADAGGGLVVYPTYGRHRCSAIAIDAPSSLTGVTPIRWGYTSVQGFRDEMEDDIVIRSDAVDSFSYAAVFDGHAGSSSVKFLREELYKECVGALQAGSLLNGGDFAAIKEALIKAFESVDRNLLKWLEANGDEEDESGSTATVMIIRNDVSFIAHIGDSCAVLSRSGQIEELTDYHRPYGSSRAAIQEVKRVKEAGGWIVNGRICGDIAVSRAFGDIRFKTKKNDMLKKGVDEGRWSEKFVSRIEFKGDMVVATPDIFQVPLTSDVEFIILASDGLWDYMKSSDVVSYVRDQLRKHGNVQLACESLAQVALDRRSQDNISIIIADLGRTEWKNLPAQRQNVVVELVQAATTIGLVTVGIWMSSHLS

SEQ ID NO: 1193 - protein, 317 aa, Arabidopsis thaliana
MEDDIVIRSDAVDSFSYAAVFDGHAGSSSVKFLREELYKECVGALQAGSLLNGGDFAAIKEALIKAFESVDRNLLKWLEANGDEEDESGSTATVMIIRNDVSFIAHIGDSCAVLSRSGQIEELTDYHRPYGSSRAAIQEVKRVKEAGGWIVNGRICGDIAVSRAFGDIRFKTKKNDMLKKGVDEGRWSEKFVSRIEFKGDMVVATPDIFQVPLTSDVEFIILASDGLWDYMKSSDVVSYVRDQLRKHGNVQLACESLAQVALDRRSQDNISIIIADLGRTEWKNLPAQRQNVVVELVQAATTIGLVTVGIWMSSHLS

SEQ ID NO: 1194 - protein, 223 aa, Arabidopsis thaliana
MIIRNDVSFIAHIGDSCAVLSRSGQIEELTDYHRPYGSSRAAIQEVKRVKEAGGWIVNGRICGDIAVSRAFGDIRFKTKKNDMLKKGVDEGRWSEKFVSRIEFKGDMVVATPDIFQVPLTSDVEFIILASDGLWDYMKSSDVVSYVRDQLRKHGNVQLACESLAQVALDRRSQDNISIIIADLGRTEWKNLPAQRQNVVVELVQAATTIGLVTVGIWMSSHLS

SEQ ID NO: 1195 - DNA, 1796 bp, Arabidopsis thaliana
gatcaaacaaaacaaattcataaattcggagaagagaacgaaaaatcttcttgttggcaaatctccggcgagatcatctttcttattttgttccacggaagtttcagacatggcggccgcgaaactcgtggcgttgttacttcttctcgccttggttttcaatttcaccacttgtatctttgccgacgctggaatcgacggcggcgatgaaccgaaacttagatccgacggcggtgatatcgaattggatcagcttaatgctaaaatccgtgccctagaatctcagattgatgataaaaccaaggaacttaaaggcagagaagagttagtaacagagaaggagaaacttcttcaagagagacaagacaaagttgcttctttggagactgaggtttcttcactaaggaaaaaaggttcatcagattctgtggaactgttgagtaaagctcaagcacgagctactgaattagagaagcaggttgaggtacttaagaactttctggagcagaaaaacaaggagaaagaattgatagaagctcggactagtgaaacccgagaagaagctaaacgaattgaactcgagagtggagaaacttcacaagacaaatgaagagcagaagaacaaaatacgaaaacttgagcgtgctcttaaaatttctgaggaagaaatgttgcggacaaagcatgaagccaccacaaaggctaaggaactgatggaggttcatggggcgtggcttcccccttggtttgctgtacactggagtagttttcagactgttgctgggacacactgggacgcccacggcaaaccagttatggagaaagttactcaaaaggtgacgttagcaaaaaatcaagctgaaaaatgggctaaaccgcacatggctaatgttaaaactaaatatattccagccataaaagagactgttaaaacgcatgttgagccacacgttcaaacactatctaccaaagcgaaagaggcttaccatgcttccaagagtgcggttacaccacatattgtcaagtttcaagaacatgtagatccctattaccaggaggctaaaaagtttagcaagccgtacgttgatcaagtggccacagccacaaaaccacatgttgataaggtgagagctaccatgaagccttacacaacgaagactgtccactattacaaagagttcctggaatctgcctcaacttatcaccaccagcttcaagccaatgtcgaaagtaaactgaagagccatgagctgttggaaccttttgccaccaaagagttcatttggtttgcagcctctgctttgttggccttacccatcttcatagtgtacaaattcctctgttcgctcttctgcacaaagacgaagaagcctatccgacagtctcatcaacatactcgccgtaaggccagaaggggtcattctgacaaatgaagtcacatgctttgtgttgttatcacttcctcgtgctataaatattagaggtaaagacgggttttgatgcgttctctgtgagcctcacctacagtctatatgtttccttcgttgcgtatgaaagaaacagcttatgttagaggtatcttatgggtttttttttaatctcgctgtgcaaaagtgttcttcactctctctgtttttgagatgccttttgaatataaagttttcagtcttttatacagagaagattgacatctagaggaaatctactaagggcttggtttgtgtattttgtgattcatgtggataaatttggtacttgtgccattactctttaaaagcaatcactctttgtctttc

SEQ ID NO: 1196 - protein, 254 aa, Arabidopsis thaliana
MLRTKHEATTKAKELMEVHGAWLPPWFAVHWSSFQTVAGTHWDAHGKPVMEKVTQKVTLAKNQAEKWAKPHMANVKTKYIPAIKETVKTHVEPHVQTLSTKAKEAYHASKSAVTPHIVKFQEHVDPYYQEAKKFSKPYVDQVATATKPHVDKVRATMKPYTTKTVHYYKEFLESASTYHHQLQANVESKLKSHELLEPFATKEFIWFAASALLALPIFIVYKFLCSLFCTKTKKPIRQSHQHTRRKARRGHSDK

SEQ ID NO: 1197 - protein, 239 aa, Arabidopsis thaliana
MEVHGAWLPPWFAVHWSSFQTVAGTHWDAHGKPVMEKVTQKVTLAKNQAEKWAKPHMANVKTKYIPAIKETVKTHVEPHVQTLSTKAKEAYHASKSAVTPHIVKFQEHVDPYYQEAKKFSKPYVDQVATATKPHVDKVRATMKPYTTKTVHYYKEFLESASTYHHQLQANVESKLKSHELLEPFATKEFIWFAASALLALPIFIVYKFLCSLFCTKTKKPIRQSHQHTRRKARRGHSDK

SEQ ID NO: 1198 - protein, 205 aa, Arabidopsis thaliana
MEKVTQKVTLAKNQAEKWAKPHMANVKTKYIPAIKETVKTHVEPHVQTLSTKAKEAYHASKSAVTPHIVKFQEHVDPYYQEAKKFSKPYVDQVATATKPHVDKVRATMKPYTTKTVHYYKEFLESASTYHHQLQANVESKLKSHELLEPFATKEFIWFAASALLALPIFIVYKFLCSLFCTKTKKPIRQSHQHTRRKARRGHSDK

SEQ ID NO: 1199 - DNA, 1530 bp, Arabidopsis thaliana
aacttgccaataattttttcaactgttacagattactacatcaacgaaatattaaacatttaaccatatataaaagttggagatatatgatataagcttttcttagcagtcccacccttcctctctcgagagagctccattccaatcaaagctgtaaacacacttcagaagatggagatcactaacgttaccgagtatgatgcaatcgcaaaggcgaagttgcctaagatggtatatgactactatgcatctggtgcagaagatcaatggactcttcaagagaacagaaacgcttttgcaagaatcctcttccggcctcggattttgattgatgtgaacaaaattgatatggcgactaccgtcttggggttcaagatctcgatgccgatcatggttgctcctactgcctttcaaaagatggctcaccctgatggggaatatgctacggctagagctgcgtctgctgctggaaccatcatgacactatcttcatgggctacttcaagtgttgaagaagttgcttccacagggccaggaatccgattcttccagctctatgtatacaagaacaggaaggtggttgagcagctcgtgagaagagccgagaaagctgggttcaaagccattgctctcactgtagacaccccaaggctaggtcgcagagagtctgatatcaagaacagattcactttgcctccaaacctgacattgaagaactttgaaggtcttgaccttggaaagatggacgaggccaatgactctggcttggcttcgtatgttgctggtcaaattgaccgtaccttgagctggaaggatatccagtggctccaaacaatcaccaacatgccaattcttgtcaagggtgttcttacaggagaggatgcaaggatagcgattcaagctggagcagcagggatcattgtgtcaaatcatggagctcgccagcttgattatgtcccagcaacaatctcagcccttgaagaggttgtcaaagcaacacaaggacgagttcctgtcttcttggatggtggtgttcgacgtggcactgatgtcttcaaggcacttgcacttggagcctctggaatatttattggaagaccagtggtttttgcactagctgctgaaggagaagccggagtcaaaaaggtgcttcaaatgttgcgtgatgagttcgagctaaccatggcactaagtgggtgccggtcactcagtgaaatcacccgtaaccacattgtcacggaatgggacactccacgccatttgcccaggttatagagaagaaaaaaaaaacagagaacagaaacaacacggcaccaaaacgtattcatattctgattgatcactttgcttctactctgctatatttatatctcgaaaaacttgtttctccctatatcggatcacaaaaacgtgcgtagagattctctgtaatgctatttggctacattttacctttccgtttattcttattgcttgtacaatagatgttgattcctacaataccaatgaatactaaaatctgttcccggg

SEQ ID NO: 1200 - protein, 367 aa, Arabidopsis thaliana
MEITNVTEYDAIAKAKLPKMVYDYYASGAEDQWTLQENRNAFARILFRPRILIDVNKIDMATTVLGFKISMPIMVAPTAFQKMAHPDGEYATARAASAAGTIMTLSSWATSSVEEVASTGPGIRFFQLYVYKNRKVVEQLVRRAEKAGFKAIALTVDTPRLGRRESDIKNRFTLPPNLTLKNFEGLDLGKMDEANDSGLASYVAGQIDRTLSWKDIQWLQTITNMPILVKGVLTGEDARIAIQAGAAGIIVSNHGARQLDYVPATISALEEVVKATQGRVPVFLDGGVRRGTDVFKALALGASGIFIGRPVVFALAAEGEAGVKKVLQMLRDEFELTMALSGCRSLSEITRNHIVTEWDTPRHLPRL

SEQ ID NO: 1201 - protein, 348 aa, Arabidopsis thaliana
MVYDYYASGAEDQWTLQENRNAFARILFRPRILIDVNKIDMATTVLGFKISMPIMVAPTAFQKMAHPDGEYATARAASAAGTIMTLSSWATSSVEEVASTGPGIRFFQLYVYKNRKVVEQLVRRAEKAGFKAIALTVDTPRLGRRESDIKNRFTLPPNLTLKNFEGLDLGKMDEANDSGLASYVAGQIDRTLSWKDIQWLQTITNMPILVKGVLTGEDARIAIQAGAAGIIVSNHGARQLDYVPATISALEEVVKATQGRVPVFLDGGVRRGTDVFKALALGASGIFIGRPVVFALAAEGEAGVKKVLQMLRDEFELTMALSGCRSLSEITRNHIVTEWDTPRHLPRL

SEQ ID NO: 1202 - protein, 308 aa, Arabidopsis thaliana
MATTVLGFKISMPIMVAPTAFQKMAHPDGEYATARAASAAGTIMTLSSWATSSVEEVASTGPGIRFFQLYVYKNRKVVEQLVRRAEKAGFKAIALTVDTPRLGRRESDIKNRFTLPPNLTLKNFEGLDLGKMDEANDSGLASYVAGQIDRTLSWKDIQWLQTITNMPILVKGVLTGEDARIAIQAGAAGIIVSNHGARQLDYVPATISALEEVVKATQGRVPVFLDGGVRRGTDVFKALALGASGIFIGRPVVFALAAEGEAGVKKVLQMLRDEFELTMALSGCRSLSEITRNHIVTEWDTPRHLPRL

SEQ ID NO: 1203 - DNA, 1994 bp, Arabidopsis thaliana
ataggtatcggtaccggtgttaggaaaatcaatccgtccaattcataattaatggcgaccaccggcgcggcggccaccaccgagattggtaatccagaatataaacagcctcgatcgatatttgacttgacggcggatttctttgactcgtgtcggttgtcgaatccttcggagactcaatcggcattcggaccacccaaaactttcgatccagaggaggcggaggaggataagagttccaaggacggcgtgattttggacagatggacctgtaatacttgtaaaattgagttcctgtctcttcaagatcaacgctaccacttcaagtccgatattcatcgccttaacatcaagctgagtgttgctggcaaggctatattaaaagaggaagatgttgatgagttgacatctgagtcggtccaagactatgacgtgtctagcatatcaggttcagaggacgaagctgagactagaccaccctctttccactttgatgctcaaaagggtattgataaaaagaaactatttttccgtcttcaaagtggtgacaaagtttctatctggaaatgcttaatcatggacgacgctgaaagtgtttcgttcgagaatgacagaggagtttctgttgactgttgtggtagcttggtcgagaatgaagttactgagaggttgagaaatttgattcgagagaataaggatgataggcaaatgcgtgtcgtgttgcttgcaagtggtggccactttgccggtactgtctttaatggaaagtcggttgtggctcataagacattccacagatatgttgtaagagccaaggctggtaaaaagcagtccacaaaagatgcaagcgggagaagtatacactctgccggagcctcacttcgtcgttacaatgaacttgctttaaaaaaggatattcaagagctacttgctagctggaaaccttattttgatggtgctgcttgtgtttttgtccatgctccctcaagcagtaggcaattacttttcaatggaggcaaaccgtactttagcagccaaaactgcgctgtacgaaacgttccatttacgatccgtcggccaaccttcaaggaatcacagcgtatatataatcagttgactcagattgcacatgtaactgaggagatttttgttaatcgaccagaagtcaccaaagctaatacagtggtgcagacccacaatgaggattctggcaaaacctcaagaaaggaagagcccgatgaaacttcttctagcaacataatcttagaggaaccaaatcgtatagaagaggatatcgaggatggagttactggtacgtcaactgccttacatgaagctgccaaatcgggtgattgtgaaagagttatggagttcttggaggagggtatggatccttgtgctaaggatgaaagaggcagaacgccatacatgcttgcaaatgagaaggaagtgagaaacactttcagacggtttatggcgttaaaccttgaaaaatggaattggcatgatgctaaagtacccagcccgctcacaaaagagatggaggaatctcaagctgccaagcaggcagaaaaagacgccaagcagaaagcaagaacaaaggagttgaagaaactacgcaaagcccgagaaaagaaggctcaggccgaagctgcgcaggcggagaaggagaagccaatttctaaagtggaggaagtgaggagagcaatggcagcacagagggaaaagagagcagccgctgcagaaagacggatggcatcacttaacattcaaagcagttcaagcacaagttaatttccaactttttagtgagttaggtaaaagaggagaaagtttgaaaaacaagaagtgagtatcatcattaaagtgcacaacattaccgactcaattattaggccacacacaaatttgtttttagaaggcccgtttagaccacaaaccgacttctcaatatttccatatatatatatatatatacatgaagccttgttttc

SEQ ID NO: 1204 - protein, 580 aa, Arabidopsis thaliana
MATTGAAATTEIGNPEYKQPRSIFDLTADFFDSCRLSNPSETQSAFGPPKTFDPEEAEEDKSSKDGVILDRWTCNTCKIEFLSLQDQRYHFKSDIHRLNIKLSVAGKAILKEEDVDELTSESVQDYDVSSISGSEDEAETRPPSFHFDAQKGIDKKKLFFRLQSGDKVSIWKCLIMDDAESVSFENDRGVSVDCCGSLVENEVTERLRNLIRENKDDRQMRVVLLASGGHFAGTVFNGKSVVAHKTFHRYVVRAKAGKKQSTKDASGRSIHSAGASLRRYNELALKKDIQELLASWKPYFDGAACVFVHAPSSSRQLLFNGGKPYFSSQNCAVRNVPFTIRRPTFKESQRIYNQLTQIAHVTEEIFVNRPEVTKANTVVQTHNEDSGKTSRKEEPDETSSSNIILEEPNRIEEDIEDGVTGTSTALHEAAKSGDCERVMEFLEEGMDPCAKDERGRTPYMLANEKEVRNTFRRFMALNLEKWNWHDAKVPSPLTKEMEESQAAKQAEKDAKQKARTKELKKLRKAREKKAQAEAAQAEKEKPISKVEEVRRAMAAQREKRAAAAERRMASLNIQSSSSTS

SEQ ID NO: 1205 - protein, 405 aa, Arabidopsis thaliana
MDDAESVSFENDRGVSVDCCGSLVENEVTERLRNLIRENKDDRQMRVVLLASGGHFAGTVFNGKSVVAHKTFHRYVVRAKAGKKQSTKDASGRSIHSAGASLRRYNELALKKDIQELLASWKPYFDGAACVFVHAPSSSRQLLFNGGKPYFSSQNCAVRNVPFTIRRPTFKESQRIYNQLTQIAHVTEEIFVNRPEVTKANTVVQTHNEDSGKTSRKEEPDETSSSNIILEEPNRIEEDIEDGVTGTSTALHEAAKSGDCERVMEFLEEGMDPCAKDERGRTPYMLANEKEVRNTFRRFMALNLEKWNWHDAKVPSPLTKEMEESQAAKQAEKDAKQKARTKELKKLRKAREKKAQAEAAQAEKEKPISKVEEVRRAMAAQREKRAAAAERRMASLNIQSSSSTS

SEQ ID NO: 1206 - protein, 361 aa, Arabidopsis thaliana
MRVVLLASGGHFAGTVFNGKSVVAHKTFHRYVVRAKAGKKQSTKDASGRSIHSAGASLRRYNELALKKDIQELLASWKPYFDGAACVFVHAPSSSRQLLFNGGKPYFSSQNCAVRNVPFTIRRPTFKESQRIYNQLTQIAHVTEEIFVNRPEVTKANTVVQTHNEDSGKTSRKEEPDETSSSNIILEEPNRIEEDIEDGVTGTSTALHEAAKSGDCERVMEFLEEGMDPCAKDERGRTPYMLANEKEVRNTFRRFMALNLEKWNWHDAKVPSPLTKEMEESQAAKQAEKDAKQKARTKELKKLRKAREKKAQAEAAQAEKEKPISKVEEVRRAMAAQREKRAAAAERRMASLNIQSSSSTS

SEQ ID NO: 1207 - DNA, 1994 bp, Arabidopsis thaliana
attcatttgataaccctagtagctccttttttctctatctcgctttctctgtttcaccacagtcatggcgagtcggcgaatcttatcatcgcttctccgttcttcttcgagtagatctacttctaaatcctccttgatcgggagccgaaacccgaggcttttatcccccggtcccgcgcatggagccgctccatgtgggactctccttggccgagtcgccgagtattcgacttcttctccggctaattcggctgcaccatcttctgctcctgctaaagatgagggaaagaagacctatgattacggtggcaaaggcgcgatcgggcgtgtgtgtcaggttattggtgccattgttgatgtgagattcgaagatcaggagggattgcctccgatcatgacatctctcgaggtacaggatcatccaacaaggttggtccttgaggtgtctcatcacttgggtcaaaatgtcgttaggaccattgctatggatggtactgagggtctcgtccgtggaaggaaggttctcaacactggtgctccaatcactgttcctgttggaagggccacccttggacgtatcatgaacgttcttggagaacctattgacgagagaggcgaaattaagaccgagcattacttacccattcacagagacgctccagctttggttgatttggccaccggtcaagagattctcgctactggtattaaggttgttgatctccttgctccttaccaaagaggaggaaagattgggctttttggcggtgctggtgttgggaaaacagtgctcattatggaactgattaacaatgttgccaaagctcatggtggtttctccgtgtttgctggtgtgggagaacggacccgtgaaggcaatgatttgtacagagaaatgattgagagtggtgtcatcaagctaggagagaaacagtctgagagcaaatgtgccctagtgtatggacaaatgaatgagcccccgggtgctcgtgcccgtgttggactgactggtttgactgttgctgagtatttccgtgatgctgaaggccaagatgtcttgcttttcattgacaacatcttccgtttcacccaggccaactctgaagtgtctgcgttgctcggtcgtatcccgtctgctgtggggtaccagccaactctggcttccgatcttggtgctcttcaagagcgaatcacaaccaccaagaaaggttcaattacctctgtccaagccatctatgtccctgctgatgatttgacagatcctgctcctgccacaacttttgctcacttggatgccacaactgtgctttcaagacagatttctgagcttggtatctaccctgctgtggatcctttggattcgacgtcccgtatgctctcgccccacattctaggtgaggagcactacaacacagctcgtggtgtgcagaaagtgttgcagaattacaagaatttgcaagatattatcgccattttgggaatggatgagctaagtgaagatgacaagctgactgttgcccgtgcccgtaagatccagagattcttgagtcagccattccatgttgctgaaatcttcactggtgcccctggaaaatatgtcgaccttaaagaaaacatcaacagtttccagggtttgttggatggcaagtacgatgatctttccgaacaatcgttttacatggttggaggtatcgatgaggtggttgcaaaggcagagaagatcgctaaagagtcagcagcttagaagctggatccatctcttgcatatgcttaatacctgtctgtttcttgtgacaataacgaaaagaaaaaaaccactgcctgtgagttacccacaccaagcggaatttgagttccgtatttatagtttctttcgaattccttgagagctacgagatgatgctgaacatacccttcattcccttgtactcagatttttggttcatttacttccttgacttgttgaaataaaggttaagcaagtcttgcagatt

SEQ ID NO: 1208 - protein, 559 aa, Arabidopsis thaliana
MASRRILSSLLRSSSSRSTSKSSLIGSRNPRLLSPGPAHGAAPCGTLLGRVAEYSTSSPANSAAPSSAPAKDEGKKTYDYGGKGAIGRVCQVIGAIVDVRFEDQEGLPPIMTSLEVQDHPTRLVLEVSHHLGQNVVRTIAMDGTEGLVRGRKVLNTGAPITVPVGRATLGRIMNVLGEPIDERGEIKTEHYLPIHRDAPALVDLATGQEILATGIKVVDLLAPYQRGGKIGLFGGAGVGKTVLIMELINNVAKAHGGFSVFAGVGERTREGNDLYREMIESGVIKLGEKQSESKCALVYGQMNEPPGARARVGLTGLTVAEYFRDAEGQDVLLFIDNIFRFTQANSEVSALLGRIPSAVGYQPTLASDLGALQERITTTKKGSITSVQAIYVPADDLTDPAPATTFAHLDATTVLSRQISELGIYPAVDPLDSTSRMLSPHILGEEHYNTARGVQKVLQNYKNLQDIIAILGMDELSEDDKLTVARARKIQRFLSQPFHVAEIFTGAPGKYVDLKENINSFQGLLDGKYDDLSEQSFYMVGGIDEVVAKAEKIAKESAA

SEQ ID NO: 1209 - protein, 449 aa, Arabidopsis thaliana
MTSLEVQDHPTRLVLEVSHHLGQNVVRTIAMDGTEGLVRGRKVLNTGAPITVPVGRATLGRIMNVLGEPIDERGEIKTEHYLPIHRDAPALVDLATGQEILATGIKVVDLLAPYQRGGKIGLFGGAGVGKTVLIMELINNVAKAHGGFSVFAGVGERTREGNDLYREMIESGVIKLGEKQSESKCALVYGQMNEPPGARARVGLTGLTVAEYFRDAEGQDVLLFIDNIFRFTQANSEVSALLGRIPSAVGYQPTLASDLGALQERITTTKKGSITSVQAIYVPADDLTDPAPATTFAHLDATTVLSRQISELGIYPAVDPLDSTSRMLSPHILGEEHYNTARGVQKVLQNYKNLQDIIAILGMDELSEDDKLTVARARKIQRFLSQPFHVAEIFTGAPGKYVDLKENINSFQGLLDGKYDDLSEQSFYMVGGIDEVVAKAEKIAKESAA

SEQ ID NO: 1210 - protein, 419 aa, Arabidopsis thaliana
MDGTEGLVRGRKVLNTGAPITVPVGRATLGRIMNVLGEPIDERGEIKTEHYLPIHRDAPALVDLATGQEILATGIKVVDLLAPYQRGGKIGLFGGAGVGKTVLIMELINNVAKAHGGFSVFAGVGERTREGNDLYREMIESGVIKLGEKQSESKCALVYGQMNEPPGARARVGLTGLTVAEYFRDAEGQDVLLFIDNIFRFTQANSEVSALLGRIPSAVGYQPTLASDLGALQERITTTKKGSITSVQAIYVPADDLTDPAPATTFAHLDATTVLSRQISELGIYPAVDPLDSTSRMLSPHILGEEHYNTARGVQKVLQNYKNLQDIIAILGMDELSEDDKLTVARARKIQRFLSQPFHVAEIFTGAPGKYVDLKENINSFQGLLDGKYDDLSEQSFYMVGGIDEVVAKAEKIAKESAA

SEQ ID NO: 1211 - DNA, 1166 bp, Arabidopsis thaliana
aaatacaaaaaaaactctcttctcaagtctctccttcttctccgtccttctcaattcttccgttcaaacaaatttctccaaacccaaaccctaatttcctccgtctgtgaaatcaagggttttctctgatctgggttttgatcagaaatcagatctaggtttaattttcgaaatcaaattatgaggaagagagaaagagagaacccttgttcgatttgtgggcattaccataagtacgaggaaggagaagtatgtggagtctgtggtcactgtatgcctgtttcttccgatacggtggcgccgcaacaagtccacgtcagtgcttttccgtcggagattctccctgagtttctttacctcggtagttacgacaacgcttctcgctctgagcttcttaagactcaaggaatctctcgtgttcttaatacggttcctatgtgccagaatctctacaggaattcattcacttatcatggtcttgataatgaaaaagttttacagtttgatgatgctattaagttcttagaccaatgtgagaaggacaaggcacgtgttcttgtgcattgcatgtctgggaaaagtagatcaccagcggttgttgtagcgtacttgatgaaacgaaaagggtggagactcgctgagagtcatcagtgggttaaacaacggagaccaagcactgacataagtccagagttttaccaacaactgcaggagtttgagcaggggatattcggatctgagatgatgtcggcgatgaatattaatgatgctccaacgtttgggtttggtttccctaagattgataatcaagcacaagctcctgtgttcaacaatgctcctacttcttctatattttcatctcctgcttcaagtatccctcctcaggagttcacttttggagcaactccaccaaagccaacaactggtggtgatattgcaatggatggctcttagaaccagataatcatatactcttgcaagaattttcatcaacaaatatactgttgtgagaatgtttctttttcttttttgtacatggagattggtgcattgcttgagagagtttggggtttgagaacatgagattggaagcatctttgtctggtttattcctcactctcccacaattctgtatcgatctttacagcgaaatatactattaaacc

SEQ ID NO: 1212 - protein, 257 aa, Arabidopsis thaliana
MRKRERENPCSICGHYHKYEEGEVCGVCGHCMPVSSDTVAPQQVHVSAFPSEILPEFLYLGSYDNASRSELLKTQGISRVLNTVPMCQNLYRNSFTYHGLDNEKVLQFDDAIKFLDQCEKDKARVLVHCMSGKSRSPAVVVAYLMKRKGWRLAESHQWVKQRRPSTDISPEFYQQLQEFEQGIFGSEMMSAMNINDAPTFGFGFPKIDNQAQAPVFNNAPTSSIFSSPASSIPPQEFTFGATPPKPTTGGDIAMDGS

SEQ ID NO: 1213 - protein, 226 aa, Arabidopsis thaliana
MPVSSDTVAPQQVHVSAFPSEILPEFLYLGSYDNASRSELLKTQGISRVLNTVPMCQNLYRNSFTYHGLDNEKVLQFDDAIKFLDQCEKDKARVLVHCMSGKSRSPAVVVAYLMKRKGWRLAESHQWVKQRRPSTDISPEFYQQLQEFEQGIFGSEMMSAMNINDAPTFGFGFPKIDNQAQAPVFNNAPTSSIFSSPASSIPPQEFTFGATPPKPTTGGDIAMDGS

SEQ ID NO: 1214 - protein, 172 aa, Arabidopsis thaliana
MCQNLYRNSFTYHGLDNEKVLQFDDAIKFLDQCEKDKARVLVHCMSGKSRSPAVVVAYLMKRKGWRLAESHQWVKQRRPSTDISPEFYQQLQEFEQGIFGSEMMSAMNINDAPTFGFGFPKIDNQAQAPVFNNAPTSSIFSSPASSIPPQEFTFGATPPKPTTGGDIAMDGS

SEQ ID NO: 1215 - DNA, 3098 bp, Arabidopsis thaliana
attttctagggtttcttcaatttcactctctctcttgagtttattcttctctgctgtatcaatcaaatcaacggagtttgagtttcttttccgattccggcgatggggtcagtccccgatccaggcgagttaactgagttagctcagccgagtttcgaggagtttcagaaacagacgtcgttgatgactagctgtactcttctatggcaagagctctccgatcacttcacttctctagagcagaatctgatgaagaaatctgaagcgttgaagcagatgattgaaactctagataaccagactcagacctcgctcgagtctctgaagcgtagagaggtaacaatcgaccatagcgttgagatcgtagctgggaaagtaggtgaacgagctagagctgctcttgaatcgttagagaaagctagagatggttgtggtgatggttctaatgatgattccggtgatgttgacgatgaagaaggtcttctttctgctttgaaatctctttgtcttaaaatggatgcgagaggtttttggaactttgtgacggcgaggaagaaggagttggagaatctccggtcaaagattccggcggcgttggttgattgtgtagatccggcgatgttagtgcttgaagcgatatctgaggtttttccggtggatacaagaggagataaagttagcaatgattatggatgggcttgtgttgtgattcttgagagtttaacacctgtaattgttgatccagtgattgggaaatcgaggttgcttgttactccgagtgttaaggagaaagctaaggagattgctgagacgtggaagaagagtttggaagagagaggaaggatagagaatgtgaagactcctgatgttcatacgtttttgcagcatcttgttacatttggaattgttaaaagtgaagatcttgctttgtatagaaagcttgttgttggatctgcgtggcgtaaacagatgcctaagcttgcggtttctgttggtttgggtgatcaaatgcctgacatgattgaagaattaatcagcaggggacaacagcttgatgctgttcattttacttatgaagttgggcttgtggataagttccctcctgttcctttgctcaaagcttatctaagggacgcaaagaagtcagcagcttctatcatggaggactctagcaatactggccgagctacgcatctcgtggcgcgcaaggagcaatcagcacttaaggcggttttaaaatgcatagaagagtacaaactcgaggaagagttccctccagagaacctcaagaaacggttggatcagctagagaagaccaaaaccgagaagagaaagccagcagctgttcctgccaacaaaagaacccgagccagctacaacggtccaatgccaccagccaaagccgggcgtatcacaaacgcatacgtctcttccttcccgttcatcagatcaccctctcactctcctcaatacgcttcaccagcagcttacccatccccacctacaacagtctacagcaacagaagcccaccttatccatactctccggagatcatcccaggctcataccaaggctctcctatcggttacccagcgtacaacggttattgtaatggtccagttcctgctccagctcctccagtttaccacccacaccatcatcaacaccaccaattccaccatcagcaacattactactgaattagaagacagtgtgacaacaaaacaaggaagaagattggtaataaccaacaaatcactgatactgtgacaactgctactactctggtgttctctctctctgggtctattgtcttcctacgtcgtcgtttttgtctgtaatatctctttctcagcctaactctcttagtaacttagcttatatcctctggtgtgtttattattaatcgcatataaaacaaaactcaagcttttgtaatgtctaatattcagtcaacaaacttatatttctgtactctgttaatcgaatgacaaacttctcttcgtcaccaactatctccgatcaaatctaacatcggaggtcgttgctttgaagacatacccaccagttctctgttgaattgcatttcttcttcattgagcaaagtggtgattcaatttcggtacaagacacagccagtgaattggtctcttttccttcaatggctttgatggttttgagaagaaagtgtctccgtttgccagattttatctccgtttttcgacctgcaccgcgttgcttctcctcgagattttccaacagtgaaagtggtaaagttacagtgactggtttgagtggttgtggtatagaaactgtggatgatgatgtttggcatgtttcatcatctttatcccaagcttggagacagttccaagcagacactgcaaaaaactctcccgttacaatacaaggagtaagagaaacaatactcgatgatgaagatcccgatcacgatgaaatcgataacatgagaattcgcggtgatcttttcttcaagctcgatcgaggttcaaaagaattcgaggaatacaactatgacttccaccgcaagaatcaacacaagaacgctaaaaaggagcaaaaccaagaagaagaaacaaagataaagaaggataacaagaaggaagttcgtgacgaatacaagaagagaaatgactctttcacaggtgagacggatcatcctaatgaagctgtgaagaagagagaaagaacatttacgtttaaccaactcacggcgccatttcactacccgttttgcttagacatatacatctcgaaagagtctgtacgagcatgtgtgattcacagggtgactagtaaggttgtaactgtggctcattcgatttcaaaagacatgaaattcgatcttggttcgagaagaaacgttgcagcttgcgctgcggttggggcagttcttgctcaaagaagtttggaagatgacatacatgatgttatatacactcctaggaaaggagataaaattgaaggtaagcttcaggtcgtgcttcaagctcttattgacaatggtgttaatgttaaagtgaagcttaagcagaggaaacttaagaagaagactagtcatctaatgatggcctag

SEQ ID NO: 1216 - protein, 532 aa, Arabidopsis thaliana
MGSVPDPGELTELAQPSFEEFQKQTSLMTSCTLLWQELSDHFTSLEQNLMKKSEALKQMIETLDNQTQTSLESLKRREVTIDHSVEIVAGKVGERARAALESLEKARDGCGDGSNDDSGDVDDEEGLLSALKSLCLKMDARGFWNFVTARKKELENLRSKIPAALVDCVDPAMLVLEAISEVFPVDTRGDKVSNDYGWACVVILESLTPVIVDPVIGKSRLLVTPSVKEKAKEIAETWKKSLEERGRIENVKTPDVHTFLQHLVTFGIVKSEDLALYRKLVVGSAWRKQMPKLAVSVGLGDQMPDMIEELISRGQQLDAVHFTYEVGLVDKFPPVPLLKAYLRDAKKSAASIMEDSSNTGRATHLVARKEQSALKAVLKCIEEYKLEEEFPPENLKKRLDQLEKTKTEKRKPAAVPANKRTRASYNGPMPPAKAGRITNAYVSSFPFIRSPSHSPQYASPAAYPSPPTTVYSNRSPPYPYSPEIIPGSYQGSPIGYPAYNGYCNGPVPAPAPPVYHPHHHQHHQFHHQQHYY

SEQ ID NO: 1217 - protein, 505 aa, Arabidopsis thaliana
MTSCTLLWQELSDHFTSLEQNLMKKSEALKQMIETLDNQTQTSLESLKRREVTIDHSVEIVAGKVGERARAALESLEKARDGCGDGSNDDSGDVDDEEGLLSALKSLCLKMDARGFWNFVTARKKELENLRSKIPAALVDCVDPAMLVLEAISEVFPVDTRGDKVSNDYGWACVVILESLTPVIVDPVIGKSRLLVTPSVKEKAKEIAETWKKSLEERGRIENVKTPDVHTFLQHLVTFGIVKSEDLALYRKLVVGSAWRKQMPKLAVSVGLGDQMPDMIEELISRGQQLDAVHFTYEVGLVDKFPPVPLLKAYLRDAKKSAASIMEDSSNTGRATHLVARKEQSALKAVLKCIEEYKLEEEFPPENLKKRLDQLEKTKTEKRKPAAVPANKRTRASYNGPMPPAKAGRITNAYVSSFPFIRSPSHSPQYASPAAYPSPPTTVYSNRSPPYPYSPEIIPGSYQGSPIGYPAYNGYCNGPVPAPAPPVYHPHHHQHHQFHHQQHYY

SEQ ID NO: 1218 - protein, 483 aa, Arabidopsis thaliana
MKKSEALKQMIETLDNQTQTSLESLKRREVTIDHSVEIVAGKVGERARAALESLEKARDGCGDGSNDDSGDVDDEEGLLSALKSLCLKMDARGFWNFVTARKKELENLRSKIPAALVDCVDPAMLVLEAISEVFPVDTRGDKVSNDYGWACVVILESLTPVIVDPVIGKSRLLVTPSVKEKAKEIAETWKKSLEERGRIENVKTPDVHTFLQHLVTFGIVKSEDLALYRKLVVGSAWRKQMPKLAVSVGLGDQMPDMIEELISRGQQLDAVHFTYEVGLVDKFPPVPLLKAYLRDAKKSAASIMEDSSNTGRATHLVARKEQSALKAVLKCIEEYKLEEEFPPENLKKRLDQLEKTKTEKRKPAAVPANKRTRASYNGPMPPAKAGRITNAYVSSFPFIRSPSHSPQYASPAAYPSPPTTVYSNRSPPYPYSPEIIPGSYQGSPIGYPAYNGYCNGPVPAPAPPVYHPHHHQHHQFHHQQHYY

SEQ ID NO: 1219 - DNA, 1539 bp, Arabidopsis thaliana
aatcaaaccttaggaagagccatgggtgaagaagctatagttctgtatcctgcaccaccaataggtcacttagtgtccatggttgagttaggtaaaaccatcctctccaaaaacccatctctctccatccacattatcttagttccaccgccttatcagccggaatcaaccgccacttacatctcctccgtctcctcctccttcccttcaataaccttccaccatcttcccgccgtcacaccgtactcctcctcctccacctctcgccaccaccacgaatctctcctcctagagatcctctgttttagcaacccaagtgtccaccgaactcttttctcactctctcggaatttcaatgtccgagcaatgatcatcgatttcttctgcaccgccgttttagacatcaccgctgacttcacgttcccggtttacttcttctacacctctggagccgcatgtctcgccttttccttctatctcccgaccatcgacgaaacaacccccggaaaaaacctcaaagacattcctacagttcatatccccggcgttcctccgatgaagggctccgatatgcctaaggcggtgctcgaacgagacgatgaggtctacgatgtttttataatgttcggtaaacagctctcgaagtcgtcagggattattatcaatacgtttgatgctttagaaaacagagccatcaaggccataacagaggagctctgttttcgcaatatttatccaattggaccgctcattgtaaacggaagaatcgaagatagaaacgacaacaaggcagtttcttgtctcaattggctggattcgcagccggaaaagagtgttgtgtttctctgttttggaagcttaggtttgttctcaaaagaacaggtgatagagattgctgttggtttagagaaaagtgggcagagattcttgtgggtggtccgtaatccacccgagttagaaaagacagaactggatttgaaatcactcttaccagaaggattcttaagccgaaccgaagacaaagggatggtcgtgaaatcatgggctccgcaagttccggttctgaatcataaagcagtcgggggattcgtcactcattgcggttggaattcaattcttgaagctgtttgtgctggtgtgccgatggtggcttggccgttgtacgctgagcagaggtttaatagagtgatgattgtggatgagatcaagattgcgatttcgatgaatgaatcagagacgggtttcgtgagctctacagaggtggagaaacgagtccaagagataattggggagtgtccggttagggagcgaaccatggctatgaagaacgcagccgaattagccttgacagaaactggttcgtctcataccgcattaactactttactccagtcgtggagcccaaagtgatctttgaaattaagtcttgcatcaattaataactttgtagtctctcagaatcatgtctttgggggttattcgttttactagttcaaagttatgtctctgagaccgcagatggaaagaacaatttatacc

SEQ ID NO: 1220 - protein, 469 aa, Arabidopsis thaliana
NQTLGRAMGEEAIVLYPAPPIGHLVSMVELGKTILSKNPSLSIHIILVPPPYQPESTATYISSVSSSFPSITFHHLPAVTPYSSSSTSRHHHESLLLEILCFSNPSVHRTLFSLSRNFNVRAMIIDFFCTAVLDITADFTFPVYFFYTSGAACLAFSFYLPTIDETTPGKNLKDIPTVHIPGVPPMKGSDMPKAVLERDDEVYDVFIMFGKQLSKSSGIIINTFDALENRAIKAITEELCFRNIYPIGPLIVNGRIEDRNDNKAVSCLNWLDSQPEKSVVFLCFGSLGLFSKEQVIEIAVGLEKSGQRFLWVVRNPPELEKTELDLKSLLPEGFLSRTEDKGMVVKSWAPQVPVLNHKAVGGFVTHCGWNSILEAVCAGVPMVAWPLYAEQRFNRVMIVDEIKIAISMNESETGFVSSTEVEKRVQEIIGECPVRERTMAMKNAAELALTETGSSHTALTTLLQSWSPK

SEQ ID NO: 1221 - protein, 462 aa, Arabidopsis thaliana
MGEEAIVLYPAPPIGHLVSMVELGKTILSKNPSLSIHIILVPPPYQPESTATYISSVSSSFPSITFHHLPAVTPYSSSSTSRHHHESLLLEILCFSNPSVHRTLFSLSRNFNVRAMIIDFFCTAVLDITADFTFPVYFFYTSGAACLAFSFYLPTIDETTPGKNLKDIPTVHIPGVPPMKGSDMPKAVLERDDEVYDVFIMFGKQLSKSSGIIINTFDALENRAIKAITEELCFRNIYPIGPLIVNGRIEDRNDNKAVSCLNWLDSQPEKSVVFLCFGSLGLFSKEQVIEIAVGLEKSGQRFLWVVRNPPELEKTELDLKSLLPEGFLSRTEDKGMVVKSWAPQVPVLNHKAVGGFVTHCGWNSILEAVCAGVPMVAWPLYAEQRFNRVMIVDEIKIAISMNESETGFVSSTEVEKRVQEIIGECPVRERTMAMKNAAELALTETGSSHTALTTLLQSWSPK

SEQ ID NO: 1222 - protein, 443 aa, Arabidopsis thaliana
MVELGKTILSKNPSLSIHIILVPPPYQPESTATYISSVSSSFPSITFHHLPAVTPYSSSSTSRHHHESLLLEILCFSNPSVHRTLFSLSRNFNVRAMIIDFFCTAVLDITADFTFPVYFFYTSGAACLAFSFYLPTIDETTPGKNLKDIPTVHIPGVPPMKGSDMPKAVLERDDEVYDVFIMFGKQLSKSSGIIINTFDALENRAIKAITEELCFRNIYPIGPLIVNGRIEDRNDNKAVSCLNWLDSQPEKSVVFLCFGSLGLFSKEQVIEIAVGLEKSGQRFLWVVRNPPELEKTELDLKSLLPEGFLSRTEDKGMVVKSWAPQVPVLNHKAVGGFVTHCGWNSILEAVCAGVPMVAWPLYAEQRFNRVMIVDEIKIAISMNESETGFVSSTEVEKRVQEIIGECPVRERTMAMKNAAELALTETGSSHTALTTLLQSWSPK

SEQ ID NO: 1223 - DNA, 1475 bp, Arabidopsis thaliana
gttttgtagagaactcagaaataatttgcgaattacaatttgatcaaacctctcttcttctcctctttcttcttccttcttcatcaaaactattacatttctacattatctcaaacatctccaaatcattatcttacacgaagaaggaagagataagagcatcaatttttaagtatcggggtttcaatttgcattcgatcttttattccatattttactatttgatttgattttaccaaaacctaaaaaaaaaatctgcaattttgggagggaaaattgtccttcaaactattcttgatttcgtctctgtcccctccaaacaataaccaaaagccaaaagagaagtgctacaaaacatcaatggcggaggagagatcgccgagtaaggtgaagttcatgtgcagttttggcggcagaatcctccctagaccatcggacagtgttctcaaatatgtcggcggagagactcgcgtcgttgctgtatctcctgacatctccttctccgaactcatgaagaaacttacggcaatcacagagaacgatattgtgctcaaataccagatcattccagaagatcttgatgcattagtttctgtaaagtctgatgaagatgtgaaacacatgatagaggaatataaccgtcatgaaacacccaagctcagaactttcttgtttcctgcaaacccagtggttcttgagagtcagttaggccccatcgagccacaaaccatagagcaacgctacattgaagccatcaatagcattcttcgcacatccaagagtgctactgctcttcgtgctcccatcaaaacacgaccttccttcaccgtctctacttgctcctctcccaaatcagaatcacctgatggatacagtcacgagccgccagaaacgagttttcagaacaactaccaattgagccggctttacccaatgcatagagtgcatagcagtcccaacatctcacaccagctgcagccacacagccactaccacaaccacaaccacaatgcatacgtgcagcctcctactaactacttaacgtgtaggccacgactaccaacaccgttagaaattcccagaggcatcggttgggaccaatcatacacaaccacacataactcaggtggcggtaatggcaagtacgggtgcaatgatgaccgcaggttctggggaagagcaagcagcgttcctcaaagtcctaggaaccatggactccgcctctgatatgctatgctgcattacattgcaaccatctgtatatatttggttatgtgtttgttgtacagttcaactttgtaggtatctaatgtgcgcctgcatgatatgctaacagagaacgtctctacttctctgtgaaaggctgcaagaggtttggtttattgtacatgttttgtaacaacactgcatttatcgacaatatgtgctccagaatattgcttcaatcatgtgtttaaaaagacaaaatttgactc

SEQ ID NO: 1224 - protein, 288 aa, Arabidopsis thaliana
MAEERSPSKVKFMCSFGGRILPRPSDSVLKYVGGETRVVAVSPDISFSELMKKLTAITENDIVLKYQIIPEDLDALVSVKSDEDVKHMIEEYNRHETPKLRTFLFPANPVVLESQLGPIEPQTIEQRYIEAINSILRTSKSATALRAPIKTRPSFTVSTCSSPKSESPDGYSHEPPETSFQNNYQLSRLYPMHRVHSSPNISHQLQPHSHYHNHNHNAYVQPPTNYLTCRPRLPTPLEIPRGIGWDQSYTTTHNSGGGNGKYGCNDDRRFWGRASSVPQSPRNHGLRL

SEQ ID NO: 1225 - protein, 276 aa, Arabidopsis thaliana
MCSFGGRILPRPSDSVLKYVGGETRVVAVSPDISFSELMKKLTAITENDIVLKYQIIPEDLDALVSVKSDEDVKHMIEEYNRHETPKLRTFLFPANPVVLESQLGPIEPQTIEQRYIEAINSILRTSKSATALRAPIKTRPSFTVSTCSSPKSESPDGYSHEPPETSFQNNYQLSRLYPMHRVHSSPNISHQLQPHSHYHNHNHNAYVQPPTNYLTCRPRLPTPLEIPRGIGWDQSYTTTHNSGGGNGKYGCNDDRRFWGRASSVPQSPRNHGLRL

SEQ ID NO: 1226 - protein, 238 aa, Arabidopsis thaliana
MKKLTAITENDIVLKYQIIPEDLDALVSVKSDEDVKHMIEEYNRHETPKLRTFLFPANPVVLESQLGPIEPQTIEQRYIEAINSILRTSKSATALRAPIKTRPSFTVSTCSSPKSESPDGYSHEPPETSFQNNYQLSRLYPMHRVHSSPNISHQLQPHSHYHNHNHNAYVQPPTNYLTCRPRLPTPLEIPRGIGWDQSYTTTHNSGGGNGKYGCNDDRRFWGRASSVPQSPRNHGLRL

SEQ ID NO: 1227 - DNA, 1321 bp, Arabidopsis thaliana
aaggtttgaacataaatcctaatttcgttgctcgacagcaatctcggaccaagtggaaaccgaaaatggcggcgaatgggctaatggcggcatctagtgtgtttctccaccgtcctgtacatccccatttctcgttctcttctagaacgaatcaaatggttccactcggcttcaaaggccgtgttagtttcatcggcaatgtgaaacgctgttttccggtggtattgtcaatgggaaagtcggagactttcgaggaagctggaaattccgttgcgcctggtaacggcatatcgatcatggtgaatggatgcagtggtaaaatggggaaagctgtcatcaaagcggcagattctgctggagtgaatattgttcctacatcatttgagtctgttgaagaggctggccagactgttgaggtctgtgaaaggagattcttgtgcatggtcctactgaaagagaaaaggtgctgtcttcagtgtttgagaagtatcctgaactaattgttgtggactacacaattccctctgcagtaaatgataatgcagagctgtatggcaaagtaggagttccgttcgtaatgggaacaactggaggagacaggacaagattgtataaaactgtcgaggaatcaaagatttatgctgtgatttctccacagatgggtaaacaggttgttgcgtttcttgcagcaatggagatcatgtctgagcagtttcctggtgcatttgctggttattccttagaggtgatggagtctcatcaagctagcaaattggatgcatctggtactgcaaaagctgttatttcttgctttcagaaattaggcgtgtcttacgacatggaccagatacaattaattcgagatcctaagcagcagattgaggtggtgggtgttccagaggagcatgtctcgggtcatgctttccatctttatcacttgacatcaccagataaaactgtgtcctttgagttccagcacaatgtttgcggaagatcaatatatgctgagggtactgttgatgcagtgctattccttgccaaaaagatccggtctaaagcagagaagaggatctataacatgattgatgtcttgtgagagggaaacatgcgttgaacaaaccccaagctgcagtggctagtaaagaagagtatatgaaactctatataaaaaaatgtcatgccaagttaaatgtgctttggttcttcatttctttgtagggttttgtctttttatggcttctctgtttctcttttcggatttgcaaaattcctgagaaaattgtcatttcttttcgattatagtcgtctttcttcgggatct

SEQ ID NO: 1228 - protein, 172 aa, Arabidopsis thaliana
MGTTGGDRTRLYKTVEESKIYAVISPQMGKQVVAFLAAMEIMSEQFPGAFAGYSLEVMESHQASKLDASGTAKAVISCFQKLGVSYDMDQIQLIRDPKQQIEVVGVPEEHVSGHAFHLYHLTSPDKTVSFEFQHNVCGRSIYAEGTVDAVLFLAKKIRSKAEKRIYNMIDVL

SEQ ID NO: 1229 - protein, 165 aa, Arabidopsis thaliana
GLNINPNFVARQQSRTKWKPKMAANGLMAASSVFLHRPVHPHFSFSSRTNQMVPLGFKGRVSFIGNVKRCFPVVLSMGKSETFEEAGNSVAPGNGISIMVNGCSGKMGKAVIKAADSAGVNIVPTSFESVEEAGQTVEVCERRFLCMVLLKEKRCCLQCLRSILN

SEQ ID NO: 1230 - protein, 145 aa, Arabidopsis thaliana
MGKQVVAFLAAMEIMSEQFPGAFAGYSLEVMESHQASKLDASGTAKAVISCFQKLGVSYDMDQIQLIRDPKQQIEVVGVPEEHVSGHAFHLYHLTSPDKTVSFEFQHNVCGRSIYAEGTVDAVLFLAKKIRSKAEKRIYNMIDVL

SEQ ID NO: 1231 - DNA, 1840 bp, Arabidopsis thaliana
cccttggttccatggccatgcccgtaacgcttcgattactttaattccaatatttccgatcttttcgtcttcgagtttctattgagcgtcgtcaaaccctaattttgacttccgggtggataatcccaaatccgtttcgtagctcgatttcactgataaatttcccagctttcggtgttttgattcgcatgaggatttgaattggcaaggattgaataaaaagatatgtctatggagagatctttagaagcttgggaagaggttcaacgacatggacaagacttagctgatcgacttgctcaaggatttacgggtttgattcatataaacccaccttcgtttccatggccgccgaatcaccatcatcttcacaaggcgaaactgttcgatctcgagttcccaactcaacatttcagtgttattaaggattctaggtttagtatcaaccaaccaatcaacggtgtcacagcgattctcgatattgggaataagataggtcaagctggtgttgactttggtgctgggttgaatgtgatggtccaacagttcttcaggaggttgcctataccgttcttacacgaggataataacaagcttgttgtctctgtggatggtgataagagtacaaggagccatagagcttatgtgatcacaaaaggggatttgggaatggctacagaacggttgagggactcagggttttctaagacagatgatactgcttctgttactatgtctgaggaggaagttgcagattcctatcttagagctgctggattgcttggaagatcaaagggaacaattgatacgtcatcaagttatgacagtaggacaaatggtatggaacattcattggcagccagaggagatctctggagggtagaagcttcacattcgagttctactgcaagcgatggaaattcgtctctctttcttctccaacttggaccacttctctttctacgcgattcaactcttcttttaccgttacacttatcaaaacagcacttgctctggtatggatatgataggaagaaaggtatgcattcactctgtccagctatatggtcaaagcatcggaggtggcttatgatgtcaatgctctctctcaatcctttagcttgctcatttatggatttgcaatttccaaacgggcaattgacatatgtatctggcgaaggactgacgacaagtgcttttgtgcctttttgtggtggtcttcttcaagcacagggtcaatatccaggcgacatgagatttagttactcttgtaagaataaatgtggaacccgaatcacaccaatggtacattggcctgataaatcatttgggttggatctttctcaacccttggcttggcgtagatccggactactgatgaaaccgacaattcaagtcagtgtatgtcccacattcggtggaagcaatcccgggattaaggcagaagttattcactcgttgagcgatgacttgaatctgatatgtggctacgcactcaatgcacatccttcagcatttgcctctgtagcttttggtcggtcgaaatggaatggaaacattggacgcacgggaatagttgttagagctgatactccacttgcaagtattggccagccttctttctctatccagcttaataacgctttcgagttctgaatctttccaatataacataggagaaaaaaaactctgtccatttagtcgtcatgtacatatatatgtttgaacagactgcttttatccctcggtcacttttgtatatggtagtttactcaattaacccacaagacagtctctgtaattccagcaaatattttcaccacgtaaagattacagtttc

SEQ ID NO: 1232 - protein, 476 aa, Arabidopsis thaliana
MSMERSLEAWEEVQRHGQDLADRLAQGFTGLIHINPPSFPWPPNHHHLHKAKLFDLEFPTQHFSVIKDSRFSINQPINGVTAILDIGNKIGQAGVDFGAGLNVMVQQFFRRLPIPFLHEDNNKLVVSVDGDKSTRSHRAYVITKGDLGMATERLRDSGFSKTDDTASVTMSEEEVADSYLRAAGLLGRSKGTIDTSSSYDSRTNGMEHSLAARGDLWRVEASHSSSTASDGNSSLFLLQLGPLLFLRDSTLLLPLHLSKQHLLWYGYDRKKGMHSLCPAIWSKHRRWLMMSMLSLNPLACSFMDLQFPNGQLTYVSGEGLTTSAFVPFCGGLLQAQGQYPGDMRFSYSCKNKCGTRITPMVHWPDKSFGLDLSQPLAWRRSGLLMKPTIQVSVCPTFGGSNPGIKAEVIHSLSDDLNLICGYALNAHPSAFASVAFGRSKWNGNIGRTGIVVRADTPLASIGQPSFSIQLNNAFEF

SEQ ID NO: 1233 - protein, 474 aa, Arabidopsis thaliana
MERSLEAWEEVQRHGQDLADRLAQGFTGLIHINPPSFPWPPNHHHLHKAKLFDLEFPTQHFSVIKDSRFSINQPINGVTAILDIGNKIGQAGVDFGAGLNVMVQQFFRRLPIPFLHEDNNKLVVSVDGDKSTRSHRAYVITKGDLGMATERLRDSGFSKTDDTASVTMSEEEVADSYLRAAGLLGRSKGTIDTSSSYDSRTNGMEHSLAARGDLWRVEASHSSSTASDGNSSLFLLQLGPLLFLRDSTLLLPLHLSKQHLLWYGYDRKKGMHSLCPAIWSKHRRWLMMSMLSLNPLACSFMDLQFPNGQLTYVSGEGLTTSAFVPFCGGLLQAQGQYPGDMRFSYSCKNKCGTRITPMVHWPDKSFGLDLSQPLAWRRSGLLMKPTIQVSVCPTFGGSNPGIKAEVIHSLSDDLNLICGYALNAHPSAFASVAFGRSKWNGNIGRTGIVVRADTPLASIGQPSFSIQLNNAFEF

SEQ ID NO: 1234 - protein, 373 aa, Arabidopsis thaliana
MVQQFFRRLPIPFLHEDNNKLVVSVDGDKSTRSHRAYVITKGDLGMATERLRDSGFSKTDDTASVTMSEEEVADSYLRAAGLLGRSKGTIDTSSSYDSRTNGMEHSLAARGDLWRVEASHSSSTASDGNSSLFLLQLGPLLFLRDSTLLLPLHLSKQHLLWYGYDRKKGMHSLCPAIWSKHRRWLMMSMLSLNPLACSFMDLQFPNGQLTYVSGEGLTTSAFVPFCGGLLQAQGQYPGDMRFSYSCKNKCGTRITPMVHWPDKSFGLDLSQPLAWRRSGLLMKPTIQVSVCPTFGGSNPGIKAEVIHSLSDDLNLICGYALNAHPSAFASVAFGRSKWNGNIGRTGIVVRADTPLASIGQPSFSIQLNNAFEF

SEQ ID NO: 1235 - DNA, 1255 bp, Arabidopsis thaliana
accaacaagaacaatggcggtttatcatctccttctctcgagcccaccttcgcttcttcttctccctccttctcctcgccgccctaacctcaccttaatccgccgtatcccagctcatcctcgcctcggaaactcgaccagcttgctttcttcttcgtcaccggtaattcggaaaattctggttcgtagcactctccgggaagaccaacccatcgcctctgactacgagagtagtcctactctactgatcggtgaagattctgctgcttttgaattagggaaacagaagcttgtttcctgggtttatttcggtgttgtccttggagttgttctctttatcctcaatgttgtttggatcgataattccaccggtttcggaaaatcattcatcgacgccgtctctaacatctccggctcaccggaggttgctatgttaatgcttatccttatatttgcaattgtacatagtggtttagctagtctaagggatataggagagaaacttataggtgaacgagcatttcgtgttttgtttgctggaatctctcttcctttagctatgagcaccattgtttactttataaaccatagatatgatgggtcacagttatggcagcttcagggtgttcctggagtccatgaagctatttgggtcgctaattttgtatccttcttctttctctatccttcaaccttcaatcttctggaggtagcagctgttgacaaaccgaagatgcatctctgggagaccggcatcatgagaatcactcgacatcctcagatggttggacaaatcgtttggtgtttagcacatactctctggatcggaaacacagtagctgcatcagcttctctcggtttgattgcacaccatttgtttggggcgtggaatggagacaggagattggcaaaaagatatggaaaggattttgaaagcatcaagaagagaacaagtgtgattccatttgctgccattttcgaaggacggcaagttttacctgaggattactacaaagaatttgtcaggttgccatatcttgcaatcactgcgttaacggttggggcatattttgctcacccgctaatgcaaggtgcaagctttaggcttcattggtaaattatatgtcatgctttaggcttcattggtaaattatatgtcatttatgtttgtttgtttcctgcagtgttcataaagacttgttaaggaacaaatgtatacaaaaagccttattgtttgtgatacttgactcttctg

SEQ ID NO: 1236 - protein, 371 aa, Arabidopsis thaliana
PTRTMAVYHLLLSSPPSLLLLPPSPRRPNLTLIRRIPAHPRLGNSTSLLSSSSPVIRKILVRSTLREDQPIASDYESSPTLLIGEDSAAFELGKQKLVSWVYFGVVLGVVLFILNVVWIDNSTGFGKSFIDAVSNISGSPEVAMLMLILIFAIVHSGLASLRDIGEKLIGERAFRVLFAGISLPLAMSTIVYFINHRYDGSQLWQLQGVPGVHEAIWVANFVSFFFLYPSTFNLLEVAAVDKPKMHLWETGIMRITRHPQMVGQIVWCLAHTLWIGNTVAASASLGLIAHHLFGAWNGDRRLAKRYGKDFESIKKRTSVIPFAAIFEGRQVLPEDYYKEFVRLPYLAITALTVGAYFAHPLMQGASFRLHW

SEQ ID NO: 1237 - protein, 367 aa, Arabidopsis thaliana
MAVYHLLLSSPPSLLLLPPSPRRPNLTLIRRIPAHPRLGNSTSLLSSSSPVIRKILVRSTLREDQPIASDYESSPTLLIGEDSAAFELGKQKLVSWVYFGVVLGVVLFILNVVWIDNSTGFGKSFIDAVSNISGSPEVAMLMLILIFAIVHSGLASLRDIGEKLIGERAFRVLFAGISLPLAMSTIVYFINHRYDGSQLWQLQGVPGVHEAIWVANFVSFFFLYPSTFNLLEVAAVDKPKMHLWETGIMRITRHPQMVGQIVWCLAHTLWIGNTVAASASLGLIAHHLFGAWNGDRRLAKRYGKDFESIKKRTSVIPFAAIFEGRQVLPEDYYKEFVRLPYLAITALTVGAYFAHPLMQGASFRLHW

SEQ ID NO: 1238 - protein, 228 aa, Arabidopsis thaliana
MLMLILIFAIVHSGLASLRDIGEKLIGERAFRVLFAGISLPLAMSTIVYFINHRYDGSQLWQLQGVPGVHEAIWVANFVSFFFLYPSTFNLLEVAAVDKPKMHLWETGIMRITRHPQMVGQIVWCLAHTLWIGNTVAASASLGLIAHHLFGAWNGDRRLAKRYGKDFESIKKRTSVIPFAAIFEGRQVLPEDYYKEFVRLPYLAITALTVGAYFAHPLMQGASFRLHW

SEQ ID NO: 1239 - DNA, 1060 bp, Arabidopsis thaliana
aaaaatttgttcgattctcattcttcttctcacagtcgtaaaccctaaaaaaaaaaacagagaaatcaaatttcaatctcgaaggatctacaaagaagcatgacgaccggagatctcgttaatatccatcctactgagcttaaattcccctttgagttgaagaaacaaagttcgtgttcgatgcaattgaccaacaagacaactactcaatgtgtcgcttttaaggttaaaacaaccaatcctcgcaaatactgtgttcgtcctaacactggtgttgtcttgcccggtgattcctgcaatgttacagtgacgatgcaagcccagaaagaggcaccacttgatatgcaatgcaaagacaagttccttgttcagactgttgttgtctctgatggtactacttccaaagaagtcctcgctgaaatgttcaacaaggaggctggtagagtgattgaggatttcaaactgcgagttgtttacattcctgctaatcctccttcacctgtccctgaaggttctgaagaaggcaactctcctatggcttccctcaacgatattgcctctcaatctgcctcactctttgatgacgtgtcaagaacgtttgaagaaacaagtgagaaatcttcagaggcatggtctatgatttccaaattgacggaggagaagacttctgctactcaacaaagtcagaagctccgtctcgaactggaaatgctgaggaaagaaacaagcaagaagcagtcgggtggtcattccttgctcttgatgctgctggtgggtctgctcggttgcgtgattggctacttattgaaccggatataaacgccatggggttagcttcatcatccttttaatcatcaaatcttgcaaagttcttaagatttttgaccagattttcgtaaaatggaggtggtttttttttaaaagtttcatatttaagctgtaaaatcagtagctgtagcacaggaacaggtgtgattttgtggcaggtttcttgttattgatttaaacacactttcgagtctgtagtaagatctcaagagtcgttcttatgattggaatt

SEQ ID NO: 1240 - protein, 239 aa, Arabidopsis thaliana
MTTGDLVNIHPTELKFPFELKKQSSCSMQLTNKTTTQCVAFKVKTTNPRKYCVRPNTGVVLPGDSCNVTVTMQAQKEAPLDMQCKDKFLVQTVVVSDGTTSKEVLAEMFNKEAGRVIEDFKLRVVYIPANPPSPVPEGSEEGNSPMASLNDIASQSASLFDDVSRTFEETSEKSSEAWSMISKLTEEKTSATQQSQKLRLELEMLRKETSKKQSGGHSLLLMLLVGLLGCVIGYLLNRI

SEQ ID NO: 1241 - protein, 212 aa, Arabidopsis thaliana
MQLTNKTTTQCVAFKVKTTNPRKYCVRPNTGVVLPGDSCNVTVTMQAQKEAPLDMQCKDKFLVQTVVVSDGTTSKEVLAEMFNKEAGRVIEDFKLRVVYIPANPPSPVPEGSEEGNSPMASLNDIASQSASLFDDVSRTFEETSEKSSEAWSMISKLTEEKTSATQQSQKLRLELEMLRKETSKKQSGGHSLLLMLLVGLLGCVIGYLLNRI

SEQ ID NO: 1242 - protein, 168 aa, Arabidopsis thaliana
MQAQKEAPLDMQCKDKFLVQTVVVSDGTTSKEVLAEMFNKEAGRVIEDFKLRVVYIPANPPSPVPEGSEEGNSPMASLNDIASQSASLFDDVSRTFEETSEKSSEAWSMISKLTEEKTSATQQSQKLRLELEMLRKETSKKQSGGHSLLLMLLVGLLGCVIGYLLNRI

SEQ ID NO: 1243 - DNA, 1187 bp, Arabidopsis thaliana
aaattcaagtagaaacaatggagaagccaaagttcaagactgtccaagaggtggttgcagctggcgaaggactgccggagagatatctccacgcacccaccggagacggcgaagttcaacctcttaacgcagcggtaccggagatggatattccggccatcgatctgaatcttctcctctcttcttctgaagctggtcaacaagagctgagtaaacttcactcggcactctctacatggggcgttgttcaggtgatgaatcatggaattacaaaagcgtttcttgacaagatttacaagctaaccaaggagttctttgcgcttccgaccgaagagaaacagaagtgcgcgagagagattgatagtatccaaggatatggtaacgacatgattctttgggatgatcaagttcttgattggatcgaccgtttgtatattactacttaccctgaagatcaaagacaacttaatttctggcctgaagtcccacttggattcagggaaactttacatgaatacacaatgaagcaacggatagtgattgagcaattttttaaggccatggctagatctttggaattagaagagaatagttttctagacatgtatggagaaagtgctacgttggatactagattcaacatgtatccaccatgtccgagcccggacaaggttattggtgttaaaccgcacgctgatggctcggctatcactcttctcttacccgacaaagatgtcggagggcttcagttccagaaagatgggaagtggtataaagctcctatagtccctgatacaattttgatcaatgttggtgatcaaatggagataatgagcaatgggatatacaagagcccggttcatagagtggtgactaacagagaaaaggaaagaatatctgtggcaactttttgcattccaggtgcagataaagagattcagcctgtgaatgagcttgtgtctgaggcaagaccaagattatataaaacagttaagaagtatgtggagctctacttcaagtactatcaacaaggccgaagacctattgaagctgcattgatctgatcacacttttcaagtctcatttattggtttcacaaatgaatctgtttctttcgttacttgagatcctttataagaataaaactgtttccttgtttgttggaatgtgaggctgcattgtgttgc

SEQ ID NO: 1244 - protein, 353 aa, Arabidopsis thaliana
IQVETMEKPKFKTVQEVVAAGEGLPERYLHAPTGDGEVQPLNAAVPEMDIPAIDLNLLLSSSEAGQQELSKLHSALSTWGVVQVMNHGITKAFLDKIYKLTKEFFALPTEEKQKCAREIDSIQGYGNDMILWDDQVLDWIDRLYITTYPEDQRQLNFWPEVPLGFRETLHEYTMKQRIVIEQFFKAMARSLELEENSFLDMYGESATLDTRFNMYPPCPSPDKVIGVKPHADGSAITLLLPDKDVGGLQFQKDGKWYKAPIVPDTILINVGDQMEIMSNGIYKSPVHRVVTNREKERISVATFCIPGADKEIQPVNELVSEARPRLYKTVKKYVELYFKYYQQGRRPIEAALI

SEQ ID NO: 1245 - protein, 348 aa, Arabidopsis thaliana
MEKPKFKTVQEVVAAGEGLPERYLHAPTGDGEVQPLNAAVPEMDIPAIDLNLLLSSSEAGQQELSKLHSALSTWGVVQVMNHGITKAFLDKIYKLTKEFFALPTEEKQKCAREIDSIQGYGNDMILWDDQVLDWIDRLYITTYPEDQRQLNFWPEVPLGFRETLHEYTMKQRIVIEQFFKAMARSLELEENSFLDMYGESATLDTRFNMYPPCPSPDKVIGVKPHADGSAITLLLPDKDVGGLQFQKDGKWYKAPIVPDTILINVGDQMEIMSNGIYKSPVHRVVTNREKERISVATFCIPGADKEIQPVNELVSEARPRLYKTVKKYVELYFKYYQQGRRPIEAALI

SEQ ID NO: 1246 - protein, 306 aa, Arabidopsis thaliana
MDIPAIDLNLLLSSSEAGQQELSKLHSALSTWGVVQVMNHGITKAFLDKIYKLTKEFFALPTEEKQKCAREIDSIQGYGNDMILWDDQVLDWIDRLYITTYPEDQRQLNFWPEVPLGFRETLHEYTMKQRIVIEQFFKAMARSLELEENSFLDMYGESATLDTRFNMYPPCPSPDKVIGVKPHADGSAITLLLPDKDVGGLQFQKDGKWYKAPIVPDTILINVGDQMEIMSNGIYKSPVHRVVTNREKERISVATFCIPGADKEIQPVNELVSEARPRLYKTVKKYVELYFKYYQQGRRPIEAALI

SEQ ID NO: 1247 - DNA, 1492 bp, Arabidopsis thaliana
ccacgcgtccgccgctcttctccactcttcttctctgttctatcgcagacatttttgtttatatgcatacataataataatacactcttgtcaggatttttgattctctctttggttttctcggaaaaatgtctgcgatactccaaggagctggagctgcaacggctctctcgccgtttaattctatcgattccaacaaactcgttgctccttctcgctcttctctttcagtgaggagcaagagatacattgttgccggatctgatagtaaaagctttggttctagcctcgtagctcgtcgctctgagccgttgataccaaatgctgttacgacgaaggcggacactgctgcgagctctacttcatcaaagcctggacatgagctattacttttcgaggctcttcaagaaggtctagaagaagagatggacagagatccacatgtatgtgtcatgggtgaagatgtaggccattacggaggctcatacaaagtaactaaaggcctagctgataagtttggcgatctcagggttctggacactccaatctgtgaaaacgccttcaccggtatgggcattggagccgccatgacaggactaagacccgtcatcgaaggtatgaacatggggtttctactcttagccttcaaccaaatctccaacaactgtggtatgcttcactatacatccggtggtcaattcactatcccggttgttatccgtgggcctggaggtgtgggccggcagctcggagccgagcattcccagcgtctcgagtcttacttccagtcaatccctgggatccagatggtggcttgctcaacaccttacaacgctaaaggattgatgaaagcggcgataagaagtgagaatcctgtgattctgtttgaacacgttctgctctataacctcaaggagagtattccggatgaagaatacatatgtaatctggaagaagcagaaatggtcagacccggtgaacacatcacgatactgacgtattcaaggatgaggtaccatgtaatgcaggctgcaaagacgctggtgaacaaagggtatgatccagaggttatcgacataaggtcgttgaagccgtttgatctctacacaattggaaactcggtgaagaagacacaccgggttttgattgtggaggaatgtatgagaacgggaggaatcggagccagtttgacggctgcaataaacgagaactttcatgattacttagatgctccggtgatgtgtttgtcttctcaggatgtcccaactccttacgccggtacattggaagaatggacggttgttcagccagctcagatcgtcactgccgtcgaacaactttgccagtaattgctttttttacggtgattgtgttttacccttttttactttttgttactgtttgtcttcgatggaaaatgcttgtgaaatgaaaactctgaattttactcttatgatatgagcatttatattttctatagataataacttcc

SEQ ID NO: 1248 - protein, 406 aa, Arabidopsis thaliana
MSAILQGAGAATALSPFNSIDSNKLVAPSRSSLSVRSKRYIVAGSDSKSFGSSLVARRSEPLIPNAVTTKADTAASSTSSKPGHELLLFEALQEGLEEEMDRDPHVCVMGEDVGHYGGSYKVTKGLADKFGDLRVLDTPICENAFTGMGIGAAMTGLRPVIEGMNMGFLLLAFNQISNNCGMLHYTSGGQFTIPVVIRGPGGVGRQLGAEHSQRLESYFQSIPGIQMVACSTPYNAKGLMKAAIRSENPVILFEHVLLYNLKESIPDEEYICNLEEAEMVRPGEHITILTYSRMRYHVMQAAKTLVNKGYDPEVIDIRSLKPFDLYTIGNSVKKTHRVLIVEECMRTGGIGASLTAAINENFHDYLDAPVMCLSSQDVPTPYAGTLEEWTVVQPAQIVTAVEQLCQ

SEQ ID NO: 1249 - protein, 307 aa, Arabidopsis thaliana
MDRDPHVCVMGEDVGHYGGSYKVTKGLADKFGDLRVLDTPICENAFTGMGIGAAMTGLRPVIEGMNMGFLLLAFNQISNNCGMLHYTSGGQFTIPVVIRGPGGVGRQLGAEHSQRLESYFQSIPGIQMVACSTPYNAKGLMKAAIRSENPVILFEHVLLYNLKESIPDEEYICNLEEAEMVRPGEHITILTYSRMRYHVMQAAKTLVNKGYDPEVIDIRSLKPFDLYTIGNSVKKTHRVLIVEECMRTGGIGASLTAAINENFHDYLDAPVMCLSSQDVPTPYAGTLEEWTVVQPAQIVTAVEQLCQ

SEQ ID NO: 1250 - protein, 298 aa, Arabidopsis thaliana
MGEDVGHYGGSYKVTKGLADKFGDLRVLDTPICENAFTGMGIGAAMTGLRPVIEGMNMGFLLLAFNQISNNCGMLHYTSGGQFTIPVVIRGPGGVGRQLGAEHSQRLESYFQSIPGIQMVACSTPYNAKGLMKAAIRSENPVILFEHVLLYNLKESIPDEEYICNLEEAEMVRPGEHITILTYSRMRYHVMQAAKTLVNKGYDPEVIDIRSLKPFDLYTIGNSVKKTHRVLIVEECMRTGGIGASLTAAINENFHDYLDAPVMCLSSQDVPTPYAGTLEEWTVVQPAQIVTAVEQLCQ

SEQ ID NO: 1251 - DNA, 1221 bp, Arabidopsis thaliana
tgaacccaaacaaaaaaacattttttctctataaatcctttattattgttataaaaactccgatggatcggcaaaattccgatgacatcatgagatttctcgatggaatggctagctccgacgacgttcttttcggttttcttgacgaaggaaaccagtcaccggaagatttctccgtaaacctcaacgccggcgaagatgacggtgacgaagacgacaataataacaattctgaagataacaaagctttttggcaggaacacgaacaacttcttcaggggacactgtataggacaagttccattgagacaaagattagacaagctacaaaagaagcgttgaaacaagttaaatctaagggtctttattgtgtttgccggcgaccagtggacggcggttgccggagttgcttacgtggcgaaatctctagacacctaagagatgtcgccggctacgattgcgtcatctctaaatctaaatggagaagttgtcaagacatccctgcagaggaaaacgaatttatagagattgtggaccgatcgggttcaaagaaaagcgagatgcgagtggtgattgagttatcatttagggcagagtttgagattgcaaaaggcagtgaagagtacaaaagacttatcagtcgattgcctgaggtttacgtcgggaaaaccgagaggcttcgatctctgataaagatattgtgcatagcgggaaagaaatgcttgagagacaagaaaatgcatatggctccttggagaaaacacaagtacatgcaagccaagtggcttggcacatgtgatcgatctagctccttggaagcttcggtttccgaggccatggagccagaaaattgggtgccggtggcgaagcctagggtttctatgttgaactatgatggtctcttaggtggtttctctgccggtccggccactgtagcggtcgtgtgatatttttgtactatgtttttttgatgacttgtaattattaagtgattagggtgagtcatgagtgttaattatggtttctgatttgaacttagcaagaaatggtctcagcggctgtgattcgagcctctacattgtgtagtaagggacgaagatgctgttttgtgtcattggtgctggaagaaattagacatttgtgatttttttttatattgactgtatacgagtgattaacattaaaatttaacagaaataatatacattttgagtttcgagc

SEQ ID NO: 1252 - protein, 314 aa, Arabidopsis thaliana
NPNKKTFFLYKSFIIVIKTPMDRQNSDDIMRFLDGMASSDDVLFGFLDEGNQSPEDFSVNLNAGEDDGDEDDNNNNSEDNKAFWQEHEQLLQGTLYRTSSIETKIRQATKEALKQVKSKGLYCVCRRPVDGGCRSCLRGEISRHLRDVAGYDCVISKSKWRSCQDIPAEENEFIEIVDRSGSKKSEMRVVIELSFRAEFEIAKGSEEYKRLISRLPEVYVGKTERLRSLIKILCIAGKKCLRDKKMHMAPWRKHKYMQAKWLGTCDRSSSLEASVSEAMEPENWVPVAKPRVSMLNYDGLLGGFSAGPATVAVV

SEQ ID NO: 1253 - protein, 294 aa, Arabidopsis thaliana
MDRQNSDDIMRFLDGMASSDDVLFGFLDEGNQSPEDFSVNLNAGEDDGDEDDNNNNSEDNKAFWQEHEQLLQGTLYRTSSIETKIRQATKEALKQVKSKGLYCVCRRPVDGGCRSCLRGEISRHLRDVAGYDCVISKSKWRSCQDIPAEENEFIEIVDRSGSKKSEMRVVIELSFRAEFEIAKGSEEYKRLISRLPEVYVGKTERLRSLIKILCIAGKKCLRDKKMHMAPWRKHKYMQAKWLGTCDRSSSLEASVSEAMEPENWVPVAKPRVSMLNYDGLLGGFSAGPATVAVV

SEQ ID NO: 1254 - protein, 285 aa, Arabidopsis thaliana
MRFLDGMASSDDVLFGFLDEGNQSPEDFSVNLNAGEDDGDEDDNNNNSEDNKAFWQEHEQLLQGTLYRTSSIETKIRQATKEALKQVKSKGLYCVCRRPVDGGCRSCLRGEISRHLRDVAGYDCVISKSKWRSCQDIPAEENEFIEIVDRSGSKKSEMRVVIELSFRAEFEIAKGSEEYKRLISRLPEVYVGKTERLRSLIKILCIAGKKCLRDKKMHMAPWRKHKYMQAKWLGTCDRSSSLEASVSEAMEPENWVPVAKPRVSMLNYDGLLGGFSAGPATVAVV

SEQ ID NO: 1255 - DNA, 1326 bp, Arabidopsis thaliana
gaagtgaccttcttccttgtcttttttctctccctgttgggatctctgagaaaaaaaaaatccatccgatcttcaaaaaaagtcaccccctttaacattcttctccaatctctctacaaaccctaatctcagccatggatctcgctgcagaagagcttcaatttctcaacattcaaggcatattacgtgaatccacaacaatccccaaattttccccaaaaaccttctacctcataaccctaaccctaattttccctctctccttcgcaatcctcgctcattccctctttacccaaccaatcttagctcagctagatgcaactcctccttcagatcaatctaaaaccaatcacgaatggacccttcttctcatttatcaattcatctacgtcatcttcctcttcgccttctctcttctctcaacagccgccgtcgtcttcaccgtcgcttcgctttacacgggaaagccagtttctttctcttcaacaatgtcagcgattcctctggttttgaagcgtttgttcattaccttcctttgggtttctttaatgatgcttgtgtacaactctgtcttcttgttgtttctcgttgttttgatcgtagctatcgatttacaaagcgtgattctcgctgtcttctcgatggttgtgattttcgttctgtttttgggtgttcatgtttacatgactgcttggtggcatttagctagtgtagtctctgttcttgaaccgatttacggtatcgccgcgatgaagaagagttacgagttgcttaatggaagaactaatatggcgtgttcgatggtttttatgtatcttgctctttgtggaatcactgctggtgttttcggtggtgttgtggttcatggaggtgatgatttcgggttgtttacgaagattgttgttggtggtttcttggttgggattctagtgattgtgaatctagttgggctgcttgtgcagagtgtgttttactatgtttgtaagagttttcatcatcagccgattgataaatctgcgttgcacgatcatcttggtggatatcttggtgactatgtgccgttaaagagcagtattcagatggagaactttgatatttaatcgttaaatggattggatgatgatgatgaagaagaaacggtttttgcggtttgtcattgtaagttgtaatgtttgtaattttctatagtgtttgtattagcttttgcataatctgaattaatttgggggatagacttatattgcagatgttctgttcctttgtaatttcatagtgttgtttttttcttcccaaaattggaagattaatgaaataaatttgtttatt

SEQ ID NO: 1256 - protein, 321 aa, Arabidopsis thaliana
MDLAAEELQFLNIQGILRESTTIPKFSPKTFYLITLTLIFPLSFAILAHSLFTQPILAQLDATPPSDQSKTNHEWTLLLIYQFIYVIFLFAFSLLSTAAVVFTVASLYTGKPVSFSSTMSAIPLVLKRLFITFLWVSLMMLVYNSVFLLFLVVLIVAIDLQSVILAVFSMVVIFVLFLGVHVYMTAWWHLASVVSVLEPIYGIAAMKKSYELLNGRTNMACSMVFMYLALCGITAGVFGGVVVHGGDDFGLFTKIVVGGFLVGILVIVNLVGLLVQSVFYYVCKSFHHQPIDKSALHDHLGGYLGDYVPLKSSIQMENFDI

SEQ ID NO: 1257 - protein, 203 aa, Arabidopsis thaliana
MSAIPLVLKRLFITFLWVSLMMLVYNSVFLLFLVVLIVAIDLQSVILAVFSMVVIFVLFLGVHVYMTAWWHLASVVSVLEPIYGIAAMKKSYELLNGRTNMACSMVFMYLALCGITAGVFGGVVVHGGDDFGLFTKIVVGGFLVGILVIVNLVGLLVQSVFYYVCKSFHHQPIDKSALHDHLGGYLGDYVPLKSSIQMENFDI

SEQ ID NO: 1258 - protein, 183 aa, Arabidopsis thaliana
MMLVYNSVFLLFLVVLIVAIDLQSVILAVFSMVVIFVLFLGVHVYMTAWWHLASVVSVLEPIYGIAAMKKSYELLNGRTNMACSMVFMYLALCGITAGVFGGVVVHGGDDFGLFTKIVVGGFLVGILVIVNLVGLLVQSVFYYVCKSFHHQPIDKSALHDHLGGYLGDYVPLKSSIQMENFDI

SEQ ID NO: 1259 - DNA, 949 bp, Arabidopsis thaliana
gtctgatatttcttctactctcaagtctcaaccacataaccaataaaaaatgctactaatcccaatttcttcttcttcgtcttcgtctatccctcctcctaattcatatccatcgaatcatcactctctgtttttctccaatctcacattcccaattcaacatggaagtagaaagttgaagactttgcgactcagagccaatttctgggagtcaatccgatctgggtttgtgaagaataataatagtacgcaacttgtggaaccaccttctatagtcaatgatgaagaagaagagactgagccattgttacctgtggaatttactttagttgagagaaatcttgaagatggtttagttgaagagatcatattttcttctggtggtgagattgatgtttatgatcttcaaggtctttgtgataaggtgggatggccaaggagaccgttagtgaaactagctgctgctttgaagaatagttatatggttgctactttgcattctgtaatgaagtcatcatcagattcagattcatcagaaggcggggatggggagaagcagcaggagaagaagcttattggtatggcacgtgcgacgtcggatcatgcctttaatgctacaatttgggatgttcttgttgatcctgaatatcagggtcaagggctaggtaaagctcttgttgaaaaacttgtaagggctcttcttcaaagagatattggtaacatatctctgtttgcagatagtcaagttgtggatttctatcagaacttggggtttgaggctgatccagaaggcatcaaaggcatgttttggtacccaaagtagtacttggtgattgcaagaaaatgggattgttacttgtatgtataatttctttgctttcttatatggaatctataaggaagtttgaactgtgcaatttgtaatccaaaagctatttgacattcaagt

SEQ ID NO: 1260 - protein, 257 aa, Arabidopsis thaliana
MLLIPISSSSSSSIPPPNSYPSNHHSLFFSNLTFPIQHGSRKLKTLRLRANFWESIRSGFVKNNNSTQLVEPPSIVNDEEEETEPLLPVEFTLVERNLEDGLVEEIIFSSGGEIDVYDLQGLCDKVGWPRRPLVKLAAALKNSYMVATLHSVMKSSSDSDSSEGGDGEKQQEKKLIGMARATSDHAFNATIWDVLVDPEYQGQGLGKALVEKLVRALLQRDIGNISLFADSQVVDFYQNLGFEADPEGIKGMFWYPK

SEQ ID NO: 1261 - DNA, 786 bp, Arabidopsis thaliana
gcaaaaaaacaaaaagatctgaaacaaaaatggtgaatcaaagaaagctacaagaagaagaagaggaaaaggagaattatcctctcattacaaccaaagtagttgagtatttgcagccagtaatgtgtcgagagcttctctgcaaatttccagataactctgcttttggattcgactactcacagagctctctttggtctcctctcttgcctcgaaattacgccagtccttcagatctagactccgacagttgcgtttgtcggaatcttaagctaggggagtttcaagtaggcaagaagaagaagatgaagatgatgtcaatgaagaagaacaagaagaagagtaaattactgaaactagacataccttcaatgaagaatgatgattcttctcctaaaattggctgttttcctcttcctaccaagggatggaatggtgtgttaaaggcagcttcaaaacatttcaagaaatcgaaaaagaagagagattcattcgctgatgccaagcttctcgacttcaaatactaagattatagcaacttcaattgcttttcattgtattcaataattactagacctttgatgaattgtgaagttgagctgtttctattatggtcatcatgtaatcatttggagtgtttgatcatagatatatccatgactgcttttgatttctgatgcatttgagttttagacacaagtagagattttgaaacagagtttgatgtacagttgaataaacaagcctaataccattactggtgaaatctagtagattttggttctg

SEQ ID NO: 1262 - protein, 174 aa, Arabidopsis thaliana
KKTKRSETKMVNQRKLQEEEEEKENYPLITTKVVEYLQPVMCRELLCKFPDNSAFGFDYSQSSLWSPLLPRNYASPSDLDSDSCVCRNLKLGEFQVGKKKKMKMMSMKKNKKKSKLLKLDIPSMKNDDSSPKIGCFPLPTKGWNGVLKAASKHFKKSKKKRDSFADAKLLDFKY

SEQ ID NO: 1263 - protein, 165 aa, Arabidopsis thaliana
MVNQRKLQEEEEEKENYPLITTKVVEYLQPVMCRELLCKFPDNSAFGFDYSQSSLWSPLLPRNYASPSDLDSDSCVCRNLKLGEFQVGKKKKMKMMSMKKNKKKSKLLKLDIPSMKNDDSSPKIGCFPLPTKGWNGVLKAASKHFKKSKKKRDSFADAKLLDFKY

SEQ ID NO: 1264 - protein, 134 aa, Arabidopsis thaliana
MCRELLCKFPDNSAFGFDYSQSSLWSPLLPRNYASPSDLDSDSCVCRNLKLGEFQVGKKKKMKMMSMKKNKKKSKLLKLDIPSMKNDDSSPKIGCFPLPTKGWNGVLKAASKHFKKSKKKRDSFADAKLLDFKY

SEQ ID NO: 1265 - DNA, 720 bp, Arabidopsis thaliana
gagagaggagaagtagaaatcgataaaggcgaagaaggaatcgcaaggaaggaagaaacttgagaggaagatcatgatcctagctgtgttgttcgccaattccgttgggaatgttttaatcgaaaggttcaatggagtaccagctgaggaacggctccactggcgatctttcttggttaagttgggagcagataatctcaaaggcgttaaaaatgaggagcttctcgttgcttgccacaagtcggtttatatcgtgtacacaatgctaggggatgttagcatcttccttgttggcaaagacgagtatgatgaacttgctttggcagaaaccatctatatcataacagcggctgtgaaagacgtatgtggaaagccgcctacagagcgagtgtttttggataaatatggaaggatttgcttgtgccttgatgaaatcgtttggaacggacttctggagaacaccgacaaagacaggatcaagcgactcatcagattgaaacctccttctgaagtttgatatgctccaaccaaccacacattcttcttctactcattttaagagctttctcattctccaccgattgttgtttgttgaatcacttctctatatcacatattcaactatcaactactgctgttgttcgatcagtccatcttgtagtgttgttttttaaatcttcagtttttagtgttacataacaaagaacaaatttctatccg

SEQ ID NO: 1266 - protein, 147 aa, Arabidopsis thaliana
MILAVLFANSVGNVLIERFNGVPAEERLHWRSFLVKLGADNLKGVKNEELLVACHKSVYIVYTMLGDVSIFLVGKDEYDELALAETIYIITAAVKDVCGKPPTERVFLDKYGRICLCLDEIVWNGLLENTDKDRIKRLIRLKPPSEV

SEQ ID NO: 1267 - protein, 84 aa, Arabidopsis thaliana
MLGDVSIFLVGKDEYDELALAETIYIITAAVKDVCGKPPTERVFLDKYGRICLCLDEIVWNGLLENTDKDRIKRLIRLKPPSEV

SEQ ID NO: 1268 - DNA, 1065 bp, Arabidopsis thaliana
agaagaaatctttcagatttgcgcatatcgacaattttccgagcggccagtttacgtattttgtttgtagttaacgtgtttcaaggactttgacaatggctgaggaagcgcataaggtaacattgaatgtctatgatttaagccaaggcttggcacgccagctctcacaatcactcctgggaaaggttattgaaggtgtatggcatacaggaatagttgtctatgggaatgagtacttttttggaggagggatacaacatttaccagttggaagaactccatatggaacaccaattcgaacgatagagttgggtctatcacatgtgcctaaagatgtattcgagatgtacttggaagaaatcagtcctcgttacactgctgaatcctacaatttacttactcacaactgcaacaacttcagcaacgaggtcgctcagtttttggtgggtaaagggattcctgactacattctccagcttcctaatgatgttctaaacagtcccatgggtggtcttataatgcctatgttgcaaggcctcgaaacaactctaaaggctggtgctgttcctcaagttccacagtttaggccacagccacaaccttttggagcttttagtaaagatgatggcccacaaattgtgatagctcctaagctcgaggcagcagaaacctcaactgcaactgagaaagtgccacctgttattcaaccatcagctagtaaagagaaggtcaaggacgacccgttgggtgatgctagggccaagattcaggaagagattacaagcgaatttgcagctctaatggcacaaggcacattacgagcaagtgaagcagctgctatggcgacaaaaagagtcatgcaaaagtacggacatctcaatgtaaacgcttagtgcaataacagagagatgaaacattttatttttactgtcttgaaactaagtccagaatcttgaacgatttcattacactattgccttcagctgtattatgttcaacgatctacaaattaattatcataaaagaggaaaagagcagtaaacaagagaaaaaaaaaaagatttt

SEQ ID NO: 1269 - protein, 265 aa, Arabidopsis thaliana
MAEEAHKVTLNVYDLSQGLARQLSQSLLGKVIEGVWHTGIVVYGNEYFFGGGIQHLPVGRTPYGTPIRTIELGLSHVPKDVFEMYLEEISPRYTAESYNLLTHNCNNFSNEVAQFLVGKGIPDYILQLPNDVLNSPMGGLIMPMLQGLETTLKAGAVPQVPQFRPQPQPFGAFSKDDGPQIVIAPKLEAAETSTATEKVPPVIQPSASKEKVKDDPLGDARAKIQEEITSEFAALMAQGTLRASEAAAMATKRVMQKYGHLNVNA

SEQ ID NO: 1270 - protein, 182 aa, Arabidopsis thaliana
MYLEEISPRYTAESYNLLTHNCNNFSNEVAQFLVGKGIPDYILQLPNDVLNSPMGGLIMPMLQGLETTLKAGAVPQVPQFRPQPQPFGAFSKDDGPQIVIAPKLEAAETSTATEKVPPVIQPSASKEKVKDDPLGDARAKIQEEITSEFAALMAQGTLRASEAAAMATKRVMQKYGHLNVNA

SEQ ID NO: 1271 - DNA, 901 bp, Arabidopsis thaliana
aacatatccattttgggaaaccataaattcccaaatgtcattcgccgaggaatttgaagctaatcttgtttcgctggcccatgttttgcagaagaaatatgctctcctgcgcgatttggataaaagtttgcaagaaaaccaacgacaaaatgaacaacgctgtgaaaaagaaatagaggatataagaaggggcagagctggaaatatcacacctaatacctctcttacaaagttctcagaggaagcacttgatgaacagaaacacagtgtccggattgctgacgagaaagtcacactggctatgcaggcatatgatctggtggatatgcatgttcagcaacttgaccagtatatgaaaaaatccggcgaagtgatccgcaaagagaaagaagctgccgctgcgacattagaactggagaacaacgggaaagccgggaatgctggtgaaggtggaagaggagggcgaaaaaagacaaggctagcaacagcagcgtcaacagcagcagcatcaactgggatgacttcaagtaatatggatctggatctgcctgtggatccaaacgaaccaacttactgcatctgcaaccaagttagctttggcgagatggttgcgtgtgacaacaatgcgtgcaagattgagtggttccatttcggttgcgtcggtctgaaagaacaacccaaggggaaatggtactgcccggagtgtgctacagtaaagaagagcaggaaaggtcgatgatttgaatgttcatgtctgctaataatccaaacagcttcatcatatctactgtaatccaaacagtttagtatatcaactcatgtaagatgttaccatgttgactataaattgtagaagtcttgtttcgttctttgtttgacaaaattaataactgagtttggg

SEQ ID NO: 1272 - protein, 245 aa, Arabidopsis thaliana
TYPFWETINSQMSFAEEFEANLVSLAHVLQKKYALLRDLDKSLQENQRQNEQRCEKEIEDIRRGRAGNITPNTSLTKFSEEALDEQKHSVRIADEKVTLAMQAYDLVDMHVQQLDQYMKKSGEVIRKEKEAAAATLELENNGKAGNAGEGGRGGRKKTRLATAASTAAASTGMTSSNMDLDLPVDPNEPTYCICNQVSFGEMVACDNNACKIEWFHFGCVGLKEQPKGKWYCPECATVKKSRKGR

SEQ ID NO: 1273 - protein, 234 aa, Arabidopsis thaliana
MSFAEEFEANLVSLAHVLQKKYALLRDLDKSLQENQRQNEQRCEKEIEDIRRGRAGNITPNTSLTKFSEEALDEQKHSVRIADEKVTLAMQAYDLVDMHVQQLDQYMKKSGEVIRKEKEAAAATLELENNGKAGNAGEGGRGGRKKTRLATAASTAAASTGMTSSNMDLDLPVDPNEPTYCICNQVSFGEMVACDNNACKIEWFHFGCVGLKEQPKGKWYCPECATVKKSRKGR

SEQ ID NO: 1274 - protein, 145 aa, Arabidopsis thaliana
MQAYDLVDMHVQQLDQYMKKSGEVIRKEKEAAAATLELENNGKAGNAGEGGRGGRKKTRLATAASTAAASTGMTSSNMDLDLPVDPNEPTYCICNQVSFGEMVACDNNACKIEWFHFGCVGLKEQPKGKWYCPECATVKKSRKGR

SEQ ID NO: 1275 - DNA, 817 bp, Arabidopsis thaliana
agaaccctacagatcatcccctacctcgctgcttcgggtcgaatcagcgagtcgggtcaaaattcacctgagaaaaatgttcgcgaggcggttcacttcgttcttcaaaggatcttcaacctcaagcccggacaaaacagctgggacattgggctcttttggtcgcaaggcagtgtctttcgtcttgattacagtcactggtggtgttgctttgagtgctctcggtgatctttctatctatcgtggatgtagcagcaaggcgatggagaaggtgatgaatagtaaggtgatgattgaagccatcggagagccaattgagaaagggccatggtacaatgcttcactagctgtttctcaccaaaggcactcagtgtcttgttcattccctgtgattggaccacaaggcacaggaatcttgcatctcaaagctgttcgcaatggagaagatagcatgttcgggtttctccagcaaagggactgggacattctgataatggacgcacttgtccatgtcccgtcaaacgagggaccccaacaaaccttgagaatcaacgttactgacatcgttgatccttcgcctggtacccacgataaacctttggaaccattagagccagagaagagctaaaaagagaaagagagagagagagaacgcttggtggagctcctggctagggttttattccattccattatatcttgtggaacaagagagagaattgggtcttttatttactaataatgaacaattttttaggagtatacaaaagttgaatacatgattgagagtctagtgaataacagcattgctatatcc

SEQ ID NO: 1276 - protein, 208 aa, Arabidopsis thaliana
EPYRSSPTSLLRVESASRVKIHLRKMFARRFTSFFKGSSTSSPDKTAGTLGSFGRKAVSFVLITVTGGVALSALGDLSIYRGCSSKAMEKVMNSKVMIEAIGEPIEKGPWYNASLAVSHQRHSVSCSFPVIGPQGTGILHLKAVRNGEDSMFGFLQQRDWDILIMDALVHVPSNEGPQQTLRINVTDIVDPSPGTHDKPLEPLEPEKS

SEQ ID NO: 1277 - protein, 183 aa, Arabidopsis thaliana
MFARRFTSFFKGSSTSSPDKTAGTLGSFGRKAVSFVLITVTGGVALSALGDLSIYRGCSSKAMEKVMNSKVMIEAIGEPIEKGPWYNASLAVSHQRHSVSCSFPVIGPQGTGILHLKAVRNGEDSMFGFLQQRDWDILIMDALVHVPSNEGPQQTLRINVTDIVDPSPGTHDKPLEPLEPEKS

SEQ ID NO: 1278 - protein, 121 aa, Arabidopsis thaliana
MEKVMNSKVMIEAIGEPIEKGPWYNASLAVSHQRHSVSCSFPVIGPQGTGILHLKAVRNGEDSMFGFLQQRDWDILIMDALVHVPSNEGPQQTLRINVTDIVDPSPGTHDKPLEPLEPEKS

SEQ ID NO: 1279 - DNA, 1699 bp, Arabidopsis thaliana
gccgaaccaatcaccctaaggggacacttaaagagagaaacaaatccttcttctaaaatattcttcaatcttcttctcgaagcttctccaaaaatggcgattacttcttctagaaccaccagatcaaacggatctgcttcgctccgatccaaatcaccgtccggtcgattctgtggcgtttactcaaaccgtatgccgtcatcatctccgtcgtcgtcaggtttcgcttcttccacaagctcaagtttctcctcaccgtctacagcgtttttcagcagccacaatcagaacaaccaccaccaacacagatctgcttctccgacgcgtgtgaatctattcacatcagctccgatgacgcaatcgtttcgttactcaatcgataacagatctatatcaccgaatcgatccatcgctgtttcttccaacaaacctagcaatcatcacaagattccggattcgaggagaagatgtatgtgctctccgacaacgcatcctggttcattccggtgtagtctacacaagaacgtcgcgaatccacatggtcaaggtacagcttcgtatacaacgaatggattgaatatgcgtcgatctgcgatgacgaattctcttgtgagaattggtggtgttgaaggtgaatgggtgcgaagagctttgactactttgattagaccatcttcacatcaactaaagagaagatctgcttatgagcctcgtcgtagtagactcgcatctatgtcgaaagcagaagatctttgaatctctcttcaggtttgttcttgtttttgatatactcagatctgccatgaacgagttgaatcaaggagcagaatcggagctgagtcataccggaccgagtcaaattcggagctgagttataccggaccgagttatgtaaaacggtgactaagacgacaccgtttttgttttgttgggtgggagatgagatgatgatgatgcattgtacatacacatattgcttattgaagcagaacaaaaaaatttcgcaagtcgaaagtatctagaaatctaaaaatggaaaatagtagtgacgaattgggtaattaaaatctggaaaaggacttagtagtaaatattgtttggattcaactttgcaaatctctccatctccattgttcgttgccttcaccgttagtttgttccgtcaagtcaacgttctctattctccgtcgttgacccgttctgtttgccgttaaccgtcgtcgtgtgttatgtgtgttccgttattatttctccaggtatgtgttgttcgtcgtgtcaggtatgtattttccgtttcttatttatttggttaatttcgttttactttttttgtgcacgtttgatctgtttttttttttttggtttgtctttttcaggtttcgtacaatgaggagaagatgattacttaaccgttacgttcaactttggaatattttgggtttgtggactttggaagaaaaatgaatttggactatgagaaaaatcaaatatatgacctaaaacacggagaatttgataaaggacgatcgaatatgagtgattttgattcgtggaacgattaaggttttggttttggagctggagaatgtgaaagattcgaaggaatcagatttttctctggaatttgtgaatcacagatttagattcctgaaacggttgaggttaaagtgaaaagattcaatgaaatcatatttttacc

SEQ ID NO: 1280 - protein, 251 aa, Arabidopsis thaliana
AEPITLRGHLKRETNPSSKIFFNLLLEASPKMAITSSRTTRSNGSASLRSKSPSGRFCGVYSNRMPSSSPSSSGFASSTSSSFSSPSTAFFSSHNQNNHHQHRSASPTRVNLFTSAPMTQSFRYSIDNRSISPNRSIAVSSNKPSNHHKIPDSRRRCMCSPTTHPGSFRCSLHKNVANPHGQGTASYTTNGLNMRRSAMTNSLVRIGGVEGEWVRRALTTLIRPSSHQLKRRSAYEPRRSRLASMSKAEDL

SEQ ID NO: 1281 - protein, 220 aa, Arabidopsis thaliana
MAITSSRTTRSNGSASLRSKSPSGRFCGVYSNRMPSSSPSSSGFASSTSSSFSSPSTAFFSSHNQNNHHQHRSASPTRVNLFTSAPMTQSFRYSIDNRSISPNRSIAVSSNKPSNHHKIPDSRRRCMCSPTTHPGSFRCSLHKNVANPHGQGTASYTTNGLNMRRSAMTNSLVRIGGVEGEWVRRALTTLIRPSSHQLKRRSAYEPRRSRLASMSKAEDL

SEQ ID NO: 1282 - protein, 187 aa, Arabidopsis thaliana
MPSSSPSSSGFASSTSSSFSSPSTAFFSSHNQNNHHQHRSASPTRVNLFTSAPMTQSFRYSIDNRSISPNRSIAVSSNKPSNHHKIPDSRRRCMCSPTTHPGSFRCSLHKNVANPHGQGTASYTTNGLNMRRSAMTNSLVRIGGVEGEWVRRALTTLIRPSSHQLKRRSAYEPRRSRLASMSKAEDL

SEQ ID NO: 1283 - DNA, 813 bp, Arabidopsis thaliana
acgtttacttttattataaacagatttctggagatatcgagaacattttcgcagccgcaagctacaaaacttttgatcccaaattcaacagatatctctgaatctatcgcttccaagggttttctctagcttaatctcagattcgaatcgttccatagtgatactatgccgaagaacaagggaaagggaggaaagaacaggaagagaggaaagaacgaagcagatgacgagaagagagagcttatattcaaagaagatggacaagaatacgcacaagtccttcgtatgcttggaaatggaagatgtgaagctatgtgtatcgatggaaccaagcgtctttgccatatccgtggtaagatgcataagaaggtttggattgcagcaggtgatattgtgcttgttggtttgagggattaccaagatgacaaagcggatgtgatccttaagtacatgtctgatgaggctaggcttcttaaggcttatggtgagcttccagagaatactcgtcttaatgaaggaattgttggtgatcttgaggatgatgatgataataatgatgatgactatgttgagtttgaggacgaagatatcgataggatctaaggctttgtttgttttttttttttccggcttgtatttccaatttgtgagacgtatgacttctggtgataaaacatcactgttgttgcaagatacttactgttttatattttgttcttcaatatctctattgttggtttccttggtgttcttgttgcataagtttgtctttcttcgcaatccattcaaaatgttgtgtgtcactgttgcttc

SEQ ID NO: 1284 - protein, 145 aa, Arabidopsis thaliana
MPKNKGKGGKNRKRGKNEADDEKRELIFKEDGQEYAQVLRMLGNGRCEAMCIDGTKRLCHIRGKMHKKVWIAAGDIVLVGLRDYQDDKADVILKYMSDEARLLKAYGELPENTRLNEGIVGDLEDDDDNNDDDYVEFEDEDIDRI

SEQ ID NO: 1285 - protein, 118 aa, Arabidopsis thaliana
MRLGFLRLMVSFQRILVLMKELLVILRMMMIIMMMTMLSLRTKISIGSKALFVFFFSGLYFQFVRRMTSGDKTSLLLQDTYCFIFCSSISLLLVSLVFLLHKFVFLRNPFKMLCVTVA

SEQ ID NO: 1286 - protein, 110 aa, Arabidopsis thaliana
MVSFQRILVLMKELLVILRMMMIIMMMTMLSLRTKISIGSKALFVFFFSGLYFQFVRRMTSGDKTSLLLQDTYCFIFCSSISLLLVSLVFLLHKFVFLRNPFKMLCVTVA

SEQ ID NO: 1287 - DNA, 3235 bp, Arabidopsis thaliana
tctccgacactcatgacccatccactctctctctctcacataacacagcagaagtaggtggaaagcaatgtccccttcttcttttctctctatctctttgctaatacctctctgctattacacatctagcgttcgacggaataaccagagagagctttctgcgacggctttaatggtgttgatgctggttctttgaggcctgtgcggagatttgggttttgggtgaattgtttgtagctgttgtcgttttcaattgtttgtatcgaaagagggtgaaattgaaacccaattggagcaggatttgtcgaatttagctgggtttcgtttcgaggttggatctggagattatgctgttgaggcaatggaggcttctttagcggctttggagcggccacgaggttcagcttctaatacggttttcaagagtggtccacttttcatatcatctaaaggattgggttggacgtcttggaagaaacgctggttcatcctcacacggacttctttggttttcttcaaaaatgaccctggtacactaccacaaaagggtggtgaagttaacttaactctgggaggaatcgacttgaataactctggaagtgttgtggtgagagaggataaaaaactgttgacggtattatttccagatgggcgtgatgggagagctttcactcttaaggctgagacatttgaagatttgtacgagtggaaaactgctcttgagcaggctcttgcacaagcccctaatgcagcactcatcatgggtcagaatggaatattccgtgctgaaactaacgaggctattgaagggcgggagaagcgtccattaaaatccttggttgttggaagaccaatcttacttgctctggaagatattgatggaagcccatcattccttgagaaagctcttcagtttattgagaagtatggaactaaaattgaagggatattaagacagtctgctgatgtggaagaggtggaacgtagagttcaagaatatgaacagggcaaaacggagttcacttttgatgaagatccacatgttgttggagactgcattaagcatgtattgagggagttgccttcttctccggtttcagcatcttgttgtactgccctgttggaagcttacagaatcgagtctaaggaggctcgcattagttcattgcgctctgctatagcggaaacatttccggaacctaatagacgtctactacaacgaattctgaaaatgatgcatactatctcgtctcattcccacgaaaatcgaatgaacccaaatgctgtagctgcttgcatggctcctctgctcctacgtcctcttctggctggtgaatgtgatttagaggacgattttgatggtggtgaagacaattctgctcagcttcttgctgctgctaatgctgccaacaatgctcaagccatcattacagttcttctggaggattatggaagtattttcgatgaagaaaatattcaaagatgttctatatcaactgaatcacatattggaaatagtgggcctgatgattcaagtgatgatgacaacaacatgaaaaatggatatcacaatgcagataatgaagttgaaccagtgactgatgacgataatgaccgtgcattgagtggaaaaatgagtgagagcagcggttgcacaggcagcgatctctatgaatacaagggatttgttgctgatgactctgatattgaatcaccaagagacacaaatggcccaagatgtaattcaaacatacgaacagatcatcttatgagaaatccttttgtcaattccacggatcaacaagctggagagcagataggcgatgatccaacaaaatacggagtaaactcgtgtctcgcacatgttagtgagtcttatcaacaatcagggacgggtctaaatgtacccactcatgggaatactttggctgctcctggtcttgaatcaccaagcgcgaaatccgtgaataagggcacaccctcctctgttcatgcaaaacgcgcaacattctggggtcgaggcagtgccagaaagatatccacagatgggtcttttgattcttcaggagaagacgagcttgctatacagaggctcgagaccacaaaaaatgaactgcgacaacgaattgcaaaggaggccagaggtaatgcaatattacaggctagcttggagagaaggaaacaagcactgcatgaacgtcgtttgtcgcttgaacaagatgtgtcaagattacaagagcagctgcaagctgaaagagatctccgagcagcactggaggttggtttgagcatgtcttctggacaattcagttcacatggtgtagattcaaaaacaagggctgagcttgaggaaattgctcttgctgaggctgatgtggccaggctgaagcagaaagttgcagaacttcaccatcagcttaaccagcaacgtcagactcattttggttccttctcagatgcacgtgatactcatcagtatctccagaatcacaatcctcaaaaaaggtttcttcagcaagattttgattccactcttgcctatgtaaatcatgaaaggaaacaaagacacgaggagaatgtactgggagcggagtggagaaatagtaaaggggcaggatcttttggtgttggcaatagcaggcaaccatctcgtaaacaaataccagaatcaacaaacacaactgactctaaaatcagtgaagagtctggaaagatatccgtggacaagctctcatccatagattctccatctattccgtcgacttcaagagtattagatataacagagtacccaaggcttaatcatccgtcagctgctgcatcagcagctctggtagagttaacaacacgtcttgatttcttcaaggaaagacgttcgcagctcatggagcagctccagaacctcgaccttaactacggcggctcatcttcccaagatttcatacaccggccatcatctccaccttggaactaacaacatgagaaaaaaagaagaagaaaaggctctatttgttctgtatatccttttggtgattgattaatgatgttagcatttgctctactcattttctcccccagaagactataatgaccttattcttttgggcaacagtcttgtgtgtatataaaggtattttgtaatgcaattttttttgttacgtgaggtttgttcatatgtgttaactctaaagctgtattgatatgttagtctctttatgctcttgagtttctgacc

SEQ ID NO: 1288 - protein, 870 aa, Arabidopsis thaliana
MEASLAALERPRGSASNTVFKSGPLFISSKGLGWTSWKKRWFILTRTSLVFFKNDPGTLPQKGGEVNLTLGGIDLNNSGSVVVREDKKLLTVLFPDGRDGRAFTLKAETFEDLYEWKTALEQALAQAPNAALIMGQNGIFRAETNEAIEGREKRPLKSLVVGRPILLALEDIDGSPSFLEKALQFIEKYGTKIEGILRQSADVEEVERRVQEYEQGKTEFTFDEDPHVVGDCIKHVLRELPSSPVSASCCTALLEAYRIESKEARISSLRSAIAETFPEPNRRLLQRILKMMHTISSHSHENRMNPNAVAACMAPLLLRPLLAGECDLEDDFDGGEDNSAQLLAAANAANNAQAIITVLLEDYGSIFDEENIQRCSISTESHIGNSGPDDSSDDDNNMKNGYHNADNEVEPVTDDDNDRALSGKMSESSGCTGSDLYEYKGFVADDSDIESPRDTNGPRCNSNIRTDHLMRNPFVNSTDQQAGEQIGDDPTKYGVNSCLAHVSESYQQSGTGLNVPTHGNTLAAPGLESPSAKSVNKGTPSSVHAKRATFWGRGSARKISTDGSFDSSGEDELAIQRLETTKNELRQRIAKEARGNAILQASLERRKQALHERRLSLEQDVSRLQEQLQAERDLRAALEVGLSMSSGQFSSHGVDSKTRAELEEIALAEADVARLKQKVAELHHQLNQQRQTHFGSFSDARDTHQYLQNHNPQKRFLQQDFDSTLAYVNHERKQRHEENVLGAEWRNSKGAGSFGVGNSRQPSRKQIPESTNTTDSKISEESGKISVDKLSSIDSPSIPSTSRVLDITEYPRLNHPSAAASAALVELTTRLDFFKERRSQLMEQLQNLDLNYGGSSSQDFIHRPSSPPWN

SEQ ID NO: 1289 - protein, 737 aa, Arabidopsis thaliana
MGQNGIFRAETNEAIEGREKRPLKSLVVGRPILLALEDIDGSPSFLEKALQFIEKYGTKIEGILRQSADVEEVERRVQEYEQGKTEFTFDEDPHVVGDCIKHVLRELPSSPVSASCCTALLEAYRIESKEARISSLRSAIAETFPEPNRRLLQRILKMMHTISSHSHENRMNPNAVAACMAPLLLRPLLAGECDLEDDFDGGEDNSAQLLAAANAANNAQAIITVLLEDYGSIFDEENIQRCSISTESHIGNSGPDDSSDDDNNMKNGYHNADNEVEPVTDDDNDRALSGKMSESSGCTGSDLYEYKGFVADDSDIESPRDTNGPRCNSNIRTDHLMRNPFVNSTDQQAGEQIGDDPTKYGVNSCLAHVSESYQQSGTGLNVPTHGNTLAAPGLESPSAKSVNKGTPSSVHAKRATFWGRGSARKISTDGSFDSSGEDELAIQRLETTKNELRQRIAKEARGNAILQASLERRKQALHERRLSLEQDVSRLQEQLQAERDLRAALEVGLSMSSGQFSSHGVDSKTRAELEEIALAEADVARLKQKVAELHHQLNQQRQTHFGSFSDARDTHQYLQNHNPQKRFLQQDFDSTLAYVNHERKQRHEENVLGAEWRNSKGAGSFGVGNSRQPSRKQIPESTNTTDSKISEESGKISVDKLSSIDSPSIPSTSRVLDITEYPRLNHPSAAASAALVELTTRLDFFKERRSQLMEQLQNLDLNYGGSSSQDFIHRPSSPPWN

SEQ ID NO: 1290 - protein, 580 aa, Arabidopsis thaliana
MMHTISSHSHENRMNPNAVAACMAPLLLRPLLAGECDLEDDFDGGEDNSAQLLAAANAANNAQAIITVLLEDYGSIFDEENIQRCSISTESHIGNSGPDDSSDDDNNMKNGYHNADNEVEPVTDDDNDRALSGKMSESSGCTGSDLYEYKGFVADDSDIESPRDTNGPRCNSNIRTDHLMRNPFVNSTDQQAGEQIGDDPTKYGVNSCLAHVSESYQQSGTGLNVPTHGNTLAAPGLESPSAKSVNKGTPSSVHAKRATFWGRGSARKISTDGSFDSSGEDELAIQRLETTKNELRQRIAKEARGNAILQASLERRKQALHERRLSLEQDVSRLQEQLQAERDLRAALEVGLSMSSGQFSSHGVDSKTRAELEEIALAEADVARLKQKVAELHHQLNQQRQTHFGSFSDARDTHQYLQNHNPQKRFLQQDFDSTLAYVNHERKQRHEENVLGAEWRNSKGAGSFGVGNSRQPSRKQIPESTNTTDSKISEESGKISVDKLSSIDSPSIPSTSRVLDITEYPRLNHPSAAASAALVELTTRLDFFKERRSQLMEQLQNLDLNYGGSSSQDFIHRPSSPPWN

SEQ ID NO: 1291 - DNA, 546 bp, Arabidopsis thaliana
ctccatttttttttgctcatcttcttcaacaatggcggaaccaaagacaaaagttgcagaaatcagggaatggatcatcgaacataagcttcgtaccgttggttgcttatggctaagtggtatctctggttcaattgcttataattggtctaaacctgccatgaaaaccagtgtcagaatcatccacgctaggttgcatgctcaggcgctgacattagccgctctggctggagcagctgcagtggagtactatgatcacaaatctggagccactgatcgaatcccgaaatttctgaagcctgataacttaaataaggactagaaatctccgtaccatggctctgcctattctgttatttgtaggcatcttcgtatccaatgaagacttcatgttttgtaagttcttttggtatttgaaatggctgatacctattctgttatcttaggcatattatagccttgcagattatctgcaacattcgggatgcgaaattgtaagagagattcgtacagaaactaaatgaataaattatatgtattcgatct

SEQ ID NO: 1292 - protein, 106 aa, Arabidopsis thaliana
SIFFCSSSSTMAEPKTKVAEIREWIIEHKLRTVGCLWLSGISGSIAYNWSKPAMKTSVRIIHARLHAQALTLAALAGAAAVEYYDHKSGATDRIPKFLKPDNLNKD

SEQ ID NO: 1293 - protein, 96 aa, Arabidopsis thaliana
MAEPKTKVAEIREWIIEHKLRTVGCLWLSGISGSIAYNWSKPAMKTSVRIIHARLHAQALTLAALAGAAAVEYYDHKSGATDRIPKFLKPDNLNKD

SEQ ID NO: 1294 - protein, 53 aa, Arabidopsis thaliana
MKTSVRIIHARLHAQALTLAALAGAAAVEYYDHKSGATDRIPKFLKPDNLNKD

SEQ ID NO: 1295 - DNA, 1179 bp, Arabidopsis thaliana
atggatcagaaaagtgattcatttctctctgtttcatcgatttcattttcatattcttcttcaacagacaaagactttgatctgatatgcatgattagtcccatcgtacttctctacatcactctcctctccatcatcttctttgtagctgctttgattcaccttctggtcaaattcttacatagaccccaaactcgacttgacgacgcctatgatggcattacagagagttctactgctctgcaaggtcggtatcaaacacggtttaatctccatgacgcagaaattgaccaatcattcattgatgcattgcccttgttacattacaagaccatgattggtcttcgacacgacctctctgattgcgccgtttgtctcagagagttcacagccgaagacgagctccggctcttaccaaaatgcagccatgcattccatgtggagtgcatcgacacgtggctcctcacaaactcaacatgtcctctctgcagggacaacctcctcctccttggcctcactggcactgcttcgtcttccactattgtccttgtgcatgaatctgatggtgacaattcccaagactccgattcgtcgttcatgttaaccgatcttgatgatcttggagtgcaagaagtgatgaagatggtgaagtgtaagaaggttaggcaccgcggtcgcaaaggacaaaaggagaaacccaagtttcgagaaacttgtatgcaaagaaacctcgggatccttcgcaggattgtaccaggctgtgaagagatcgaagacgaggaagccttgtttctcaagtcaattcagcatctcttgcttctcaaatctcaggttaatttacttaaaaagctagctgatgtatgtggagtctaattaaaagaacgtaagttctcaagttgtttatgcattacattataagatcaagcgagagagacataagaaaacagaggaggggataaagtaaaattacacagagaaaaacgatgaacaaggcgatgaatttttttagtttttgttgtagaaagtgagagcgtaatttgtacttaaggaggaagaagagagagtgagcatgtgttggatcgttgtgacccatgtcttgtaacgattgtaatcgtcggccatgtctaacttgatagctcctctgttcgtcctcaggacaatgagataacaagtgtcctc

SEQ ID NO: 1296 - protein, 290 aa, Arabidopsis thaliana
MDQKSDSFLSVSSISFSYSSSTDKDFDLICMISPIVLLYITLLSIIFFVAALIHLLVKFLHRPQTRLDDAYDGITESSTALQGRYQTRFNLHDAEIDQSFIDALPLLHYKTMIGLRHDLSDCAVCLREFTAEDELRLLPKCSHAFHVECIDTWLLTNSTCPLCRDNLLLLGLTGTASSSTIVLVHESDGDNSQDSDSSFMLTDLDDLGVQEVMKMVKCKKVRHRGRKGQKEKPKFRETCMQRNLGILRRIVPGCEEIEDEEALFLKSIQHLLLLKSQVNLLKKLADVCGV

SEQ ID NO: 1297 - protein, 260 aa, Arabidopsis thaliana
MISPIVLLYITLLSIIFFVAALIHLLVKFLHRPQTRLDDAYDGITESSTALQGRYQTRFNLHDAEIDQSFIDALPLLHYKTMIGLRHDLSDCAVCLREFTAEDELRLLPKCSHAFHVECIDTWLLTNSTCPLCRDNLLLLGLTGTASSSTIVLVHESDGDNSQDSDSSFMLTDLDDLGVQEVMKMVKCKKVRHRGRKGQKEKPKFRETCMQRNLGILRRIVPGCEEIEDEEALFLKSIQHLLLLKSQVNLLKKLADVCGV

SEQ ID NO: 1298 - protein, 179 aa, Arabidopsis thaliana
MIGLRHDLSDCAVCLREFTAEDELRLLPKCSHAFHVECIDTWLLTNSTCPLCRDNLLLLGLTGTASSSTIVLVHESDGDNSQDSDSSFMLTDLDDLGVQEVMKMVKCKKVRHRGRKGQKEKPKFRETCMQRNLGILRRIVPGCEEIEDEEALFLKSIQHLLLLKSQVNLLKKLADVCGV

SEQ ID NO: 1299 - DNA, 948 bp, Arabidopsis thaliana
atagccagatagagagatcctggagaaagcttaaacctaacaatttctctcagagtgttatcatcaaaagattcttggtctccgatccagtcacctgaagattctccgagcttcttttgaccacacactttcaatggcggatgctgtgaacgctcaaactccatcgctctccgagcaatatcatttggagaaagaagtgaagcaagacacaagtgcaaagcctgttgaagtgaaagaggtggcaccagaagttactacacaagctgaagaggttaagacggagcaagctaaggaagaatctcctgttgaggaagcggtttctgtagttgaagagaagtctgaatctgctcctgaatcaacggaagtggcttctgaggctcctgctgcagcggaagacaatgctgaagagactcctgctgctgctgaagaaaataatgacgaaaacgctagtgaagaagttgctgaagaaacccctgatgagatcaagcttgagacagctcctgctgatttccgtttccctacaacaaaccaaacaaggcattgtttcactcgctacgttgaatatcacagatgtgtagctgctaagggtgatgatgctccagaatgcgataagtttgcaaagttttatcgatctctttgccccagcgaatgggttgataggtggaacgagcaaagagaaaatggaacattccctggtcctctaccctgaagaaaaatcatattgccatcattcctcttttgctgttaccttcatgagattacactgcagagtttaataagattttacaaaaccagcacttctggttcccatcatcataaaatgtgagaatttaacaaaactttatgaatctcaaatttttctcttatataagtttttgaggatcatctgatttttctgaattgttgttcttcctgattatgctttactatggcaagcttcaaattctt

SEQ ID NO: 1300 - protein, 191 aa, Arabidopsis thaliana
MADAVNAQTPSLSEQYHLEKEVKQDTSAKPVEVKEVAPEVTTQAEEVKTEQAKEESPVEEAVSVVEEKSESAPESTEVASEAPAAAEDNAEETPAAAEENNDENASEEVAEETPDEIKLETAPADFRFPTTNQTRHCFTRYVEYHRCVAAKGDDAPECDKFAKFYRSLCPSEWVDRWNEQRENGTFPGPLP

SEQ ID NO: 1301 - DNA, 509 bp, Arabidopsis thaliana
gataagttttcgtcgtaactctaacccattcgaattgatttaggcgttagggtttcttcatatttctctctcggaagaagaagatggtttgcgataagtgtgagaagaagttatcgaaagtgatagttcctgataagtggaaggatggtgctcgtaatgtaactgaaggtggtggtcgtaaaatcaatgagaataagcttctctccaagaagaatagatggtcaccttacagtacctgtaccacaaaatgtatgatctgcaagcagcaagtgcatcaagatggtaaatactgtcacacatgtgcctatagcaaaggagtgtgcgcaatgtgcgggaagcaagtgttggacaccaagatgtacaagcaaagcaatgtataaacaaatccgcaagcgtttcacattttagtttttgtccctttgatgtcaacgttgtatcctctcactcatgtatttttttgtatcggtttcctccggttttaatataaccaaacagaatcttgttgcttc

SEQ ID NO: 1302 - protein, 98 aa, Arabidopsis thaliana
MVCDKCEKKLSKVIVPDKWKDGARNVTEGGGRKINENKLLSKKNRWSPYSTCTTKCMICKQQVHQDGKYCHTCAYSKGVCAMCGKQVLDTKMYKQSNV

SEQ ID NO: 1303 - DNA, 1349 bp, Arabidopsis thaliana
ttgtatgacataatgacgacgagacgaaggacaaaattgtcatttaaggaataaaagatattcttacaaagatattttttgctcgaaacgaggagaaaaaatcattagttatcgaaaatgctcacatgatgtgggcctaaccactaacccaattaaccacacatcttaatcagagtaagttgaaacaaatctttcagcaaaccctagaaaacatgtttaaccctagttattacgtcacacctgttctataaattaaggctgcgtcttatcacctcaaatcacataagtctctctcttacattttgaaaccctaatttctcaaaaaaaatgtctgaagttgagtaccggtgctttgtcggcggccttgcctgggccaccaatgatgaagatcttcaaaggacgttctcacagttcggcgacgttatcgattctaaggtctgttacacgagagatcggtctcccggatcgagccgattccgatgattctgatcctcgacggatctgattccgatctgtttctctgttacttgattcgattactgttactatgttctctctcgttctttgttactgttacttaatttgtcccatcggtacgttcatcttcctgcttctatgagctcggagatcgatcgatttttgctttattttcatcgctttgttttatattccttccacgattgtttttgctgatgtgtatgattttgtttgtttacagatcattaacgaccgcgagagtggaagatcaaggggattcggattcgtcaccttcaaggacgagaaagccatgagggatgcgattgaagagatgaacggtaaagagctcgatggacgtgtcatcaccgtgaacgaggctcagtcgagaggtagcggcggtggcggaggaggccgtggtggaagcggtggtggttaccgcagcggaggcggtggtggatactcaggaggcggtggcggcggatactcaggaggaggcggtggtggttacgagagacgtagcggaggttacggatctggtggaggcggtggtggccgaggatacggtggtggtggacgccgtgagggaggtggctacggaggcggtgatggtggaagttacggaggcggtggtggcggctggtaatcaaagatagagttgtttgcgtgctgctgctctgtttttggtttagatttggttttgtgtcaccacttctggtttggttatcgttcgtttggtttacttttttgatgaaacagtttcgtttaagtcttctttgtctggaacgaaatgttaattcgcgtgttgtttactaaatttataacgtttccttttaaccagattcgagattttccctcaaataatttatcttgtt

SEQ ID NO: 1304 - protein, 110 aa, Arabidopsis thaliana
MRDAIEEMNGKELDGRVITVNEAQSRGSGGGGGGRGGSGGGYRSGGGGGYSGGGGGGYSGGGGGGYERRSGGYGSGGGGGGRGYGGGGRREGGGYGGGDGGSYGGGGGGW

SEQ ID NO: 1305 - protein, 103 aa, Arabidopsis thaliana
MNGKELDGRVITVNEAQSRGSGGGGGGRGGSGGGYRSGGGGGYSGGGGGGYSGGGGGGYERRSGGYGSGGGGGGRGYGGGGRREGGGYGGGDGGSYGGGGGGW

SEQ ID NO: 1306 - DNA, 772 bp, Arabidopsis thaliana
gccaaattctctaataaataagtaaagattcatcgccaagtatcatcagcaaacctaaagctaaaagtgcctctgcatcaatggcgatttccaagctccatctagtactctttcttctctcagtctttatcttccttcatcgtcctgttctttccaacaccgatggagaaaaccttctatttacagtattcaaccaatacagagaatcagtaaacctcacaaacctaaaaaagaacaaaaacgcagaatgtctagcagacgaagtcgtagaccaattacagaaccaaccctgcacaaacaccactggctcagcttcagtccctggaacagatcctggaatcccaaatttccctaacctcctcgctaaatgccgcctcaacacaaacgtaaccagagacggtttgatattgcaagtttgtgctcctaagcatcattcgacccctgacttgagcagtttcgccaatgtcttaacaaagaacctgaatgattctaagttcactggagctggagttggtattgattctgatggtatttggcttgttaccgtcctcactacaaacacaccagggggtagctattctaactcaggagcttttgcattcggagttaatggccttgtttcttcaagtttgatgtttcttctcttttgtttcttcatgttttgagtcacaactcgttgtctttgttttcttaatatgacgtgattatggtgaaatttttaataaattcgtgtggcaatcaattaaagagagaataacaatatattaattgg

SEQ ID NO: 1307 - protein, 194 aa, Arabidopsis thaliana
MAISKLHLVLFLLSVFIFLHRPVLSNTDGENLLFTVFNQYRESVNLTNLKKNKNAECLADEVVDQLQNQPCTNTTGSASVPGTDPGIPNFPNLLAKCRLNTNVTRDGLILQVCAPKHHSTPDLSSFANVLTKNLNDSKFTGAGVGIDSDGIWLVTVLTTNTPGGSYSNSGAFAFGVNGLVSSSLMFLLFCFFMF

SEQ ID NO: 1308 - DNA, 920 bp, Arabidopsis thaliana
catttcacacaacatacgaaaaactggtaaatcacaaaagaaaaaacagaaagaagaaacacacgaaaatggagaaaacagaggaaagcgtcggaatcagagtttacacggcgactccgccgcaaaaaccatcaccatcaccaccttctcgttcaccaaaacccgtcctaatctcttcactgccttccctcccgtcaggagccgccgctggaggaggaagaggtagaaaacgtcgcatggtggcgcaaggagttcaaaaaacggtttcgaagacatcaatgctcgtcaacttccttccgacaggaacactcttgatgttcgaaatggttcttccatcaatataccgtgacggagactgtaacggaatcaacacactcatgattcatctcctcttgcttctttgcgcaatgtcttgtttcttcttccattttaccgacagtttcaaagcatccgatgggaagatctactacggtttcgtgacgccacgtggactcgcggtgttcatgaaaccgccgcctccagagtttggtggcggagatgttatagcggaggcagagattccggtgactgatgataggtataagttgacggttaatgactttgttcatgcagtgatgagcgttttggtgtttatggcgattgcgttttcggatcgaagagtcacgggatgtttgtttccagggaaagagaaagagatggatcaagttatggagagttttccaataatggttggaattgtttgtagtgctttgtttcttgtttttccgaccactcgatatggtgttggttgcatgactggttaatttattttcacttttctgttttttggtttgttttagtatctatttcgtattttccttgtaatttagattatctgatttaaactccaatgttctactatttttatctattgtattgtt

SEQ ID NO: 1309 - protein, 266 aa, Arabidopsis thaliana
FHTTYEKLVNHKRKNRKKKHTKMEKTEESVGIRVYTATPPQKPSPSPPSRSPKPVLISSLPSLPSGAAAGGGRGRKRRMVAQGVQKTVSKTSMLVNFLPTGTLLMFEMVLPSIYRDGDCNGINTLMIHLLLLLCAMSCFFFHFTDSFKASDGKIYYGFVTPRGLAVFMKPPPPEFGGGDVIAEAEIPVTDDRYKLTVNDFVHAVMSVLVFMAIAFSDRRVTGCLFPGKEKEMDQVMESFPIMVGIVCSALFLVFPTTRYGVGCMTG

SEQ ID NO: 1310 - protein, 244 aa, Arabidopsis thaliana
MEKTEESVGIRVYTATPPQKPSPSPPSRSPKPVLISSLPSLPSGAAAGGGRGRKRRMVAQGVQKTVSKTSMLVNFLPTGTLLMFEMVLPSIYRDGDCNGINTLMIHLLLLLCAMSCFFFHFTDSFKASDGKIYYGFVTPRGLAVFMKPPPPEFGGGDVIAEAEIPVTDDRYKLTVNDFVHAVMSVLVFMAIAFSDRRVTGCLFPGKEKEMDQVMESFPIMVGIVCSALFLVFPTTRYGVGCMTG

SEQ ID NO: 1311 - protein, 188 aa, Arabidopsis thaliana
MVAQGVQKTVSKTSMLVNFLPTGTLLMFEMVLPSIYRDGDCNGINTLMIHLLLLLCAMSCFFFHFTDSFKASDGKIYYGFVTPRGLAVFMKPPPPEFGGGDVIAEAEIPVTDDRYKLTVNDFVHAVMSVLVFMAIAFSDRRVTGCLFPGKEKEMDQVMESFPIMVGIVCSALFLVFPTTRYGVGCMTG

SEQ ID NO: 1312 - DNA, 534 bp, Arabidopsis thaliana
gtcagtcgaggaagacgccaccgttagagagccactcgatctgattcggttgagtatcgaagagaggatctatgtcaagctccgatctgaccgtgaactccgcggcaagcttcacgcttttgatcagcatttgaatatgattctgggtgatgttgaagaggttattacgactatagaaatcgacgacgagacatatgaagagattgttcggacaacgaagcgaactgtaccgtttctattcgtgagaggagatggagtgatattggtgtcgccgcctttgaggacggcctaaatgttcttgtgtactgggatctgagttaacaaatctggcgctgagtaaaagcacttttttctgattacttggcttttgaatttgtaattgtgtggtatgtttttctttgttgtcaaacattgaaaccgaatgtagcattcgaatcttggtaatgggtgcctcgttatagtagaatcagtgtaacatacgtcgtattgtgactttcttaccgtttacgatcggatttagtttcgttttctggt

SEQ ID NO: 1313 - protein, 96 aa, Arabidopsis thaliana
SVEEDATVREPLDLIRLSIEERIYVKLRSDRELRGKLHAFDQHLNMILGDVEEVITTIEIDDETYEEIVRTTKRTVPFLFVRGDGVILVSPPLRTA

SEQ ID NO: 1314 - protein, 51 aa, Arabidopsis thaliana
MILGDVEEVITTIEIDDETYEEIVRTTKRTVPFLFVRGDGVILVSPPLRTA

SEQ ID NO: 1315 - DNA, 996 bp, Arabidopsis thaliana
aaccatcgcatggagttgctctcttcttcaccggctcagcttctgagaccaaatctcagctctagggctttgcttcctccacgaacatcaatcgcttcttctcatcctcctcctcctcgattcctggtaatgaattctcaatctcagcatcgtccatctatctcctgcgcttcgcctcctcccggagataacggttttccggcgattaccacggcttcacccatcgaatcagctcgaataggtgaagtgaagagagaaacaaaggaaacaaatgtatcagtgaagattaatttggatggtcatggagtttcagatagctccactggaatccctttccttgatcatatgttagatcaacttgcttcacatggcttgttcgatgtacacgtaagagctactggtgatactcacattgatgatcatcatactaatgaagatgttgctcttgccattggaactgctttgttaaaggcacttggggaacggaaagggattaaccgttttggcgattttacagctcctcttgatgaagcactcatacatgtttccctggatctatctggtagaccatatctcggatacaacttagagattccaactcagagagtaggaacaaatgacactcagttggtggaacacttcttccagtcattggtgaatacttctggtatgactcttcacatccgacagcttgctggtaaaaactcgcatcatataatagaagcgacctttaaggcctttgcaagagctctccgacaagcaacagagtctgatccacgtcgcggtgggacgataccaagctcgaaaggagtcttgtcacggtcataagtggcggtgaaaaaaaaaagtttcagtctattaggacttgattgatgaggatggatcagttgtcttaatgtcttatgtacaatgtcaaacctgctagatctttgttcatttgcaaaggtcgatgtatctaagatcagtttacgagtgtgcaccattttgcgagtgttc

SEQ ID NO: 1316 - protein, 275 aa, Arabidopsis thaliana
NHRMELLSSSPAQLLRPNLSSRALLPPRTSIASSHPPPPRFLVMNSQSQHRPSISCASPPPGDNGFPAITTASPIESARIGEVKRETKETNVSVKINLDGHGVSDSSTGIPFLDHMLDQLASHGLFDVHVRATGDTHIDDHHTNEDVALAIGTALLKALGERKGINRFGDFTAPLDEALIHVSLDLSGRPYLGYNLEIPTQRVGTNDTQLVEHFFQSLVNTSGMTLHIRQLAGKNSHHIIEATFKAFARALRQATESDPRRGGTIPSSKGVLSRS

SEQ ID NO: 1317 - protein, 272 aa, Arabidopsis thaliana
MELLSSSPAQLLRPNLSSRALLPPRTSIASSHPPPPRFLVMNSQSQHRPSISCASPPPGDNGFPAITTASPIESARIGEVKRETKETNVSVKINLDGHGVSDSSTGIPFLDHMLDQLASHGLFDVHVRATGDTHIDDHHTNEDVALAIGTALLKALGERKGINRFGDFTAPLDEALIHVSLDLSGRPYLGYNLEIPTQRVGTNDTQLVEHFFQSLVNTSGMTLHIRQLAGKNSHHIIEATFKAFARALRQATESDPRRGGTIPSSKGVLSRS

SEQ ID NO: 1318 - protein, 232 aa, Arabidopsis thaliana
MNSQSQHRPSISCASPPPGDNGFPAITTASPIESARIGEVKRETKETNVSVKINLDGHGVSDSSTGIPFLDHMLDQLASHGLFDVHVRATGDTHIDDHHTNEDVALAIGTALLKALGERKGINRFGDFTAPLDEALIHVSLDLSGRPYLGYNLEIPTQRVGTNDTQLVEHFFQSLVNTSGMTLHIRQLAGKNSHHIIEATFKAFARALRQATESDPRRGGTIPSSKGVLSRS

SEQ ID NO: 1319 - DNA, 2428 bp, Arabidopsis thaliana
agagaaagcaaaaccgcgagctctcatggcttccggcggcatagattccgatcgtaccttagggtacatgacacggaaagatacagaagtcaagcttccaagacctactcgtgtcaagaacaaaactccggcgccgattcaaataactgccgaacagatattaagagaagctcgagagagacaagaagctgagatccgtcctcccaagcaaaaaatcactgattccactgagctttccgactacagactccgccggagaaaggaatttgaagaccagatccgtcgcgcgagatggaacattcaagtttgggtcaaatacgctcaatgggaagagtcacagaaagattacgctcgtgctcgaagtgtttgggaacgagccatagaaggagattataggaaccatacgctttggctcaaatacgcagagttcgagatgaagaacaagtttgtgaacagtgcgagaaacgtttgggatcgagctgttacgcttcttcctcgtgtagaccagctttggtacaagtatattcatatggaggagatacttgggaatatcgccggagctaggcagatttttgaacggtggatggattggtcaccggatcaacaaggttggctctcgtttattaagttcgaacttaggtataatgaaattgaacgtgctagaacgatatacgagagatttgttctttgtcatcccaaggtttcggcttatattagatatgctaagtttgagatgaagggtggtgaagttgctcgttgtaggagtgtgtatgaacgtgctacagagaagcttgctgatgatgaagaagctgagatcctctttgtggcgtttgctgagtttgaagaacgttgtaaggaagtggaaagggctaggtttatctataagtttgctcttgatcatattcctaaaggaagagctgaggatttgtataggaagtttgttgcttttgagaaacagtatggtgataaggaagggattgaggatgccattgttgggaagaggaggtttcagtatgaagatgaagtgaggaagagtccttccaactatgattcgtggttcgattatgttaggttagaagagagtgtggggaacaaagataggatcagagaaatctatgagagggctattgctaatgttccacctgctgaggagaaacgatactggcaaagatatatctatctctggattaattatgcattatttgaagagattgaaactgaagatattgagcgtacccgagatgtttacagagagtgccttaagcttatcccccacagcaaattttcttttgccaaaatatggttgctcgctgctcagtttgagataaggcaattgaatctcacgggtgctcgccagatattaggaaatgcgattggaaaagctcccaaagataagatattcaagaaatacattgagatcgagcttcagttgggaaacatggataggtgtagaaagttatatgaacggtatcttgagtggtctcctgagaattgctatgcttggagcaagtatgctgaactagagaggtctcttgttgaaacagaacgagctagagctatttttgaacttgcaatatcccagccagctcttgacatgcctgagctgctttggaaggcatacattgattttgagatatcagaaggggaattagagaggacaagggctttatatgagcgactcttggaccgtactaagcattacaaggtgtgggttagctttgcaaagtttgaagcttctgctgcggaactagaggaagacgagaatgaagatgaagaccaggaagaagatgttattgaacacaagaaagattgcatcaaacgtgccagagcaattttcgatagagccaacacatattacaaagactccacaccagagctgaaggaagaacgagctacgctcttggaggattggctgaacatggagagtagctttggtaacctcggggatgttagtattgttcaatcgaagcttccaaagaagctcaagaaaagaaaggcgatcactagagaagacgggtcaacagagtacgaagaatacatcgattatttatacccagaagaatcgcaaacaacgaatctcaagattcttgaagctgcatacaaatggaagaagcagaaggttgctgcttctgaggatgattgagattaagcttttttcttaagttatatcaaaagtcaaaactgtgaaatgtgttttgtattcttccttagctctttgtacacatcgtttggtttagcagtaatttttgttatccaagaacctaacaaaactcaaatttgtcctgttatgttttgttttggttcgaattttccggtttagaaattaatcaggatacttcttcattccggtttatgttctgatctctcggtttgtgatacgtttgaaacggaatctagtttaatctatatatatacattttagtttaac

SEQ ID NO: 1320 - protein, 713 aa, Arabidopsis thaliana
EKAKPRALMASGGIDSDRTLGYMTRKDTEVKLPRPTRVKNKTPAPIQITAEQILREARERQEAEIRPPKQKITDSTELSDYRLRRRKEFEDQIRRARWNIQVWVKYAQWEESQKDYARARSVWERAIEGDYRNHTLWLKYAEFEMKNKFVNSARNVWDRAVTLLPRVDQLWYKYIHMEEILGNIAGARQIFERWMDWSPDQQGWLSFIKFELRYNEIERARTIYERFVLCHPKVSAYIRYAKFEMKGGEVARCRSVYERATEKLADDEEAEILFVAFAEFEERCKEVERARFIYKFALDHIPKGRAEDLYRKFVAFEKQYGDKEGIEDAIVGKRRFQYEDEVRKSPSNYDSWFDYVRLEESVGNKDRIREIYERAIANVPPAEEKRYWQRYIYLWINYALFEEIETEDIERTRDVYRECLKLIPHSKFSFAKIWLLAAQFEIRQLNLTGARQILGNAIGKAPKDKIFKKYIEIELQLGNMDRCRKLYERYLEWSPENCYAWSKYAELERSLVETERARAIFELAISQPALDMPELLWKAYIDFEISEGELERTRALYERLLDRTKHYKVWVSFAKFEASAAELEEDENEDEDQEEDVIEHKKDCIKRARAIFDRANTYYKDSTPELKEERATLLEDWLNMESSFGNLGDVSIVQSKLPKKLKKRKAITREDGSTEYEEYIDYLYPEESQTTNLKILEAAYKWKKQKVAASEDD

SEQ ID NO: 1321 - protein, 705 aa, Arabidopsis thaliana
MASGGIDSDRTLGYMTRKDTEVKLPRPTRVKNKTPAPIQITAEQILREARERQEAEIRPPKQKITDSTELSDYRLRRRKEFEDQIRRARWNIQVWVKYAQWEESQKDYARARSVWERAIEGDYRNHTLWLKYAEFEMKNKFVNSARNVWDRAVTLLPRVDQLWYKYIHMEEILGNIAGARQIFERWMDWSPDQQGWLSFIKFELRYNEIERARTIYERFVLCHPKVSAYIRYAKFEMKGGEVARCRSVYERATEKLADDEEAEILFVAFAEFEERCKEVERARFIYKFALDHIPKGRAEDLYRKFVAFEKQYGDKEGIEDAIVGKRRFQYEDEVRKSPSNYDSWFDYVRLEESVGNKDRIREIYERAIANVPPAEEKRYWQRYIYLWINYALFEEIETEDIERTRDVYRECLKLIPHSKFSFAKIWLLAAQFEIRQLNLTGARQILGNAIGKAPKDKIFKKYIEIELQLGNMDRCRKLYERYLEWSPENCYAWSKYAELERSLVETERARAIFELAISQPALDMPELLWKAYIDFEISEGELERTRALYERLLDRTKHYKVWVSFAKFEASAAELEEDENEDEDQEEDVIEHKKDCIKRARAIFDRANTYYKDSTPELKEERATLLEDWLNMESSFGNLGDVSIVQSKLPKKLKKRKAITREDGSTEYEEYIDYLYPEESQTTNLKILEAAYKWKKQKVAASEDD

SEQ ID NO: 1322 - protein, 691 aa, Arabidopsis thaliana
MTRKDTEVKLPRPTRVKNKTPAPIQITAEQILREARERQEAEIRPPKQKITDSTELSDYRLRRRKEFEDQIRRARWNIQVWVKYAQWEESQKDYARARSVWERAIEGDYRNHTLWLKYAEFEMKNKFVNSARNVWDRAVTLLPRVDQLWYKYIHMEEILGNIAGARQIFERWMDWSPDQQGWLSFIKFELRYNEIERARTIYERFVLCHPKVSAYIRYAKFEMKGGEVARCRSVYERATEKLADDEEAEILFVAFAEFEERCKEVERARFIYKFALDHIPKGRAEDLYRKFVAFEKQYGDKEGIEDAIVGKRRFQYEDEVRKSPSNYDSWFDYVRLEESVGNKDRIREIYERAIANVPPAEEKRYWQRYIYLWINYALFEEIETEDIERTRDVYRECLKLIPHSKFSFAKIWLLAAQFEIRQLNLTGARQILGNAIGKAPKDKIFKKYIEIELQLGNMDRCRKLYERYLEWSPENCYAWSKYAELERSLVETERARAIFELAISQPALDMPELLWKAYIDFEISEGELERTRALYERLLDRTKHYKVWVSFAKFEASAAELEEDENEDEDQEEDVIEHKKDCIKRARAIFDRANTYYKDSTPELKEERATLLEDWLNMESSFGNLGDVSIVQSKLPKKLKKRKAITREDGSTEYEEYIDYLYPEESQTTNLKILEAAYKWKKQKVAASEDD

SEQ ID NO: 1323 - DNA, 896 bp, Arabidopsis thaliana
aatcgtttagtattttttgtaaatcgcctctccaccttgcccctggagaaccatcaccaaaaaacagagccaaacaaacaaaaaaaaaatctaaaagcatcaatggcttctcggcggcgagtgcttctgaaggttataattctcggagacagtggggttgggaagacatccttgatgaatcagtttgtgaatcgaaaattcagtaatcagtataaagctaccattggagctgatttcttgaccaaagaggtccaaattgatgacagaatcttcactttgcagatttgggatactgcagggcaagagaggttccaaagtttgggtgttgctttctaccgaggagcggactgttgtgttcttgtgaatgatgtcaatgttatgaaatcctttgaaaatcttaacaactggagggaagagttcctgatccaggctagtccttcagatcctgaaaacttccccttcgttgtcttggggaacaagacagatgttgacggtggaaagagtcgagtggttactgagaagaaagcaaaatcttggtgtgcatccaagggaaacattccttacttcgagacttcggccaaagatggagtcaatgttgatgcagctttcgaatgcatagccaaaaatgctctcaagaatgaacctgaagaagaagtgtaccttccggacaccattgatgtagctggggctcggcaacaaagatcaactgggtgtgaatgctaaccaactttgttgcatggtttattagaaagaacatgtgttttaaggagagacctttttagttctttggcattattgtgatgtgtatcaattagcatacgcacctttgttttggattacagaatcaaaaacgaattttggtcacctgttcattcttaatctcttcagcttgtcgc

SEQ ID NO: 1324 - protein, 240 aa, Arabidopsis thaliana
NRLVFFVNRLSTLPLENHHQKTEPNKQKKNLKASMASRRRVLLKVIILGDSGVGKTSLMNQFVNRKFSNQYKATIGADFLTKEVQIDDRIFTLQIWDTAGQERFQSLGVAFYRGADCCVLVNDVNVMKSFENLNNWREEFLIQASPSDPENFPFVVLGNKTDVDGGKSRVVTEKKAKSWCASKGNIPYFETSAKDGVNVDAAFECIAKNALKNEPEEEVYLPDTIDVAGARQQRSTGCEC

SEQ ID NO: 1325 - protein, 206 aa, Arabidopsis thaliana
MASRRRVLLKVIILGDSGVGKTSLMNQFVNRKFSNQYKATIGADFLTKEVQIDDRIFTLQIWDTAGQERFQSLGVAFYRGADCCVLVNDVNVMKSFENLNNWREEFLIQASPSDPENFPFVVLGNKTDVDGGKSRVVTEKKAKSWCASKGNIPYFETSAKDGVNVDAAFECIAKNALKNEPEEEVYLPDTIDVAGARQQRSTGCEC

SEQ ID NO: 1326 - protein, 182 aa, Arabidopsis thaliana
MNQFVNRKFSNQYKATIGADFLTKEVQIDDRIFTLQIWDTAGQERFQSLGVAFYRGADCCVLVNDVNVMKSFENLNNWREEFLIQASPSDPENFPFVVLGNKTDVDGGKSRVVTEKKAKSWCASKGNIPYFETSAKDGVNVDAAFECIAKNALKNEPEEEVYLPDTIDVAGARQQRSTGCEC

SEQ ID NO: 1327 - DNA, 1413 bp, Arabidopsis thaliana
attttcctattcttgaaaacacacaacacatctcatttctccgctgtttcgtcggcaaattttcccatttttgattccgaagataatagatattatcaacagaggataaggataaaacccagaacaatcattataatttagtggtgaagttgaccaaatttataaactgatccaattttaaaatctaagagatatggagaacatggacgatttctcaccggagaatgttttagcaccaccaccaccacctcctccaatgaagaagtcaacggatctgtttatgcaaagaagcaatagctttgtttctaaagctacgagagattcatgggatcgtatgttcgacgaagctcatggagctgatgttttgattcatactgatgataatggtttgatttacgcacattctaatgtcatcggaatggcttcagatgtaatcagaggaatgatgaagcaacataagagaaaatctcatcgtaaatcgatttcaatcctcggtgttcctcaccacgctcttcgagttttcattcgattcttatactcttcttgctatgagaaacaagatatggaggattttgcaatacatctacttgtgttatcacatgtctacgttgtaccgcatttgaagcgagtctgcgaatcagaattcgaaagtagtttgctcaacaaagagaatgtgattgatgtgtttcagctagctcttctatgtgatgctcctcgtctcggtcttctctgtcatagaatgattctaaacaactttgaagaagtttctacttctgaaggatggcaaacaatgaaagagagccatcctagacttcaaaaagagcttttacgctctgtcgcttacgagcttaatagcttgaagcaaagaaacaggaaacagaaggagatacagacttatacacagctctatgaagcaatggaggcttttgttcatatatgtagagatggatgcagagaaataggtccaacaaagaccgaaaccccgcatatgtcatgcggatttcaagcgtgtaatggtttagagcagctattgaaacatttggcgggatgcaaactaagatcaatccctggtggttgtagccgttgcaagagaatgtggcagcttcttgagcttcattcgcgcatttgcgtagactcggaacaatgcaaagtccctctttgcagtagtttgaaagagaggatgaagacacagagcaggaaagatgagaaaagatggaaacttttggtgaggaatgttttgagcaccaagagaattggaggatctccattctttttgcaagcaattgatgttactttatgagttatgacattattatttgattgcttttagatgtagaaattacatatttatacatgtacataggttgcagattctttgtaaagatagattcaaaattttcaaacctaagatcc

SEQ ID NO: 1328 - protein, 368 aa, Arabidopsis thaliana
MENMDDFSPENVLAPPPPPPPMKKSTDLFMQRSNSFVSKATRDSWDRMFDEAHGADVLIHTDDNGLIYAHSNVIGMASDVIRGMMKQHKRKSHRKSISILGVPHHALRVFIRFLYSSCYEKQDMEDFAIHLLVLSHVYVVPHLKRVCESEFESSLLNKENVIDVFQLALLCDAPRLGLLCHRMILNNFEEVSTSEGWQTMKESHPRLQKELLRSVAYELNSLKQRNRKQKEIQTYTQLYEAMEAFVHICRDGCREIGPTKTETPHMSCGFQACNGLEQLLKHLAGCKLRSIPGGCSRCKRMWQLLELHSRICVDSEQCKVPLCSSLKERMKTQSRKDEKRWKLLVRNVLSTKRIGGSPFFLQAIDVTL

SEQ ID NO: 1329 - protein, 365 aa, Arabidopsis thaliana
MDDFSPENVLAPPPPPPPMKKSTDLFMQRSNSFVSKATRDSWDRMFDEAHGADVLIHTDDNGLIYAHSNVIGMASDVIRGMMKQHKRKSHRKSISILGVPHHALRVFIRFLYSSCYEKQDMEDFAIHLLVLSHVYVVPHLKRVCESEFESSLLNKENVIDVFQLALLCDAPRLGLLCHRMILNNFEEVSTSEGWQTMKESHPRLQKELLRSVAYELNSLKQRNRKQKEIQTYTQLYEAMEAFVHICRDGCREIGPTKTETPHMSCGFQACNGLEQLLKHLAGCKLRSIPGGCSRCKRMWQLLELHSRICVDSEQCKVPLCSSLKERMKTQSRKDEKRWKLLVRNVLSTKRIGGSPFFLQAIDVTL

SEQ ID NO: 1330 - protein, 347 aa, Arabidopsis thaliana
MKKSTDLFMQRSNSFVSKATRDSWDRMFDEAHGADVLIHTDDNGLIYAHSNVIGMASDVIRGMMKQHKRKSHRKSISILGVPHHALRVFIRFLYSSCYEKQDMEDFAIHLLVLSHVYVVPHLKRVCESEFESSLLNKENVIDVFQLALLCDAPRLGLLCHRMILNNFEEVSTSEGWQTMKESHPRLQKELLRSVAYELNSLKQRNRKQKEIQTYTQLYEAMEAFVHICRDGCREIGPTKTETPHMSCGFQACNGLEQLLKHLAGCKLRSIPGGCSRCKRMWQLLELHSRICVDSEQCKVPLCSSLKERMKTQSRKDEKRWKLLVRNVLSTKRIGGSPFFLQAIDVTL

SEQ ID NO: 1331 - DNA, 1004 bp, Arabidopsis thaliana
attacagccatacagaaatatcacactaactacaaaagatagtgcaaggaatgtgatgtacgagaagaggattaaagatgagtgagcatcattttgtgtttgtgcatggtgcagggcatggaggatggtgttggtacaagctggctaattcactgagggataatggacataaggctacatgtatagacctcaagggtgctggtatcaacccaactgatccaaacactgtctcttctttggatgactacgacgagcctctctatgccttcctctcccaacttcccaacgatcaaaaggtcattcttgtgagccacagcgttggaggagggagcatgacggctgccatgtgcctctttccttccaaagtttccttggcggtttacgtcgcagcagccatggtcaaacctggtaccttgattcctgaaagactcaaaaatgtaatgaagatatgttcaggattgatagaggaggaaactgagaagatatgggactttactttcggaaatggaccacaaaatctcccaacaagcatcatgatgaaacctgagtatgttcgggacaagttttacaacgagagccccatggaggattacacactggcaaccacacttctgcgtccggcccctgtcatggcattcataggcataatggatattccgggagctccagagactgacaaaatcccaagagtgtacgtgaagacaggcaaggaccatttgttcgaaccagttcttcaagaggtaatgttggccctgtggcctcctgctcacaccttccttcttccggacagtgaccactctgcttttttctcccaacctcaagaactctatcaattcctccttcaagcagcctcatctctttctccctgatatttatgtctctctggaactcttttaaatccatcttttggatacttacttagcttgcataaaactgaatcatattcatatatattatgagatacagaaaaaggagcctacaataataattgctatgtaaatgtt

SEQ ID NO: 1332 - protein, 263 aa, Arabidopsis thaliana
MSEHHFVFVHGAGHGGWCWYKLANSLRDNGHKATCIDLKGAGINPTDPNTVSSLDDYDEPLYAFLSQLPNDQKVILVSHSVGGGSMTAAMCLFPSKVSLAVYVAAAMVKPGTLIPERLKNVMKICSGLIEEETEKIWDFTFGNGPQNLPTSIMMKPEYVRDKFYNESPMEDYTLATTLLRPAPVMAFIGIMDIPGAPETDKIPRVYVKTGKDHLFEPVLQEVMLALWPPAHTFLLPDSDHSAFFSQPQELYQFLLQAASSLSP

SEQ ID NO: 1333 - protein, 178 aa, Arabidopsis thaliana
MTAAMCLFPSKVSLAVYVAAAMVKPGTLIPERLKNVMKICSGLIEEETEKIWDFTFGNGPQNLPTSIMMKPEYVRDKFYNESPMEDYTLATTLLRPAPVMAFIGIMDIPGAPETDKIPRVYVKTGKDHLFEPVLQEVMLALWPPAHTFLLPDSDHSAFFSQPQELYQFLLQAASSLSP

SEQ ID NO: 1334 - protein, 174 aa, Arabidopsis thaliana
MCLFPSKVSLAVYVAAAMVKPGTLIPERLKNVMKICSGLIEEETEKIWDFTFGNGPQNLPTSIMMKPEYVRDKFYNESPMEDYTLATTLLRPAPVMAFIGIMDIPGAPETDKIPRVYVKTGKDHLFEPVLQEVMLALWPPAHTFLLPDSDHSAFFSQPQELYQFLLQAASSLSP

SEQ ID NO: 1335 - DNA, 1239 bp, Arabidopsis thaliana
aaattcatcaaagccaatcaaattgagagagatatcaagaaagcaaaataatgaagttggccgtggtctcagtcgttgtcatactcggagttctcgtggcttggccggtatcggctggccgaaaagacttacctggagcgggaggatacggaggcgatgacgatgatgatacaaagtcattgttccctttggacaacctattatcgtttgaattattatgataggatttgtccagattttgagaaaatcgttgttacgaaagtgagggaatggactaagagtgactcttcccttggtcccgccctcctccgccttatcttccacgattgtggcgtcacgggatgtgatgcgtctgttcttctagactacgaagggacagagagaagatctccggctagcaaaacactaagaggcttcgagctaattgacgatatcaagtccgagatggagaaatcatgccccggcaaagtatcctgcgccgacatcctaacatcagccagccgtgccgccaccgtccaacttggtggtccttactggcccaacgtctacggtcgtcgtgactccaaacactcttacgctagagacgtagagaaagtcccttcaggccgtcgtgatgttaccgcccttctcgaaacgtttcagtcatacggtctcaacgtcctcgacctagttgtcctttccggggcccacaccatcggaaaagcgtcctgtggcaccatccagtcgaggctttacaactacaacgcaaccagtggttcagatccttcgattgacgcaaaatacgctgattacttgcaacgcaggtgtcgctgggcctctgagaccgtcgatctcgaccctgtaactccagcagtgttcgataatcagtactacattaatcttcagaagcatatgggagttttgtcgactgatcaggagcttgttaaggacccaaggactgctccgcttgtaaagactttcgcagagcaatcacctcagatattcagacagcagtttgctgtgtccatggctaagctggtcaacgttggagttctcactggtgaagatcgtgtcggagagatcaggaaggtttgcagcaaatctaactccagagcttactaaattataatcatcatccctcatgagaaggatcttttgtttcttgaaataatttcttgtttggtttttgagctcttttctattgcaattttgtaatttgttgtatgaacaagaacaaaaactgtgaattattttcgttgc

SEQ ID NO: 1336 - protein, 314 aa, Arabidopsis thaliana
MTMMIQSHCSLWTTYYRLNYYDRICPDFEKIVVTKVREWTKSDSSLGPALLRLIFHDCGVTGCDASVLLDYEGTERRSPASKTLRGFELIDDIKSEMEKSCPGKVSCADILTSASRAATVQLGGPYWPNVYGRRDSKHSYARDVEKVPSGRRDVTALLETFQSYGLNVLDLVVLSGAHTIGKASCGTIQSRLYNYNATSGSDPSIDAKYADYLQRRCRWASETVDLDPVTPAVFDNQYYINLQKHMGVLSTDQELVKDPRTAPLVKTFAEQSPQIFRQQFAVSMAKLVNVGVLTGEDRVGEIRKVCSKSNSRAY

SEQ ID NO: 1337 - protein, 312 aa, Arabidopsis thaliana
MMIQSHCSLWTTYYRLNYYDRICPDFEKIVVTKVREWTKSDSSLGPALLRLIFHDCGVTGCDASVLLDYEGTERRSPASKTLRGFELIDDIKSEMEKSCPGKVSCADILTSASRAATVQLGGPYWPNVYGRRDSKHSYARDVEKVPSGRRDVTALLETFQSYGLNVLDLVVLSGAHTIGKASCGTIQSRLYNYNATSGSDPSIDAKYADYLQRRCRWASETVDLDPVTPAVFDNQYYINLQKHMGVLSTDQELVKDPRTAPLVKTFAEQSPQIFRQQFAVSMAKLVNVGVLTGEDRVGEIRKVCSKSNSRAY

SEQ ID NO: 1338 - protein, 311 aa, Arabidopsis thaliana
MIQSHCSLWTTYYRLNYYDRICPDFEKIVVTKVREWTKSDSSLGPALLRLIFHDCGVTGCDASVLLDYEGTERRSPASKTLRGFELIDDIKSEMEKSCPGKVSCADILTSASRAATVQLGGPYWPNVYGRRDSKHSYARDVEKVPSGRRDVTALLETFQSYGLNVLDLVVLSGAHTIGKASCGTIQSRLYNYNATSGSDPSIDAKYADYLQRRCRWASETVDLDPVTPAVFDNQYYINLQKHMGVLSTDQELVKDPRTAPLVKTFAEQSPQIFRQQFAVSMAKLVNVGVLTGEDRVGEIRKVCSKSNSRAY

SEQ ID NO: 1339 - DNA, 633 bp, Arabidopsis thaliana
gaatgcgtttccggttctcttctctcgtcggagttctgaggtaaaaaaagaataaggagaagaagaaaagcaaaagcataaaagagagtagcaaagactgagaatggaaagcttggacactaattttcctgtgcgccatagaaaggtctcgtttgaaagtaagggaaacaagacagagattgtgatctgcagctatgaagatcatatccttatcatagcaacacagattggtgccatgggaactatattgcacgcaaggaaggaagaagggatgtctgttgaaccaacatttagtgtttcagtgatattcggaaagcgagacgagccaatgctgacagcaactgctcgaagactcattgaacacataagttctattgttccctcgaagcctctggttctctcacttggtctcaaagatcattcttcggagacgttgaaggaaatagtagcgacagtgattgagaatcgcctttggtaatacatattgttgtccatgttaaaaggagaacgagaagatgttttatgttttagtcttggttgatataattagcatggagttgtggaatcttttcttgtttatactgaaaacattgtttttgagataaaagttaacaacaagtacacatttttttc

SEQ ID NO: 1340 - protein, 124 aa, Arabidopsis thaliana
MESLDTNFPVRHRKVSFESKGNKTEIVICSYEDHILIIATQIGAMGTILHARKEEGMSVEPTFSVSVIFGKRDEPMLTATARRLIEHISSIVPSKPLVLSLGLKDHSSETLKEIVATVIENRLW

SEQ ID NO: 1341 - protein, 80 aa, Arabidopsis thaliana
MGTILHARKEEGMSVEPTFSVSVIFGKRDEPMLTATARRLIEHISSIVPSKPLVLSLGLKDHSSETLKEIVATVIENRLW

SEQ ID NO: 1342 - protein, 68 aa, Arabidopsis thaliana
MSVEPTFSVSVIFGKRDEPMLTATARRLIEHISSIVPSKPLVLSLGLKDHSSETLKEIVATVIENRLW

SEQ ID NO: 1343 - DNA, 1422 bp, Arabidopsis thaliana
gcttacaaggctgctctgtctaatatacagaggacaagagaaaaaaaaaaaaagaaaaaaaaaattgtgatttggtaaacaaaatcaaattttggtttctttgtgagaacttaacttagggtttataaagttccaagctttatccatggcgtaagatgattcaccttctcaaagtttgatccttttttcatatctgatcaaaggagagttttgggtttgatttctaattgttaaagttttaatctttttatttgggtttgtgttcgattatgtggatggctactcaatcaaattctgggttcgattctttgagttctatgatgagtcgtcacgctattaatttccaatctaacacttcttcggagatgactccaatgagtccgtacttggggatgaatatgaatatgatcaatgttggttctcctggttttcttcaaaccgggaattcttcgaatggttccgattcgggttctggtctaaagcttgatacttccatggttagtgaatggtcaaatgaagaacaatacatattggatgctggtcttgaaaaatataaggatatgccaagtattgatatgtatattcaaattggaaacactttacctgataaaagtattcgagatattgctttgcggtgtaggtggctgaggagaaagagaagaaaatcagaagaattaaactgtggaagaagagcaagttctagcaagggcaagcaggtggaatcgtcgtctaagtcaagcattccctctgttttgcctcataacatggcttcatatcctttctcagggccatctacaagcaccagtaaacaaattacgtctgaagatttaagtagctatgcaacaaatcttatagaacagaatgtacgagcttttagtcaaattagagctaatctctcctcatataaggcaggggataacctagatctctttcgtcaggcaaggaacaaccttatcaccatccaaaatgagataaataatatgcctggattgatgaacaagatgccaccattgccagtcacaatcaatgatgatctctcggtgatgatgccattcaatacgatgcaaagtggcggcttccataggaagtagaagtcttaggaaatcatctggtttcccttagttacctgtaaattatcctaaagaagctggaggaggtaaaaaaaaagctcatcaaatgttgggaagtttgtagaaatgtgattctttcgtaacaccaacgatctttattgctgcgcgggatgttgaaacaagacataatataacgaatgtaggggttcttggtcctggctcctaactaaaaaaccttcttaacaagttctattagataaacttagttcaattagtgtcttggagaatttctaagcgatcgatgtgtataaaaaaagattctattgaagagcgtgttgagatttgcatcttt

SEQ ID NO: 1344 - protein, 273 aa, Arabidopsis thaliana
MWMATQSNSGFDSLSSMMSRHAINFQSNTSSEMTPMSPYLGMNMNMINVGSPGFLQTGNSSNGSDSGSGLKLDTSMVSEWSNEEQYILDAGLEKYKDMPSIDMYIQIGNTLPDKSIRDIALRCRWLRRKRRKSEELNCGRRASSSKGKQVESSSKSSIPSVLPHNMASYPFSGPSTSTSKQITSEDLSSYATNLIEQNVRAFSQIRANLSSYKAGDNLDLFRQARNNLITIQNEINNMPGLMNKMPPLPVTINDDLSVMMPFNTMQSGGFHRK

SEQ ID NO: 1345 - protein, 271 aa, Arabidopsis thaliana
MATQSNSGFDSLSSMMSRHAINFQSNTSSEMTPMSPYLGMNMNMINVGSPGFLQTGNSSNGSDSGSGLKLDTSMVSEWSNEEQYILDAGLEKYKDMPSIDMYIQIGNTLPDKSIRDIALRCRWLRRKRRKSEELNCGRRASSSKGKQVESSSKSSIPSVLPHNMASYPFSGPSTSTSKQITSEDLSSYATNLIEQNVRAFSQIRANLSSYKAGDNLDLFRQARNNLITIQNEINNMPGLMNKMPPLPVTINDDLSVMMPFNTMQSGGFHRK

SEQ ID NO: 1346 - protein, 257 aa, Arabidopsis thaliana
MMSRHAINFQSNTSSEMTPMSPYLGMNMNMINVGSPGFLQTGNSSNGSDSGSGLKLDTSMVSEWSNEEQYILDAGLEKYKDMPSIDMYIQIGNTLPDKSIRDIALRCRWLRRKRRKSEELNCGRRASSSKGKQVESSSKSSIPSVLPHNMASYPFSGPSTSTSKQITSEDLSSYATNLIEQNVRAFSQIRANLSSYKAGDNLDLFRQARNNLITIQNEINNMPGLMNKMPPLPVTINDDLSVMMPFNTMQSGGFHRK

SEQ ID NO: 1347 - DNA, 3323 bp, Arabidopsis thaliana
acttgggatttaaataccacttttttgcttcttgtacccctgcttcatcatcacgcacacctctcttaacttcttcgatctcttctttttctctacacgattcgattgattcaagtatcaatcaatcgaatccgagataagtcatgagtttcttcaaatgggtttcttttgttttgatccttcacttgcttaatccgactctgatttcatgttcctctaatgggttatctcaaataccttcaaagtttcttactttggctaaaaggaatgattttttcgattggatggttggaatcagaaggagaatccatgagaatccagagttaggttatgaggaagtagagacatctaagcttgttagagcagagttggagaagatgggtgtttcttataagtacccagttgctgttactggtgttgttgggtatgttggaactggtcatgctccttttgttgctttaagggctgatatggatgcacttgctatgcaggaaatggtggaatgggaacacaagagtaaggttccagggaagatgcacgcttgtggacatgacgctcacactacgatgcttctcggtgctgcaaaattgctcaaagaacatgaagaagagctacagggcacagtggttctagttttccaaccagctgaggaaggaggaggaggtgcaaagaagattgtggaggctggagtgttggagaatgtgagtgcaatctttggattacatgtcacaaatcaattggcattaggtcaagtgagctcgagagagggtcctatgttggctggtagtggctttttcaaagctaagataagcgggaaaggaggccacgcagctcttccgcagcataccatagatccgatactggcagcttcaaatgttattgttagcttacaacacctcgtttcacgagaggcagatcctttagactctcaggtggttacagttgctaaatttgaaggcggtggtgctttcaatgtgattcctgactctgttactatcggtggtacattccgagctttttcaactaaaagctttatgcaactcaagaaaagaattgagcaggttatcacaaggcaagcgagcgtgaatatgtgtaatgcaacagtggatttcattgaagaggagaaaccttttttcccaccaactgtaaatgacaaagccttacaccagtttttcaagaacgtttcaggcgatatgttagggattgagaattacgtcgagatgcaaccattaatgggatcagaagatttctctttctaccaacaagcaatcccgggacattttagcttcgttggaatgcaaaacaaagctcgttcaccaatggcgagccctcactcgccgtactttgaagttaacgaagaattactaccttatggtgcttcccttcatgcttccatggccacaagatatcttcttgaactaaaagcttcaactctaaataagagtaacaaaaaagatgaactttgatgccaacaaacattggcttctcctattcttctactctgaaaaatgtcaaaacatggtaacagttttttcttttttacagagcctgccatgtaaagattaataaattgttatgcagtgtcaagcttctattaaatccaagaaatgttattactgcaaacaaaaacagatttgggccattgcaatgacagagctgaaacggtcaatttaaacaaatcagattgagagatttcagaagattcgacgcataaacaaatgctaaaattcgagagcttgttaacatgtctaactgataaagattcaatttttctttcttgttttttcttcttcttctttagattcaagttctgatctttgcttctttgaaaatcacaaatcttttcttctgggtttctataaaaaacccattttttgttgttgtcgtacaaacatttcccgtaaagattggatttttgtgtaagcatttgaagatagctaagaaagtgagaagcttttagatgaaagtgatggtaatggagatggaggaatgtgttaaagaaaatggttcatcaacacctaaatctagagtcacaaaccaatctagagctctcttaccgttgcgtctgcttcagattctgttattgtttcttgttttgactcttgggatctctgttgttagtatacacatgatcaagtttttgaagattcaacgtttagatcctgtggctccaattactttgctctctacgtataatcatgagagtgttactttagatagctttattagacctccttccaatgtttggcacacaatgaatgatagtgaattgctttggcgtgcttctatagagccgcaaagaaatggttatccgtttaaacgtgtccctaaattggctttcatgtttcttgccaaaggtcctttaccatttgctccactttgggagaagttctgtaaaggacatgagggtctttattctatctatgttcattcgttgcctagttacaaatcggatttttcgaggtcgtctgtgttttacagaagatatatccctagtcaggctgtggcatggggagagatgagtatgggtgaagcagagaggaggcttttggctaatgcgttgcttgatatctctaatgaatggtttgttctgctgtctgaatcatgcattcctctgcgaggtttcagctttatctatagttatgtctctgaatcaagatatagttttatgggtgctgctgatgaggaaggacctgatggaagaggcagatacaggacagaaatggaacctgagatcacactaagccagtggcgaaaagggtctcagtggtttgaaattaaccggaaactcgctgttgagattgttcaagacactacttactatcccaaattcaaagagttttgtagacctccatgctatgtagatgaacattacttcccaacaatgttgtctatgaaacatcgggttttgcttgctaataggacattgacatggacagattggtcacgtggtggtgctcatccagctacttttggtaaggctgatgtaacggaaagttttctcaagaagcttacaggagccaaatcttgcctctacaatgatcatcagtctcaaatctgttatctctttgccagaaagtttgctccaagcgcattggagcctttactgcaacttgcacccaagattcttgagttaggctctaacatatcttccactcgtcactcttggtatttgttttgagaagttcttgagtttagagtatgatcatggaccgaactgatcattagttaatctcctctttcacaatgatattacaggtattgtgaaggttaaacatattttttgacatgacagattattgaataaagggagttttgagtcc

SEQ ID NO: 1348 - protein, 440 aa, Arabidopsis thaliana
MSFFKWVSFVLILHLLNPTLISCSSNGLSQIPSKFLTLAKRNDFFDWMVGIRRRIHENPELGYEEVETSKLVRAELEKMGVSYKYPVAVTGVVGYVGTGHAPFVALRADMDALAMQEMVEWEHKSKVPGKMHACGHDAHTTMLLGAAKLLKEHEEELQGTVVLVFQPAEEGGGGAKKIVEAGVLENVSAIFGLHVTNQLALGQVSSREGPMLAGSGFFKAKISGKGGHAALPQHTIDPILAASNVIVSLQHLVSREADPLDSQVVTVAKFEGGGAFNVIPDSVTIGGTFRAFSTKSFMQLKKRIEQVITRQASVNMCNATVDFIEEEKPFFPPTVNDKALHQFFKNVSGDMLGIENYVEMQPLMGSEDFSFYQQAIPGHFSFVGMQNKARSPMASPHSPYFEVNEELLPYGASLHASMATRYLLELKASTLNKSNKKDEL

SEQ ID NO: 1349 - protein, 406 aa, Arabidopsis thaliana
MKVMVMEMEECVKENGSSTPKSRVTNQSRALLPLRLLQILLLFLVLTLGISVVSIHMIKFLKIQRLDPVAPITLLSTYNHESVTLDSFIRPPSNVWHTMNDSELLWRASIEPQRNGYPFKRVPKLAFMFLAKGPLPFAPLWEKFCKGHEGLYSIYVHSLPSYKSDFSRSSVFYRRYIPSQAVAWGEMSMGEAERRLLANALLDISNEWFVLLSESCIPLRGFSFIYSYVSESRYSFMGAADEEGPDGRGRYRTEMEPEITLSQWRKGSQWFEINRKLAVEIVQDTTYYPKFKEFCRPPCYVDEHYFPTMLSMKHRVLLANRTLTWTDWSRGGAHPATFGKADVTESFLKKLTGAKSCLYNDHQSQICYLFARKFAPSALEPLLQLAPKILELGSNISSTRHSWYLF

SEQ ID NO: 1350 - protein, 403 aa, Arabidopsis thaliana
MVMEMEECVKENGSSTPKSRVTNQSRALLPLRLLQILLLFLVLTLGISVVSIHMIKFLKIQRLDPVAPITLLSTYNHESVTLDSFIRPPSNVWHTMNDSELLWRASIEPQRNGYPFKRVPKLAFMFLAKGPLPFAPLWEKFCKGHEGLYSIYVHSLPSYKSDFSRSSVFYRRYIPSQAVAWGEMSMGEAERRLLANALLDISNEWFVLLSESCIPLRGFSFIYSYVSESRYSFMGAADEEGPDGRGRYRTEMEPEITLSQWRKGSQWFEINRKLAVEIVQDTTYYPKFKEFCRPPCYVDEHYFPTMLSMKHRVLLANRTLTWTDWSRGGAHPATFGKADVTESFLKKLTGAKSCLYNDHQSQICYLFARKFAPSALEPLLQLAPKILELGSNISSTRHSWYLF

SEQ ID NO: 1351 - DNA, 1293 bp, Arabidopsis thaliana
tgcatgtcaacgtgcttcaacctatgtaaagctaaaaaaaaaacacatcacacaaaagattctctacactatggatactaagaaatcgttagtgatcctattgactaacgtcgtcgtcttcttgcttctctccacgactgtccattcttgcttaccgtccgaccgagcggcgcttctagagttccgagcaaagctcaacgagccctacattggagttttcaacacatggaaaggtctagactgttgcaaaggctggtatggtgtgagctgcgatcccaacacccgtcgagtcgccggcattacactccgaggtgaatccgaagacccgcttttccaaaaggcgaaacggagcggactaatgaccggctccatttcgccctctatatgtaagctcactcgtctctccggtatcatcatcgctgattggaagggaatctccggtgtgattcctagttgcattgagaatctccctttcttgagacatttagatctcgtcggaaataaattctccggcgtgattccggcgaatatcgggaagttactgaggcttaaagtgttgaatctagctgataatcacttatacggtgtgattcctccgtcgatcacgagattagtgagtttatcgcatttggatctcaggaataacaatatctcgggagtcataccgcgagatattggtcgtttaaagatggtgagtcgtgtccttttaagcggtaacaaaatctcgggtcaaatacccgattctctgacccggatataccggctcgcggatcttgagctctcgatgaaccgactcaccggtccgattccggcttcgttcggtaaaatgtcggtgctcgcgactctcaatctcgatgggaacttgatctccggtatgattccggggagtctattggcatcatcgatctcgaatttgaatctgagcgggaatcttataaccggaagtatacctaacacgtttggaccgagatcgtacttcacggtgctggatcttgcgaacaatcgtcttcagggaccgattccggcgagtatcacggcggcgtcgtttattggtcaccttgacgtgagccataaccatttgtgtgggaagattccgatgggatctccgtttgatcatcttgacgcgacgtcgtttgcttacaatgcttgtctttgtggaaagcctcttgggaattgtaagaaataattaattaaattattgtttaaagatttgagggaatcattatatagtttgattatgaatattattactataattttcacgttatcaatgtaactataagcaatattttt

SEQ ID NO: 1352 - protein, 394 aa, Arabidopsis thaliana
ACQRASTYVKLKKKHITQKILYTMDTKKSLVILLTNVVVFLLLSTTVHSCLPSDRAALLEFRAKLNEPYIGVFNTWKGLDCCKGWYGVSCDPNTRRVAGITLRGESEDPLFQKAKRSGLMTGSISPSICKLTRLSGIIIADWKGISGVIPSCIENLPFLRHLDLVGNKFSGVIPANIGKLLRLKVLNLADNHLYGVIPPSITRLVSLSHLDLRNNNISGVIPRDIGRLKMVSRVLLSGNKISGQIPDSLTRIYRLADLELSMNRLTGPIPASFGKMSVLATLNLDGNLISGMIPGSLLASSISNLNLSGNLITGSIPNTFGPRSYFTVLDLANNRLQGPIPASITAASFIGHLDVSHNHLCGKIPMGSPFDHLDATSFAYNACLCGKPLGNCKK

SEQ ID NO: 1353 - protein, 371 aa, Arabidopsis thaliana
MDTKKSLVILLTNVVVFLLLSTTVHSCLPSDRAALLEFRAKLNEPYIGVFNTWKGLDCCKGWYGVSCDPNTRRVAGITLRGESEDPLFQKAKRSGLMTGSISPSICKLTRLSGIIIADWKGISGVIPSCIENLPFLRHLDLVGNKFSGVIPANIGKLLRLKVLNLADNHLYGVIPPSITRLVSLSHLDLRNNNISGVIPRDIGRLKMVSRVLLSGNKISGQIPDSLTRIYRLADLELSMNRLTGPIPASFGKMSVLATLNLDGNLISGMIPGSLLASSISNLNLSGNLITGSIPNTFGPRSYFTVLDLANNRLQGPIPASITAASFIGHLDVSHNHLCGKIPMGSPFDHLDATSFAYNACLCGKPLGNCKK

SEQ ID NO: 1354 - protein, 275 aa, Arabidopsis thaliana
MTGSISPSICKLTRLSGIIIADWKGISGVIPSCIENLPFLRHLDLVGNKFSGVIPANIGKLLRLKVLNLADNHLYGVIPPSITRLVSLSHLDLRNNNISGVIPRDIGRLKMVSRVLLSGNKISGQIPDSLTRIYRLADLELSMNRLTGPIPASFGKMSVLATLNLDGNLISGMIPGSLLASSISNLNLSGNLITGSIPNTFGPRSYFTVLDLANNRLQGPIPASITAASFIGHLDVSHNHLCGKIPMGSPFDHLDATSFAYNACLCGKPLGNCKK

SEQ ID NO: 1355 - DNA, 981 bp, Arabidopsis thaliana
gttggtttgcacaaaaaaaaaaattccattgttgttgttccacggaactctaaaatggagagtggcgatgagagtccggtggttctaattacgggatgttctcagggaggaattggtcacgcgctggcccgtgagttcactgagaagggatgtcgagtagtggcgacgagtcgatcacggagtacgatgacggatctggagcaagattcgaggttattcgtgaaggagcttgatgtgcaatcggaccagaatgtgagtaaggttttgtcggaggttattgataagttcggtaagatcgacgttcttgttaataacgccggagttcagtgcgttggacctctggcggagactccaatttccgccatggaaaacacattcaacaccaatgtttttggttccatgaggatgactcaagctgttgtaccacacatggtgtctaagaaaaagggaaagattgtcaacgttggaagtatcactgttatggcacctggtccatgggctggtgtctatacagctaccaaagctgctattcatgctcttaccgatactctgaggttggagcttcgtccgtttgggattgatgtcatcaatgttgtcccgggaggaataagaacaaacatagcaaactcagctgtggcaactttcaacaaaatgcctgagctgaaactatacaagccttatgaagaagctatcagagaaagggcgtttatatcacagaggatgaatccaactcctgcagaaacatttgccagagacactgtagccgcagtgctgaagaagaatccacccgcttggttctcgtcaggcaggtattcaaccctcatggcaggcatgtatcatatgcccttatggctcaaagattttttccagaagcaggttttaatgaagaagtgataatcaggttggggtttaagacagaatgtaccttaaacacgaatgtaaaagctttgttcaaattgttaattgaatctcttatgtctc

SEQ ID NO: 1356 - protein, 297 aa, Arabidopsis thaliana
VGLHKKKNSIVVVPRNSKMESGDESPVVLITGCSQGGIGHALAREFTEKGCRVVATSRSRSTMTDLEQDSRLFVKELDVQSDQNVSKVLSEVIDKFGKIDVLVNNAGVQCVGPLAETPISAMENTFNTNVFGSMRMTQAVVPHMVSKKKGKIVNVGSITVMAPGPWAGVYTATKAAIHALTDTLRLELRPFGIDVINVVPGGIRTNIANSAVATFNKMPELKLYKPYEEAIRERAFISQRMNPTPAETFARDTVAAVLKKNPPAWFSSGRYSTLMAGMYHMPLWLKDFFQKQVLMKK

SEQ ID NO: 1357 - protein, 279 aa, Arabidopsis thaliana
MESGDESPVVLITGCSQGGIGHALAREFTEKGCRVVATSRSRSTMTDLEQDSRLFVKELDVQSDQNVSKVLSEVIDKFGKIDVLVNNAGVQCVGPLAETPISAMENTFNTNVFGSMRMTQAVVPHMVSKKKGKIVNVGSITVMAPGPWAGVYTATKAAIHALTDTLRLELRPFGIDVINVVPGGIRTNIANSAVATFNKMPELKLYKPYEEAIRERAFISQRMNPTPAETFARDTVAAVLKKNPPAWFSSGRYSTLMAGMYHMPLWLKDFFQKQVLMKK

SEQ ID NO: 1358 - protein, 235 aa, Arabidopsis thaliana
MTDLEQDSRLFVKELDVQSDQNVSKVLSEVIDKFGKIDVLVNNAGVQCVGPLAETPISAMENTFNTNVFGSMRMTQAVVPHMVSKKKGKIVNVGSITVMAPGPWAGVYTATKAAIHALTDTLRLELRPFGIDVINVVPGGIRTNIANSAVATFNKMPELKLYKPYEEAIRERAFISQRMNPTPAETFARDTVAAVLKKNPPAWFSSGRYSTLMAGMYHMPLWLKDFFQKQVLMKK

SEQ ID NO: 1359 - DNA, 1135 bp, Arabidopsis thaliana
aaaaaactcatcatcataagcaacaatggtggtgtcactcttctcttccagaaatgttttctatacgttaagcttatgcttatttgcagcattataccagccggttatgagtagaccggctaagtttgaagatgactttaggatcgcatggtccgatactcatatcactcaaattgacggaggcagagccattcagctcaaattggaccctagctcaggatgtggatttgcttcgaagaagcaatacttgttcggccgtgtgagcatgaaaatcaaactgatccccggtgattctgccgggactgtcactgccttctacatgaattcagataccgattcggtacgagacgagcttgattttgagttcttaggaaatcgaagtggacaaccttacacagtgcaaaccaatgtgtttgctcatggtaaaggcgatagagagcaaagagttaacctttggttcgacccttctcgtgatttccacgaatatgccatctcatggaaccatctccgtattgtcttctacgtagacaatgtgcccatcagggtttacaagaacaatgaggcaaggaaagtaccatacccaagattccaaccaatgggtgtatattccacgttatgggaagccgatgattgggcgacacgtggaggaatagagaaaatcaattggtcgagagcgccattttatgcttattacaaagattttgatatagaaggatgtccggttccaggacccgcagattgtcccgctaattcgaagaattggtgggaaggcagtgcgtaccaccagttgagtccggtggaagctcgaagttatagatgggtccgagtgaaccatatggtctacgattattgcactgacaaatctcgttttcctgttccacctccagaatgctcggctggaatctgatccaaacattattgtcttaaaagcaaaacaagtgcgaagtggttccataagcaacgttgcaatgtatgtgaagtgattaatgagtcttgtggtatgtggtgaattgctcataatcgatctgattgtggtcaaatgttcatatatatatgtatatctttgaattttactttgttttcatgatgtcttatgttttgttgatctattgaagagaaccatgtttgtttgttg

SEQ ID NO: 1360 - protein, 293 aa, Arabidopsis thaliana
MVVSLFSSRNVFYTLSLCLFAALYQPVMSRPAKFEDDFRIAWSDTHITQIDGGRAIQLKLDPSSGCGFASKKQYLFGRVSMKIKLIPGDSAGTVTAFYMNSDTDSVRDELDFEFLGNRSGQPYTVQTNVFAHGKGDREQRVNLWFDPSRDFHEYAISWNHLRIVFYVDNVPIRVYKNNEARKVPYPRFQPMGVYSTLWEADDWATRGGIEKINWSRAPFYAYYKDFDIEGCPVPGPADCPANSKNWWEGSAYHQLSPVEARSYRWVRVNHMVYDYCTDKSRFPVPPPECSAGI

SEQ ID NO: 1361 - protein, 266 aa, Arabidopsis thaliana
MSRPAKFEDDFRIAWSDTHITQIDGGRAIQLKLDPSSGCGFASKKQYLFGRVSMKIKLIPGDSAGTVTAFYMNSDTDSVRDELDFEFLGNRSGQPYTVQTNVFAHGKGDREQRVNLWFDPSRDFHEYAISWNHLRIVFYVDNVPIRVYKNNEARKVPYPRFQPMGVYSTLWEADDWATRGGIEKINWSRAPFYAYYKDFDIEGCPVPGPADCPANSKNWWEGSAYHQLSPVEARSYRWVRVNHMVYDYCTDKSRFPVPPPECSAGI

SEQ ID NO: 1362 - protein, 213 aa, Arabidopsis thaliana
MKIKLIPGDSAGTVTAFYMNSDTDSVRDELDFEFLGNRSGQPYTVQTNVFAHGKGDREQRVNLWFDPSRDFHEYAISWNHLRIVFYVDNVPIRVYKNNEARKVPYPRFQPMGVYSTLWEADDWATRGGIEKINWSRAPFYAYYKDFDIEGCPVPGPADCPANSKNWWEGSAYHQLSPVEARSYRWVRVNHMVYDYCTDKSRFPVPPPECSAGI

SEQ ID NO: 1363 - DNA, 983 bp, Arabidopsis thaliana
agtttacacaaacactttctctccactgaactcattttctctcttcttcttcatcatcatcatcaatggatgagataaaaccaaagaaagaagagaattccaaacgacgtcgtaacgtcaaacccatttgccgtgaaactggagaccacgtccattatcttccaacatgcaaaaccaagcccaaacccacgcgtactcatcacgcgccaccaccgatcctcgactcaatcttcaaagtcactcacaagccacactactacgaatgcaggaagaatcacgccgctgatatcggaaccaccgcttacgacggctgcggcgagtttgttagctccaccggtgaagaagattctttaaactgcgccgcatgtggctgtcaccgtaacttccaccgtgaagagttaatcccggagaacggcggcgttactgagacggttcttgaagttctcaagatttcatcgtgtcagtttcgtcggatcttttgctcaccttacggcggtggaaaaagcgaaggaaagaagaagaagaaggagaaggagagttatggaggggatccgataattaaagatcgattcggcggtgcggaggaggaggaggggatagtgaagaggttgaaaacgaagttcacggcggagcaaacggagaaaatgagggattatgcggagaagcttcggtggaaggtgagacctgagaggcaggaggaggttgaagagttttgtgtagagattggagtgaatcggaagaattttaggatttggatgaataatcacaaggataaaattataattgatgaatgattatttaccaaacttaattgtgttacttttcttttcattctactttgttttaatttgtgtttgatttagtgtaatgtataaataacaagctcattattggctaaaaccaattgtggagaaggatttgccacaaccttcgtaatcaatagttttaatgcaagaagtaagtaatatttcgtttggatttcg

SEQ ID NO: 1364 - protein, 242 aa, Arabidopsis thaliana
MDEIKPKKEENSKRRRNVKPICRETGDHVHYLPTCKTKPKPTRTHHAPPPILDSIFKVTHKPHYYECRKNHAADIGTTAYDGCGEFVSSTGEEDSLNCAACGCHRNFHREELIPENGGVTETVLEVLKISSCQFRRIFCSPYGGGKSEGKKKKKEKESYGGDPIIKDRFGGAEEEEGIVKRLKTKFTAEQTEKMRDYAEKLRWKVRPERQEEVEEFCVEIGVNRKNFRIWMNNHKDKIIIDE

SEQ ID NO: 1365 - DNA, 712 bp, Arabidopsis thaliana
accaaattttcaactctttttacgtccaaccaaagaatcttcccaaacctctctttattcgattctccaggcatataacaactctcaccatgccggagaaaactcgccgtacaaaggctctcgccgccacgctcttgacgacagtggtgtttctcacgtttccaatgatcatcaacgcttcagattcatcaaccaatagaaaactcgaagaggatcctataaaatgtacaccatgtcttcaaaacattcctcctccgtcacctccaccgccatcacctccaccgccgtctcaagcttgtcctccaccaccactacctccttcaccgccgaagaagtcttattgtccaccgcctccgtccacttacatatacatgacgggtccaccaggagagttgtatcccattgaccagcagtttggagcggctgttacaaaaagcttcaccgtggtgaagatctcaggcctgatcgcgtttggggttatgagtttcttgatgatcatgaattgatgatgtttcgttgaccccctttttatcgtttcatagattcgtttacttttaacggatgggtatatgttgttcagataactctgaattacttattatctcataaattaacgattgtgcattttctcttaggttaggatcaatttacgtttcatcatatttcgatgtaccaaaatttatttgattaaatactatggataatttaaatg

SEQ ID NO: 1366 - protein, 167 aa, Arabidopsis thaliana
QIFNSFYVQPKNLPKPLFIRFSRHITTLTMPEKTRRTKALAATLLTTVVFLTFPMIINASDSSTNRKLEEDPIKCTPCLQNIPPPSPPPPSPPPPSQACPPPPLPPSPPKKSYCPPPPSTYIYMTGPPGELYPIDQQFGAAVTKSFTVVKISGLIAFGVMSFLMIMN

SEQ ID NO: 1367 - protein, 138 aa, Arabidopsis thaliana
MPEKTRRTKALAATLLTTVVFLTFPMIINASDSSTNRKLEEDPIKCTPCLQNIPPPSPPPPSPPPPSQACPPPPLPPSPPKKSYCPPPPSTYIYMTGPPGELYPIDQQFGAAVTKSFTVVKISGLIAFGVMSFLMIMN

SEQ ID NO: 1368 - protein, 113 aa, Arabidopsis thaliana
MIINASDSSTNRKLEEDPIKCTPCLQNIPPPSPPPPSPPPPSQACPPPPLPPSPPKKSYCPPPPSTYIYMTGPPGELYPIDQQFGAAVTKSFTVVKISGLIAFGVMSFLMIMN

SEQ ID NO: 1369 - DNA, 712 bp, Arabidopsis thaliana
attgttgcctagagaaaaaaaggaaaagagagaaagagttaccccaaaaaatgagcgaagaacagctgcagaaacctatagattgtgctgatgtaaaaggagaggcagagaagatttcgacaacggagggaggcattaaggcggcggaggacaaagagaaaggtgttgtagccgaggcctccggtgaacaggcggagggagaagttaaccagaaaaaggtggtagctaatcctctgaaatcggaaggaaccataacaattggagaggctctagaggcagcggttctcacggcagggaataagccggtggagtggagtgacgcagccgccattcaagcggccgaggttagagctacggggcggaccaatatcatgcccggcggtgttgcggcttcagctcaatcagccgccactcttaatgctcgtatcggctctgacgataccaagactacgctagccgacgttctcactggagcgagtagcaaattaccatcggataaagcagcaacgagaaaggacgcagagggagtgactggcgccgagatgaggaacgatcctcatctcactacatacccaaccggtgtggctgcctctgtcgctgccgccgctcggatcaatcagtccaaatgatgcaattcttctttcttgttattgagaagcaagtttatataaacttaaacaaatgtatatatgttgatctatataagattccc

SEQ ID NO: 1370 - protein, 208 aa, Arabidopsis thaliana
CCLEKKRKREKELPQKMSEEQLQKPIDCADVKGEAEKISTTEGGIKAAEDKEKGVVAEASGEQAEGEVNQKKVVANPLKSEGTITIGEALEAAVLTAGNKPVEWSDAAAIQAAEVRATGRTNIMPGGVAASAQSAATLNARIGSDDTKTTLADVLTGASSKLPSDKAATRKDAEGVTGAEMRNDPHLTTYPTGVAASVAAAARINQSK

SEQ ID NO: 1371 - protein, 192 aa, Arabidopsis thaliana
MSEEQLQKPIDCADVKGEAEKISTTEGGIKAAEDKEKGVVAEASGEQAEGEVNQKKVVANPLKSEGTITIGEALEAAVLTAGNKPVEWSDAAAIQAAEVRATGRTNIMPGGVAASAQSAATLNARIGSDDTKTTLADVLTGASSKLPSDKAATRKDAEGVTGAEMRNDPHLTTYPTGVAASVAAAARINQSK

SEQ ID NO: 1372 - DNA, 1356 bp, Arabidopsis thaliana
gaaaagctctagcacaaaccaaacaccaaatctcatttcttcttcttcttctttttccacattttctgattagcagatcaaatgatgcttgttcgatctgtatttcgatctcagttgcgaccctctgtctcgggtggtctgcaatctgcttcttgctattcttcattatctgctgcttcagctgaagctgagaggactatcagagaaggtcccagaaacgattggagtagagatgaaatcaagtctgtttatgattctcctcttcttgacctcctcttccatggagctcaggttcatagacatgttcataacttcagggaggtacaacaatgtaccctcctctccataaagactggtggctgtagtgaagactgttcatattgtcctcagtcttcgagatatagcactggagttaaggcacaaagactcatgtctaaggacgctgtcattgatgctgctaagaaggcaaaagaagctgggagcacacgtttttgcatgggtgctgcttggcgagatacaattggacggaaaaccaacttcagccagattcttgaatacatcaaagaaataagaggcatggggatggaagtttgctgcaccttaggcatgattgagaaacaacaagcactagagctaaagaaggctggcctcactgcttataaccacaatcttgatacttcaagagagtactacccaaacgtcatcactactagaagttatgacgatcgccttgaaactcttagccatgttcgtgatgctggaatcaacgtttgttcaggaggaatcatagggcttggtgaggcagaggaagacagaataggtttattacacacgctggcaacacttccttctcaccctgagagtgttcccattaatgctctacttgcagtgaaaggcactcctcttgaagaccagaagccagttgagatatgggagatgatcaggatgattggaaccgcacgtattgtaatgccaaaagcgatggtgagactgtctgctggtagagtccggttctcaatgtccgaacaagctctctgtttccttgctggtgcaaactctatcttcaccggagagaagcttttaaccacaccaaacaatgattttgacgctgaccagctcatgttcaagacattaggcctcattcctaaaccgccaagtttctctgaagatgattctgaatcagaaaactgcgagaaagttgcttccgcttctcactaatatcattatccacttttttttttgtttggagtcgggacactatagagcagtcccttttactatgtagcatggtttgacgattttgtgatatcatttttcgttaatcgttattcgaagatgtctagatttctcatctga

SEQ ID NO: 1373 - protein, 378 aa, Arabidopsis thaliana
MMLVRSVFRSQLRPSVSGGLQSASCYSSLSAASAEAERTIREGPRNDWSRDEIKSVYDSPLLDLLFHGAQVHRHVHNFREVQQCTLLSIKTGGCSEDCSYCPQSSRYSTGVKAQRLMSKDAVIDAAKKAKEAGSTRFCMGAAWRDTIGRKTNFSQILEYIKEIRGMGMEVCCTLGMIEKQQALELKKAGLTAYNHNLDTSREYYPNVITTRSYDDRLETLSHVRDAGINVCSGGIIGLGEAEEDRIGLLHTLATLPSHPESVPINALLAVKGTPLEDQKPVEIWEMIRMIGTARIVMPKAMVRLSAGRVRFSMSEQALCFLAGANSIFTGEKLLTTPNNDFDADQLMFKTLGLIPKPPSFSEDDSESENCEKVASASH

SEQ ID NO: 1374 - protein, 377 aa, Arabidopsis thaliana
MLVRSVFRSQLRPSVSGGLQSASCYSSLSAASAEAERTIREGPRNDWSRDEIKSVYDSPLLDLLFHGAQVHRHVHNFREVQQCTLLSIKTGGCSEDCSYCPQSSRYSTGVKAQRLMSKDAVIDAAKKAKEAGSTRFCMGAAWRDTIGRKTNFSQILEYIKEIRGMGMEVCCTLGMIEKQQALELKKAGLTAYNHNLDTSREYYPNVITTRSYDDRLETLSHVRDAGINVCSGGIIGLGEAEEDRIGLLHTLATLPSHPESVPINALLAVKGTPLEDQKPVEIWEMIRMIGTARIVMPKAMVRLSAGRVRFSMSEQALCFLAGANSIFTGEKLLTTPNNDFDADQLMFKTLGLIPKPPSFSEDDSESENCEKVASASH

SEQ ID NO: 1375 - protein, 262 aa, Arabidopsis thaliana
MSKDAVIDAAKKAKEAGSTRFCMGAAWRDTIGRKTNFSQILEYIKEIRGMGMEVCCTLGMIEKQQALELKKAGLTAYNHNLDTSREYYPNVITTRSYDDRLETLSHVRDAGINVCSGGIIGLGEAEEDRIGLLHTLATLPSHPESVPINALLAVKGTPLEDQKPVEIWEMIRMIGTARIVMPKAMVRLSAGRVRFSMSEQALCFLAGANSIFTGEKLLTTPNNDFDADQLMFKTLGLIPKPPSFSEDDSESENCEKVASASH

SEQ ID NO: 1376 - DNA, 1406 bp, Arabidopsis thaliana
ttcttcttctttcttctccaaccaaaatctctttctcagttctctagggttttcaatactcacaccaaagcttaatgccgatcaacgatcagtttcctagtgggttaagaatactcgttgtagacgatgatacttcatgcttgttcattctcgagaaaatgcttctccgtctcatgtaccaagttacaatttgctcacaagctgatgttgcgttaaccattctaagagaaagaaaagacagttttgatttggtgctaagtgatgttcatatgcctggtatgaatggttacaatcttcttcaacaagttggtcttcttgaaatggatcttcctgtcattatgatgtctgttgatggaagaacaactacagtcatgactggaatcaaccatggagcttgtgattatctaatcaaacctattcgtcctgaagagcttaagaacatttggcaacatgttgttagaaggaaatgtgtgatgaagaaagagcttcgaagttctcaagctttagaggataacaagaacagtggtagcctcgagactgttgttgtttcggttagtgaatgctcagaggaaagtttgatgaaatgtaggaataagaagaagaagaagaagagaagtgttgatagagatgataatgaagatgatcttcttcttgatcctggaaactcgaagaagtcacgcgttgtttggtctattgaattgcatcaacaattcgttaatgccgtaaacaaacttggaattgacaaagctgtaccaaagcggattctcgagttgatgaatgttcctggtttaagcagagaaaacgtggctagtcatttacagaagttccgattgtatttgaagagattaagcggtgaagcttcgcagagtaatgactctgagtctaccaaaagatatgaaaacattcaagctctggtttcctcaggacaattacatccacagacattagctgcattgtttggtcaaccaatagacaatcatcactctgctagttttggagtttggattcctaatgacaatcttggtagatctcaaaatgaacacttctcggttgatgtatcatccgcttctaaccgtcctgtttctgtggcggttcatggtctatcttcctcagcaaatttcagacagagaggtgacgttaacaacaacagaatcagacaagggtatggatcaaatgtcaatgaagaatcttggatcttggaaagatcttcaagacaaagatagtgaccaatatggatacgcttaagaagagaaggctctgcaactgtttcttttaaatcttcaggaatggattaatgtcagaagaaaacttgtgtgtctgcaatgttagcttaggaaagtaattatgtaaccaatattttgaattgttatctctcactttattatggttgccaaaagttttagccc

SEQ ID NO: 1377 - protein, 382 aa, Arabidopsis thaliana
MPINDQFPSGLRILVVDDDTSCLFILEKMLLRLMYQVTICSQADVALTILRERKDSFDLVLSDVHMPGMNGYNLLQQVGLLEMDLPVIMMSVDGRTTTVMTGINHGACDYLIKPIRPEELKNIWQHVVRRKCVMKKELRSSQALEDNKNSGSLETVVVSVSECSEESLMKCRNKKKKKKRSVDRDDNEDDLLLDPGNSKKSRVVWSIELHQQFVNAVNKLGIDKAVPKRILELMNVPGLSRENVASHLQKFRLYLKRLSGEASQSNDSESTKRYENIQALVSSGQLHPQTLAALFGQPIDNHHSASFGVWIPNDNLGRSQNEHFSVDVSSASNRPVSVAVHGLSSSANFRQRGDVNNNRIRQGYGSNVNEESWILERSSRQR

SEQ ID NO: 1378 - protein, 354 aa, Arabidopsis thaliana
MLLRLMYQVTICSQADVALTILRERKDSFDLVLSDVHMPGMNGYNLLQQVGLLEMDLPVIMMSVDGRTTTVMTGINHGACDYLIKPIRPEELKNIWQHVVRRKCVMKKELRSSQALEDNKNSGSLETVVVSVSECSEESLMKCRNKKKKKKRSVDRDDNEDDLLLDPGNSKKSRVVWSIELHQQFVNAVNKLGIDKAVPKRILELMNVPGLSRENVASHLQKFRLYLKRLSGEASQSNDSESTKRYENIQALVSSGQLHPQTLAALFGQPIDNHHSASFGVWIPNDNLGRSQNEHFSVDVSSASNRPVSVAVHGLSSSANFRQRGDVNNNRIRQGYGSNVNEESWILERSSRQR

SEQ ID NO: 1379 - protein, 349 aa, Arabidopsis thaliana
MYQVTICSQADVALTILRERKDSFDLVLSDVHMPGMNGYNLLQQVGLLEMDLPVIMMSVDGRTTTVMTGINHGACDYLIKPIRPEELKNIWQHVVRRKCVMKKELRSSQALEDNKNSGSLETVVVSVSECSEESLMKCRNKKKKKKRSVDRDDNEDDLLLDPGNSKKSRVVWSIELHQQFVNAVNKLGIDKAVPKRILELMNVPGLSRENVASHLQKFRLYLKRLSGEASQSNDSESTKRYENIQALVSSGQLHPQTLAALFGQPIDNHHSASFGVWIPNDNLGRSQNEHFSVDVSSASNRPVSVAVHGLSSSANFRQRGDVNNNRIRQGYGSNVNEESWILERSSRQR

SEQ ID NO: 1380 - DNA, 1134 bp, Arabidopsis thaliana
acaccttctctgcaaaaacaaaagatttccacttttcttaaaaatggcgtccatgaaacacgttcatcttttccgtcgttatctctcaatcgttttcactctctttcaacgcttaatttcatgtttcttcgattttccgatactgatcaaaatcgcagattcgttcttatctctgtatttcttagttttctgcgatctccgacccgtaaccgtcgatctagacgacggagaaaccacagtccatttctggatctccggccaccgtagaatctctcggcagaatctcgtcatgctccatggatacggaggaaactccaaatggcaattcgttcatcaagtctcggatctctcgaaatcgtttaatctcttcatccccgatttggtcttcttcggaaaatcgtattcgaagaatagagatcggagcgttgagattcaggcgaggagcgtcgtcggaggattgaagaaactgggatgcgttgaaggaggaggaggaatatcgatttattcgattagttacggtggatttgtggcgtataaaatggcggagatttggccggcgatggttgagaaattggtgattgtgagtagtggagtgggatttacacagcagcagaagacggcagaattgaaaaaacacggcggagattgttcgaagattttagttccgaaaactccgatggatctacggttgctgattaagatatctatgaatactggtttaacgttcgtcgattgggttccagactttttcctttcccaattcatcgctgtaatgtatgagaaaaatcggcaggagcttcttgagctagctaagaatttgttggaacgagaggaggaaccagaattgcctgtaatatcccagaaaacgttaatcgtttggggagacaaggacaaggtgtttcccttggagcatgcttatcggctgcaaaggcatttacagagttcaagattagagataataaaggaaacaggacacgctgttaacattgaagcaccaactactcttaataattttattacttcgtttgtcttaagtgcttgatttctatttttgtatatacttcttcttcatataaatatctatatgcatttgatttaagtgtatatatagttgacatcatttaacatatcatc

SEQ ID NO: 1381 - protein, 346 aa, Arabidopsis thaliana
HLLCKNKRFPLFLKMASMKHVHLFRRYLSIVFTLFQRLISCFFDFPILIKIADSFLSLYFLVFCDLRPVTVDLDDGETTVHFWISGHRRISRQNLVMLHGYGGNSKWQFVHQVSDLSKSFNLFIPDLVFFGKSYSKNRDRSVEIQARSVVGGLKKLGCVEGGGGISIYSISYGGFVAYKMAEIWPAMVEKLVIVSSGVGFTQQQKTAELKKHGGDCSKILVPKTPMDLRLLIKISMNTGLTFVDWVPDFFLSQFIAVMYEKNRQELLELAKNLLEREEEPELPVISQKTLIVWGDKDKVFPLEHAYRLQRHLQSSRLEIIKETGHAVNIEAPTTLNNFITSFVLSA

SEQ ID NO: 1382 - protein, 332 aa, Arabidopsis thaliana
MASMKHVHLFRRYLSIVFTLFQRLISCFFDFPILIKIADSFLSLYFLVFCDLRPVTVDLDDGETTVHFWISGHRRISRQNLVMLHGYGGNSKWQFVHQVSDLSKSFNLFIPDLVFFGKSYSKNRDRSVEIQARSVVGGLKKLGCVEGGGGISIYSISYGGFVAYKMAEIWPAMVEKLVIVSSGVGFTQQQKTAELKKHGGDCSKILVPKTPMDLRLLIKISMNTGLTFVDWVPDFFLSQFIAVMYEKNRQELLELAKNLLEREEEPELPVISQKTLIVWGDKDKVFPLEHAYRLQRHLQSSRLEIIKETGHAVNIEAPTTLNNFITSFVLSA

SEQ ID NO: 1383 - protein, 329 aa, Arabidopsis thaliana
MKHVHLFRRYLSIVFTLFQRLISCFFDFPILIKIADSFLSLYFLVFCDLRPVTVDLDDGETTVHFWISGHRRISRQNLVMLHGYGGNSKWQFVHQVSDLSKSFNLFIPDLVFFGKSYSKNRDRSVEIQARSVVGGLKKLGCVEGGGGISIYSISYGGFVAYKMAEIWPAMVEKLVIVSSGVGFTQQQKTAELKKHGGDCSKILVPKTPMDLRLLIKISMNTGLTFVDWVPDFFLSQFIAVMYEKNRQELLELAKNLLEREEEPELPVISQKTLIVWGDKDKVFPLEHAYRLQRHLQSSRLEIIKETGHAVNIEAPTTLNNFITSFVLSA

SEQ ID NO: 1384 - DNA, 1521 bp, Arabidopsis thaliana
aaaaacatctttggtgtaacaaaaatggcttcgtcttccaaagcactgatcgaatccataggctctcttgacaaagactcatacgtttctctcttatcaaaactcataggcgaatctaaattcgtccagaacaatccgccggagctcatccctcaagaggacctaatcgtcaaacacgtccttgactctctccgtccttatagcacagaaactggtggtggtcctctggtgatcaatcatgtcgcgtatcattcaggtagaggtaatctcatcgttgagtacccaggatctgttcccggaaagatcttgtctttcgtcggaatgcatatggacgtcgtcactgcgaatcctgatgattgggaatttgatcctttctcgctaagcatagatggtgataagcttcgtggtcgtgggacaacagattgtcttggtcacgttgctcttgtcactgaactcatgaagaaactcgggcaagccaaaccggcgttgaaatcaacggtggtggcggttttcatcgctagcgaagagaactcttccattcctggtgttggtgtggacatgctggtgaaagacaaacttcttgataagctcaaatccggacccttgtattggattgatacagcggataagcagccgtgtgttggaactgggggtatgataccatggaagcttcagtttactggaaagcttttccatagcggtttagctcacaaggcgattaacgcgatggagttagcaatggaagggcttaaggaaatccaagctcggttctacagagactttccgcctcacccacaagaggaagtttatggttttgcaacaccatccaccatgaagccaacacagtggtgttatccagcaggtggaatcaaccaaatccccggagaatgtactgtttcgggtgatgtcaggttgactcctttctatgacgtgaaggaagtgataacgaagttgcaagagtatgttgacgacataaacggtaacatagagaggctcgaaacccgtggtcctgtttcaaaatatgtcttaccagatgagaatttacggggaaggctcacgttaagttttgatgaagcatcagctggagttgcgtgtaatcttgattctcccggctttcacgttctatgcaaagcaaccgaagaagttgttggacacgtgaagccttactcgatcaccggtactttacctctaatccgagacctccaggatgaaggttttgatgtgcaaacttcaggatacggtctcatggctacatatcatgcaaagaacgaatactgccttcttacagacatgtgccaaggctttgatgtcttcatcaggatcatttctcaacttgaacaagtataaaatcagatggaagatcataaaataaaagcttcacatagctactctcttattaactaaatggttctatacatttactttgcttctatctatttgtacaagtcaatggtggctcaatacttcagacactttacaaaatttaaaacaaaggataatgttttatacagttatttattt

SEQ ID NO: 1385 - protein, 448 aa, Arabidopsis thaliana
KNIFGVTKMASSSKALIESIGSLDKDSYVSLLSKLIGESKFVQNNPPELIPQEDLIVKHVLDSLRPYSTETGGGPLVINHVAYHSGRGNLIVEYPGSVPGKILSFVGMHMDVVTANPDDWEFDPFSLSIDGDKLRGRGTTDCLGHVALVTELMKKLGQAKPALKSTVVAVFIASEENSSIPGVGVDMLVKDKLLDKLKSGPLYWIDTADKQPCVGTGGMIPWKLQFTGKLFHSGLAHKAINAMELAMEGLKEIQARFYRDFPPHPQEEVYGFATPSTMKPTQWCYPAGGINQIPGECTVSGDVRLTPFYDVKEVITKLQEYVDDINGNIERLETRGPVSKYVLPDENLRGRLTLSFDEASAGVACNLDSPGFHVLCKATEEVVGHVKPYSITGTLPLIRDLQDEGFDVQTSGYGLMATYHAKNEYCLLTDMCQGFDVFIRIISQLEQV

SEQ ID NO: 1386 - protein, 440 aa, Arabidopsis thaliana
MASSSKALIESIGSLDKDSYVSLLSKLIGESKFVQNNPPELIPQEDLIVKHVLDSLRPYSTETGGGPLVINHVAYHSGRGNLIVEYPGSVPGKILSFVGMHMDVVTANPDDWEFDPFSLSIDGDKLRGRGTTDCLGHVALVTELMKKLGQAKPALKSTVVAVFIASEENSSIPGVGVDMLVKDKLLDKLKSGPLYWIDTADKQPCVGTGGMIPWKLQFTGKLFHSGLAHKAINAMELAMEGLKEIQARFYRDFPPHPQEEVYGFATPSTMKPTQWCYPAGGINQIPGECTVSGDVRLTPFYDVKEVITKLQEYVDDINGNIERLETRGPVSKYVLPDENLRGRLTLSFDEASAGVACNLDSPGFHVLCKATEEVVGHVKPYSITGTLPLIRDLQDEGFDVQTSGYGLMATYHAKNEYCLLTDMCQGFDVFIRIISQLEQV

SEQ ID NO: 1387 - protein, 341 aa, Arabidopsis thaliana
MHMDVVTANPDDWEFDPFSLSIDGDKLRGRGTTDCLGHVALVTELMKKLGQAKPALKSTVVAVFIASEENSSIPGVGVDMLVKDKLLDKLKSGPLYWIDTADKQPCVGTGGMIPWKLQFTGKLFHSGLAHKAINAMELAMEGLKEIQARFYRDFPPHPQEEVYGFATPSTMKPTQWCYPAGGINQIPGECTVSGDVRLTPFYDVKEVITKLQEYVDDINGNIERLETRGPVSKYVLPDENLRGRLTLSFDEASAGVACNLDSPGFHVLCKATEEVVGHVKPYSITGTLPLIRDLQDEGFDVQTSGYGLMATYHAKNEYCLLTDMCQGFDVFIRIISQLEQV

SEQ ID NO: 1388 - DNA, 2501 bp, Arabidopsis thaliana
gggacacccattaaaatatttcatcaacttgtcggtaaaattaattcttggcttattctatctttctttctctgtcttcttctttcaatttttcaataacaataatacagatgtgtatacattagatacacgtatactagtactaaacttcactgtgtgatctgatctagagtttttatactatcagaataaataatagtcgacaatttgggatttgtttatggtttacttcacatgaatcacatacgttcatgtcgattcctttgagatactgtctcgatttcgtttttttctcttgtttaatttaaaattattgtaaagcacgtggatttgcttgtcttggttttgttttctccttcgacctctttgatgaaatcgaggaacctacaatttcttcgtcgatccaaatggtagcttagtggtggtgataataggtttctcctcttgattggctccagctttaggtttttttttttatctttgtttctgcttcgattcccaaaatttaccctttcgattttgagtctaactagtcgagttgactcagtagagtcgaaagcttctgggtttacgaagagacatctcctaattgaaacaaaacctttcctttccattgggctgagaaaaaagcaagagtctttgaatattttttggagcgtggttttatttagatgggaggtcaatgctctagcctgagttgttgcaggaacacttcacacaagacagctgttcttgaagctcctgatgttgataatggagagagtagtgagatcactgatgttcctaatttccgggagtatactttagaacagcttaaggcagctacttctggttttgccgtggagtatattgtatctgaacatggagaaaaggctccaaatgttgtctataaagggaaattggagaaccaaaagaagattgctgtcaagcgttttactagaatggcctggcctgattcacgacagttcttggaggaagcgaggtcggttggtcagctacggagtgagagaatggccaatttactcggatgttgctgcgaaggtgacgagaggttacttgtagcagagtttatgcctaatgaaacactagccaaacacctttttcactgggaaactcaacctatgaaatggactatgaggctacgagttgttttatatctagcacaagctcttgaatactgcaccagcaaaggccgtactctttaccacgacctcaatgcttaccgggttttgtttgatgaggaatgcaatccaagactatctacttttggcttgatgaagaatagtcgggatggaaaaagttacagcactaatcttgctttcacccctcctgaatatctacgaactgggagaattactccagagagtgtaatatacagctttggcactcttctgcttgatcttctcagcggaaaacatatacctcctagccatgcccttgatctgattagagacagaaatctccagacgctaactgattcttgcctagatgggcagttttctgatagtgatggtacagagctagtacgcctagcttctcgttgtcttcagtatgaagctcgtgagcggccaaacaccaaatctttagtgactgccttgacacctcttcagaaggagacagaggtcctgtctcatgttctaatgggtctacctcacagtggttcagtctctcctctgtcccctcttggtgaggcttgttcaagaagggacctgaccgctatgcttgagatcctggagaaacttggatacaaagacgacgagggtgtcaccaatgagctctcgtttcatatgtggacagaccagatgcaagagtctttgaactcgaagaagaagggtgatgtggctttcaggcaaaaagactttagagaggccatcgagtgttacacacagtttattgatggaggaatgatctctccaacagtgtgtgctcggcgtagtctgtgttacctaatgagtgacatgccgaaagaagctttagatgatgcaattcaggctcaagtgatctctcccgtgtggcatgtcgcatcatatctgcagtctgcttcccttggtatcctgggaatggagaaggaatctcaaatcgcactgaaagagggctcgaaccttgaagcaaagatgaatggagttccccgagtgaagtaagatatatagcatttaagatttttcttgttgggaaagatgaaagaacatcttaccaagtaaaaggggtatgaatcttttgagcacaatgatgggaaaacactcaagagcaatgcaaaactatagaccctcttcttctggttgtatgaggtgttttgcccttcttgtgcctctttttatgggcattgaattgaaggagtcatttcctttattagctttgaaatccatttcctgaaactttattgtactaaaaaacccattattgcagaaaccaaaagagggttttgtttcttttgatctataggtcacacagactaaacatgtatgaactcttgtcttttgactaaagagatattcgacagc

SEQ ID NO: 1389 - protein, 489 aa, Arabidopsis thaliana
MGGQCSSLSCCRNTSHKTAVLEAPDVDNGESSEITDVPNFREYTLEQLKAATSGFAVEYIVSEHGEKAPNVVYKGKLENQKKIAVKRFTRMAWPDSRQFLEEARSVGQLRSERMANLLGCCCEGDERLLVAEFMPNETLAKHLFHWETQPMKWTMRLRVVLYLAQALEYCTSKGRTLYHDLNAYRVLFDEECNPRLSTFGLMKNSRDGKSYSTNLAFTPPEYLRTGRITPESVIYSFGTLLLDLLSGKHIPPSHALDLIRDRNLQTLTDSCLDGQFSDSDGTELVRLASRCLQYEARERPNTKSLVTALTPLQKETEVLSHVLMGLPHSGSVSPLSPLGEACSRRDLTAMLEILEKLGYKDDEGVTNELSFHMWTDQMQESLNSKKKGDVAFRQKDFREAIECYTQFIDGGMISPTVCARRSLCYLMSDMPKEALDDAIQAQVISPVWHVASYLQSASLGILGMEKESQIALKEGSNLEAKMNGVPRVK

SEQ ID NO: 1390 - protein, 399 aa, Arabidopsis thaliana
MAWPDSRQFLEEARSVGQLRSERMANLLGCCCEGDERLLVAEFMPNETLAKHLFHWETQPMKWTMRLRVVLYLAQALEYCTSKGRTLYHDLNAYRVLFDEECNPRLSTFGLMKNSRDGKSYSTNLAFTPPEYLRTGRITPESVIYSFGTLLLDLLSGKHIPPSHALDLIRDRNLQTLTDSCLDGQFSDSDGTELVRLASRCLQYEARERPNTKSLVTALTPLQKETEVLSHVLMGLPHSGSVSPLSPLGEACSRRDLTAMLEILEKLGYKDDEGVTNELSFHMWTDQMQESLNSKKKGDVAFRQKDFREAIECYTQFIDGGMISPTVCARRSLCYLMSDMPKEALDDAIQAQVISPVWHVASYLQSASLGILGMEKESQIALKEGSNLEAKMNGVPRVK

SEQ ID NO: 1391 - protein, 376 aa, Arabidopsis thaliana
MANLLGCCCEGDERLLVAEFMPNETLAKHLFHWETQPMKWTMRLRVVLYLAQALEYCTSKGRTLYHDLNAYRVLFDEECNPRLSTFGLMKNSRDGKSYSTNLAFTPPEYLRTGRITPESVIYSFGTLLLDLLSGKHIPPSHALDLIRDRNLQTLTDSCLDGQFSDSDGTELVRLASRCLQYEARERPNTKSLVTALTPLQKETEVLSHVLMGLPHSGSVSPLSPLGEACSRRDLTAMLEILEKLGYKDDEGVTNELSFHMWTDQMQESLNSKKKGDVAFRQKDFREAIECYTQFIDGGMISPTVCARRSLCYLMSDMPKEALDDAIQAQVISPVWHVASYLQSASLGILGMEKESQIALKEGSNLEAKMNGVPRVK

SEQ ID NO: 1392 - DNA, 997 bp, Arabidopsis thaliana
aatggaaatacactccgatgactacttcttccttcctcctccctgcttctcctccctcagccgcctttctccggcggcgcttcttccgccactcctggctttcctctaagatccaccaccgtcttccccaagttatgaatgattccacgaggactgaagtatccattgataaatcagaagtagacaagcttgttgacaagattgattttggggaattatgcaacgattttgagtgcacaagtagtccgcaggtggaatccacagctagacaacttgttcgcgacattcttgaaatcagagaaggaaatcgtgcctttgcatgctatgcagtttccgttaaatataaggatccggttagaagttttacaggtcgtgagaagtacaaaagaccaatgtggataactagtggattagagaatcctaccgtgacggtacaagagatggtaatgttatcgaccagcgtcttgcgaattaaatggacagtgaaaggaaaaccaaaatctattcttgctgctgtaagtggagatttgatagtaaaagtcaaatctgaatttactcttaaccagattagtgggcaagtgtttgagcatgaagagtcttgggacttatcttcatcatcccctattgctcaagcctatttctggacatcccgccgcctctttgctgcttctgaatccgcaaaagatgtcgccgatgtcacaaaagacttgaccgccaatttgacaactcgaaaagaggacacagatatatatcgcgatccaaccgatccaaataagtttttccaaagagacaacagctttgagagagatgtgtatcaaattgcactgtttctagccattgtctattttgttgtacagttcttgaagaacacaatctagttaccttctctcccatcctctataacagatatgtaaatgcctatatattgttgtatatgatctgtaaaaaaaaactgaacaagaaaagagatgtgtttgtttgtgttggaagaaagact

SEQ ID NO: 1393 - protein, 291 aa, Arabidopsis thaliana
WKYTPMTTSSFLLPASPPSAAFLRRRFFRHSWLSSKIHHRLPQVMNDSTRTEVSIDKSEVDKLVDKIDFGELCNDFECTSSPQVESTARQLVRDILEIREGNRAFACYAVSVKYKDPVRSFTGREKYKRPMWITSGLENPTVTVQEMVMLSTSVLRIKWTVKGKPKSILAAVSGDLIVKVKSEFTLNQISGQVFEHEESWDLSSSSPIAQAYFWTSRRLFAASESAKDVADVTKDLTANLTTRKEDTDIYRDPTDPNKFFQRDNSFERDVYQIALFLAIVYFVVQFLKNTI

SEQ ID NO: 1394 - protein, 286 aa, Arabidopsis thaliana
MTTSSFLLPASPPSAAFLRRRFFRHSWLSSKIHHRLPQVMNDSTRTEVSIDKSEVDKLVDKIDFGELCNDFECTSSPQVESTARQLVRDILEIREGNRAFACYAVSVKYKDPVRSFTGREKYKRPMWITSGLENPTVTVQEMVMLSTSVLRIKWTVKGKPKSILAAVSGDLIVKVKSEFTLNQISGQVFEHEESWDLSSSSPIAQAYFWTSRRLFAASESAKDVADVTKDLTANLTTRKEDTDIYRDPTDPNKFFQRDNSFERDVYQIALFLAIVYFVVQFLKNTI

SEQ ID NO: 1395 - protein, 247 aa, Arabidopsis thaliana
MNDSTRTEVSIDKSEVDKLVDKIDFGELCNDFECTSSPQVESTARQLVRDILEIREGNRAFACYAVSVKYKDPVRSFTGREKYKRPMWITSGLENPTVTVQEMVMLSTSVLRIKWTVKGKPKSILAAVSGDLIVKVKSEFTLNQISGQVFEHEESWDLSSSSPIAQAYFWTSRRLFAASESAKDVADVTKDLTANLTTRKEDTDIYRDPTDPNKFFQRDNSFERDVYQIALFLAIVYFVVQFLKNTI

SEQ ID NO: 1396 - DNA, 1189 bp, Arabidopsis thaliana
atgaatttggtcttcgctataatctcacgttacattaaattggctcctgtgaacctaaatttatggactatgatcccaacaccaatccgttcgaccttcatttctccggtaaacttccgaaaagagaagtctcggcttcagcttctaaagttgtagagaagaaatggttagtgaaagatgagaagagaaatatgctacaagatgaaataaaccgggttaattcggagaacaagaagctaaccgaaatgttagcaagggtctgtgagaagtactatgctcttaataatcttatggaggagttgcagagtcgaaagagtcctgaaagtgttaactttcagaacaaacagctaacggggaaacgaaaacaagaacttgatgagtttgttagctccccaattggactcagtctcggaccaatcgagaacatcaccaacgataaagcgacggtttcaaccgcttactttgctgctgagaagtctgacacaagcttgactgtgaaagatggatatcaatggaggaaatacgggcaaaagattacgagagataatccatctcctagagcttacttcagatgctcgttttcaccgtcttgtctagtcaagaagaaggtgcaacgaagtgcagaagatccatctttcttggtagccacttacgaacggacacataaccacaccggaccacatgcaagtgtgtccaggacagtgaaacttgatctagttcaaggtgggcttgaaccagttgaggaaaagaaagagagagggacgattcaagaggttttggtgcaacaaatggcttcttcgttgaccaaagatcctaagttcactgcagctcttgcgactgctatttccgggagattgatagagcattcaagaacatgaaagttctctagaacatgtatatttctgttttgttctattttgttgctcattcctagtaaaaaggtaaagatttgtttgatcttgattaggaggcatagatgtcaattttaatgtgtgtgtatataattacatcaaatctaagtatccaaaaagggtcacccccattttatcttatgttgaaagagttttgttatagctcggtgtaagtatggtagattgacgctgcttcgacagtttatgtatcttccaatgttatcttgttcagttgtttgtattaacttccattagagaagaatgtgatgccattacag

SEQ ID NO: 1397 - protein, 271 aa, Arabidopsis thaliana
MDYDPNTNPFDLHFSGKLPKREVSASASKVVEKKWLVKDEKRNMLQDEINRVNSENKKLTEMLARVCEKYYALNNLMEELQSRKSPESVNFQNKQLTGKRKQELDEFVSSPIGLSLGPIENITNDKATVSTAYFAAEKSDTSLTVKDGYQWRKYGQKITRDNPSPRAYFRCSFSPSCLVKKKVQRSAEDPSFLVATYERTHNHTGPHASVSRTVKLDLVQGGLEPVEEKKERGTIQEVLVQQMASSLTKDPKFTAALATAISGRLIEHSRT

SEQ ID NO: 1398 - protein, 228 aa, Arabidopsis thaliana
MLQDEINRVNSENKKLTEMLARVCEKYYALNNLMEELQSRKSPESVNFQNKQLTGKRKQELDEFVSSPIGLSLGPIENITNDKATVSTAYFAAEKSDTSLTVKDGYQWRKYGQKITRDNPSPRAYFRCSFSPSCLVKKKVQRSAEDPSFLVATYERTHNHTGPHASVSRTVKLDLVQGGLEPVEEKKERGTIQEVLVQQMASSLTKDPKFTAALATAISGRLIEHSRT

SEQ ID NO: 1399 - protein, 210 aa, Arabidopsis thaliana
MLARVCEKYYALNNLMEELQSRKSPESVNFQNKQLTGKRKQELDEFVSSPIGLSLGPIENITNDKATVSTAYFAAEKSDTSLTVKDGYQWRKYGQKITRDNPSPRAYFRCSFSPSCLVKKKVQRSAEDPSFLVATYERTHNHTGPHASVSRTVKLDLVQGGLEPVEEKKERGTIQEVLVQQMASSLTKDPKFTAALATAISGRLIEHSRT

SEQ ID NO: 1400 - DNA, 1373 bp, Arabidopsis thaliana
ccctgttcttttattcttttcttatctacaaaaaaaacttcgagcaagaacaaaaaaaaaaaactgtccatgtaccacaccatgagattagttgtcagatagatattcgcgagacgagaagctccaattaaaaaccctagagctcatctctctctccaggtacggccttttcgtttttggctttcaccggcgtggatctccggtgacggggagattcggaatttcggagagattttagatcatgtatagggagagaggtatggttggatcgaagtcggaggtggtcgatcggaaacgaataaacgagattcacgataacaggccttcgcattcgatgtctcagcctgtcaatggaaaaggcaaggtaacatcgacctccgttttgatggggaagcagcaattgcatgataaggaatcttcacgttctggttctatctctaagactaacatttccgacgctgtggatatatcagacacagacagcgaagaatcagaggtcagtggttctgatggagaggacacctcgtggatatcttggttctgcaaccttcgtgggaacgagttcttctgtgaagttgatgatgattacatccaggatgactttaacttgtgtggactcagccatcaagttccttactacgactatgcccttgatttgattttggatgtggagtcttcgcatggtgagatgtttacagaggaacagaatgaattgatcgagtcagcagcagagatgctatatggaatgattcatgctcgtttcatattgactagcaaagggctggcttctatgttagacaaatacaaaaactatgactttggaagatgcccaagagtttattgttgtggccaaccttgtttaccagttggtcaatccgatatccctagagcaagcaccgtaaagatatactgcccaaaatgtgaagatgtctattacccacgatcaaaataccaaggaaacatagatggagcttactttgggacaacgtttccacatctgttcttgatgacgtacgggcatctgaagccacaaaaggcatcacaaagctacactcaaagagtgtttgggttcaagctacacaagccgtgaaggaaacaaggaagaagaaatgcacccttgggttttgagaaacaagaaatgtgtgtaaacaaaacaaaaagaaaaagaccatttgtatcacagaaggtgaaactagttccatctctctctctctctctctctttttctttgtttttggtattgtgtttaggtttagataaaacattagcagcatggactggtgaactgaaatcccatattattgtaatactttaccttattgttcctttttgctttcttcttcccactaccaaatagttatcacaatttcccc

SEQ ID NO: 1401 - protein, 282 aa, Arabidopsis thaliana
MYRERGMVGSKSEVVDRKRINEIHDNRPSHSMSQPVNGKGKVTSTSVLMGKQQLHDKESSRSGSISKTNISDAVDISDTDSEESEVSGSDGEDTSWISWFCNLRGNEFFCEVDDDYIQDDFNLCGLSHQVPYYDYALDLILDVESSHGEMFTEEQNELIESAAEMLYGMIHARFILTSKGLASMLDKYKNYDFGRCPRVYCCGQPCLPVGQSDIPRASTVKIYCPKCEDVYYPRSKYQGNIDGAYFGTTFPHLFLMTYGHLKPQKASQSYTQRVFGFKLHKP

SEQ ID NO: 1402 - protein, 276 aa, Arabidopsis thaliana
MVGSKSEVVDRKRINEIHDNRPSHSMSQPVNGKGKVTSTSVLMGKQQLHDKESSRSGSISKTNISDAVDISDTDSEESEVSGSDGEDTSWISWFCNLRGNEFFCEVDDDYIQDDFNLCGLSHQVPYYDYALDLILDVESSHGEMFTEEQNELIESAAEMLYGMIHARFILTSKGLASMLDKYKNYDFGRCPRVYCCGQPCLPVGQSDIPRASTVKIYCPKCEDVYYPRSKYQGNIDGAYFGTTFPHLFLMTYGHLKPQKASQSYTQRVFGFKLHKP

SEQ ID NO: 1403 - protein, 251 aa, Arabidopsis thaliana
MSQPVNGKGKVTSTSVLMGKQQLHDKESSRSGSISKTNISDAVDISDTDSEESEVSGSDGEDTSWISWFCNLRGNEFFCEVDDDYIQDDFNLCGLSHQVPYYDYALDLILDVESSHGEMFTEEQNELIESAAEMLYGMIHARFILTSKGLASMLDKYKNYDFGRCPRVYCCGQPCLPVGQSDIPRASTVKIYCPKCEDVYYPRSKYQGNIDGAYFGTTFPHLFLMTYGHLKPQKASQSYTQRVFGFKLHKP

SEQ ID NO: 1404 - DNA, 1740 bp, Arabidopsis thaliana
atcttctacacagttctgaagcaacaaaacagggttttggctagggttttaactttggctgctctgtctcaatccctcgagacttaaacccacttagtacaatctccatataatttgagtagaacctaaaagatcgaagcttgaggaaaatggtcccttccaatggcgcaaaggttcttcgcttgttgagtcgtcgatgtctctcttcatcgcttattcaagatttagccaatcagaaactgagaggagtatgtattgggagttataggagattgaatacgagtgttggcaatcatgctaacgtgattggagattacgcttcaaaatctggacatgatcggaaatggatcaactttggaggttttaatactaattttggttctacaaggtcttttcatggaacaggttcttcgtttatgtctgctaaggactactatagtgttcttggagtgagtaagaatgctcaagaaggtgaaatcaagaaggcttattatgggcttgctaagaaactccatcctgatatgaataaagatgatccagaagctgagacgaagttccaggaagtctcaaaagcatatgaaattttgaaagataaggagaagcgtgacctttatgaccaggttggtcatgaagcatttgagcaaaatgctagtggtggatttccaaatgatcaaggcttcggtggtggtggtggtggtgggtttaacccatttgatatctttgggagcttcaatggcgatatttttaacatgtaccggcaagatattggaggtcaagatgtcaaggttttgcttgatctttctttcatggaagctgttcaaggatgctccaaaactgtgacttttcaaaccgagatggcttgtaatacttgtggtggacaaggtgttcctcctggtaccaaacgagagaaatgcaaagcctgtaatggctctgggatgacctcactgaggaggggtatgttaagcatccaaacaacttgccagaagtgtggtggagctggtcaaacgttctcaagtatttgcaaatcctgtagaggggctagagtggttcgaggacagaagtcagtgaaagtcactattgatccaggggttgacaatagtgatacattaaaggtggcaagggtgggtggggctgatcctgaaggtgaccagcctggagatctttatgttactctcaaggttcgtgaagatcctgtgttccgcagagaaggatcggatattcatgtggacgcggttctcagtgttacccaggccattcttggaggaaccattcaagttccaaccctcactggtgatgttgtcgtgaaggtccgtcctggaacccaacctggtcacaaagtagtgctaagaaataaaggaattagagcaagaaagtcgactaaatttggggatcagtatgtgcatttcaacgtcagcatccctgcaaatataacgcagagacagcgtgaactgcttgaggaatttagtaaagcagaacaaggtgaatacgagcagcgcacagcaactggatcttcccagtgaaaaatgcaaatgctgctataagcctaaaaagctattgttgtggctgtatcaatggatatataatcaatcagacaatgattgagattatattgcgtaggattagtggagagtattgtctgggttttacttttaactaattctacaatgctacaagataaaaagaaggaaaagcctgtgctgttattgccttctcaaagttatagaacttttgatacggttc

SEQ ID NO: 1405 - protein, 456 aa, Arabidopsis thaliana
MVPSNGAKVLRLLSRRCLSSSLIQDLANQKLRGVCIGSYRRLNTSVGNHANVIGDYASKSGHDRKWINFGGFNTNFGSTRSFHGTGSSFMSAKDYYSVLGVSKNAQEGEIKKAYYGLAKKLHPDMNKDDPEAETKFQEVSKAYEILKDKEKRDLYDQVGHEAFEQNASGGFPNDQGFGGGGGGGFNPFDIFGSFNGDIFNMYRQDIGGQDVKVLLDLSFMEAVQGCSKTVTFQTEMACNTCGGQGVPPGTKREKCKACNGSGMTSLRRGMLSIQTTCQKCGGAGQTFSSICKSCRGARVVRGQKSVKVTIDPGVDNSDTLKVARVGGADPEGDQPGDLYVTLKVREDPVFRREGSDIHVDAVLSVTQAILGGTIQVPTLTGDVVVKVRPGTQPGHKVVLRNKGIRARKSTKFGDQYVHFNVSIPANITQRQRELLEEFSKAEQGEYEQRTATGSSQ

SEQ ID NO: 1406 - protein, 367 aa, Arabidopsis thaliana
MSAKDYYSVLGVSKNAQEGEIKKAYYGLAKKLHPDMNKDDPEAETKFQEVSKAYEILKDKEKRDLYDQVGHEAFEQNASGGFPNDQGFGGGGGGGFNPFDIFGSFNGDIFNMYRQDIGGQDVKVLLDLSFMEAVQGCSKTVTFQTEMACNTCGGQGVPPGTKREKCKACNGSGMTSLRRGMLSIQTTCQKCGGAGQTFSSICKSCRGARVVRGQKSVKVTIDPGVDNSDTLKVARVGGADPEGDQPGDLYVTLKVREDPVFRREGSDIHVDAVLSVTQAILGGTIQVPTLTGDVVVKVRPGTQPGHKVVLRNKGIRARKSTKFGDQYVHFNVSIPANITQRQRELLEEFSKAEQGEYEQRTATGSSQ

SEQ ID NO: 1407 - protein, 332 aa, Arabidopsis thaliana
MNKDDPEAETKFQEVSKAYEILKDKEKRDLYDQVGHEAFEQNASGGFPNDQGFGGGGGGGFNPFDIFGSFNGDIFNMYRQDIGGQDVKVLLDLSFMEAVQGCSKTVTFQTEMACNTCGGQGVPPGTKREKCKACNGSGMTSLRRGMLSIQTTCQKCGGAGQTFSSICKSCRGARVVRGQKSVKVTIDPGVDNSDTLKVARVGGADPEGDQPGDLYVTLKVREDPVFRREGSDIHVDAVLSVTQAILGGTIQVPTLTGDVVVKVRPGTQPGHKVVLRNKGIRARKSTKFGDQYVHFNVSIPANITQRQRELLEEFSKAEQGEYEQRTATGSSQ

SEQ ID NO: 1408 - DNA, 1158 bp, Arabidopsis thaliana
attcagtcggaccaacttgtgaccgaagaaagcaaattgagactacgcaccaactagtcctttggtttgtatcttaagataaaggtttcttttatggacggttcttcgtttctcgacatctctctcgatctcaacaccaatcctttctccgcaaaacttccgaagaaggaggtctcagttttggcttctactcacttaaagaggaaatggttggagcaagacgagagcgcaagtgagttacgagaggagctaaacagagttaattcagagaacaagaagctaacagagatgttagctagagtctgtgagagctacaacgaactacataatcatttggagaagcttcagagtcgccagagccctgaaatcgagcagaccgatataccgataaagaaaagaaaacaagacccggatgagttcttaggctttcctattggactcagtagtggaaaaactgagaacagctccagcaacgaagatcatcatcatcatcatcagcaacatgagcagaaaaatcagcttctttcatgtaaaagaccagtcactgatagcttcaacaaagcaaaagtttcgactgtctacgtgcctactgaaacatcggacacaagcttgacagttaaagatggatttcaatggaggaaatacggacaaaaggttacaagagacaacccgtcacctagagcttactttagatgctcgtttgcaccgtcttgtccagtaaaaaagaaggtacaacgcagcgcagaggatccatcgttacttgtagcgacatacgaagggacgcataaccacttgggtccaaatgcttctgaaggggatgctacaagccagggtgggtcaagcacagtgactttggatctggttaatggctgtcatagactagcgttggagaaaaacgaaaggaataatacgatgcaagaggttctgattcaacaaatggcgtcatcgttaacaaaagattcgaaatttacagctgctcttgctgctgctatatctgggaggttaatggagcaatctagaacatgaacgtttttagtgaatgtattgtttttgtttgtttagaatgattcttcgttttcgaattgtgtctttcgattaggagataaaagatgtatataaatattataagtagatgaagaaatcgtataagtattcgag

SEQ ID NO: 1409 - protein, 310 aa, Arabidopsis thaliana
MDGSSFLDISLDLNTNPFSAKLPKKEVSVLASTHLKRKWLEQDESASELREELNRVNSENKKLTEMLARVCESYNELHNHLEKLQSRQSPEIEQTDIPIKKRKQDPDEFLGFPIGLSSGKTENSSSNEDHHHHHQQHEQKNQLLSCKRPVTDSFNKAKVSTVYVPTETSDTSLTVKDGFQWRKYGQKVTRDNPSPRAYFRCSFAPSCPVKKKVQRSAEDPSLLVATYEGTHNHLGPNASEGDATSQGGSSTVTLDLVNGCHRLALEKNERNNTMQEVLIQQMASSLTKDSKFTAALAAAISGRLMEQSRT

SEQ ID NO: 1410 - protein, 245 aa, Arabidopsis thaliana
MLARVCESYNELHNHLEKLQSRQSPEIEQTDIPIKKRKQDPDEFLGFPIGLSSGKTENSSSNEDHHHHHQQHEQKNQLLSCKRPVTDSFNKAKVSTVYVPTETSDTSLTVKDGFQWRKYGQKVTRDNPSPRAYFRCSFAPSCPVKKKVQRSAEDPSLLVATYEGTHNHLGPNASEGDATSQGGSSTVTLDLVNGCHRLALEKNERNNTMQEVLIQQMASSLTKDSKFTAALAAAISGRLMEQSRT

SEQ ID NO: 1411 - DNA, 3083 bp, Arabidopsis thaliana
acttgacaaaattgaaaaacgcgtctccgagaggaaaatttagagaaaagcttctcgcgatcgcatcgggctcgtagatcgatctcctcctccatccaatcttccgttttcgtattcaccgtccggtaagaccttccggtacttgtgaatcggagaagaggaaggagaaaaattatcgcgttcctggaaattgaatttctagggtttcgtttttttctgaattattctgattctgatttcgtcaagggtgtttttcttaattggttgattgatcgtctttctagttcaattgttgaaaagtaattgaacatctattgaaatctgcttctcgtgatttgattctgggtttcgttgattggtttttttcgaggggtttgtttgttttatccttttttatttctataagatcaatttctcattgagaagaatacgatggcagcagggggtgttgatgtttccagaagttccgttgctgtcaaaaaagactacgacttttacaggaatggttctcgtgatgtgtatgttcgacagagtggtagagatgacgagaggcgtcaaatcaaaaggcctagtgaccatgatctcaggaggaatgatgggcgtcaccgatcacggttggcatatgagaaaggggaactacgggaggaagcagaggttcagagaccctctgagaaaaggaggaagttttcacccatcgtgtggaatgcagaaaaagtgggtagagctccatctagggagaagaccaagtctcctttccctgttccgactacaactgtgatatccaatcaggctgttgctggtaagactacttcaaacgatcaagtgaatgccttgatgtcgccagaacctagttatcttgctccagtgcagccttcagaagccctgctggctgtgaaacatcctgttgatgatttggaggagggtcagttggaggaagaacaggtgatgcaggaggatgtaaaggagggtctgttggaggaagaacaagtgatgcaggaaccaaatataaagacatctaggtgggggacaggtttgacttccccaaaggaggagttaatatctgttaacgtttccaagactaatagatggaacaggagcagtttgacaccggagtgcgaggaagtaatggtgtctgaagaacagcagtgctattcgtctggatctggcagtggacatctcagcgtagagaagcttagtgcagatggaaattctggtcgtgagtattatagttctgatcatgatgagttagaacatgaagatcaagattctttaactccgggagagatgaacatgatgtttgggagcaggtctgtgaatgaatttcagaagctaaacaagataaatgaaggaacatatggaattgtttacaaagcaagggatgagaaaacaaaagagattgttgcgctcaaaaagatcaagatgaaggaagataggttcgaagaagagtatggattccctttgacatcattgagggaaattaacatacttttgtcatgcaatcaccctgcgattgtgaacgtgaaggaggttgtggttggagggaaaaacgataatgatgtttatatggtcatggaacacttagaacacgacctgaggggagtaatggatagaaggaaggaaccttttagcactagcgaagtcaagtgcttgatgatgcagctgttggatggtttgaaatacctccacacaaattggattatccacagggatctgaagccatctaatcttctgatgaacaattgtggggagttaaaaatatgtgattttgggatggcgcgccagtatgggagccctatcaagccttacacccagatggttattacccagtggtacaggccacctgaacttcttctaggagcaaaagagtactctacagcagttgatatgtggtcagtgggttgcattatggctgaactgttgtctcaaaagcctttgttcccgggtaagagtgagcttgaccaacttcagaagatctttgcggtccttggaacaccaaacgaagcaatatggcctgggttctcatcatttccgaatgctaaagccaagtttcctacacagccttacaatatgttacgtaagaagtttccagctatttcatttgtaggtggtcaaattctttctgaacgtggatttgatttgctgaacagtctactaactttggaccctgagaaacgtctaacagtggaagatgctctcaaccatggttggttccatgaagtcccgttaccaaaatccaaagatttcatgccgacatatcctccaaagcggtaactgagaaaaaacgtgctatcatttggacgagaggatgtcaacaaatacacagggaagtcgactggtcgtattttggtattttcctttttactcaaaagacttgctttcatctattcttaactcagttgcgttgctttgttgcctggagattcagggcattctagtgtaccatttattcggattcatgtgtaaatatgagtggtccgtaaaactgaaaggtgtgtttctctcttttcgttaggaccctaatgttattgctatcaagagttgtacacactattgactcacatgctttaatggaagagatctcagtattcactttctctctctagtaattgggttgggatggttattgtttatgtcctcatatttcttctgtgcattgtttttattcacgaggtaaacgcaaagagtttatcacaaacgtgagaatggaagttgacatcagtaagtttattttgattacttatttaccacgctctgttatcaatgttggtttgttgttcgacgtccctttgtctttgaggtgctcgtatttggtctgttggcagtgagaaaaagatgattcatgatgagtttctgtggacataggaggtatggcagtggtttttttcatgttaatccgagaattaagggatttgggataaaaagctatatagaaagaagctaaaataagtttgtcttcaacactataaccctttgtcctcctttctttttaacttctgtaaacagctaagctaaatcaagttcatttcaataacgaataaactagaatcagcattacctttgacgaggccataaacagaaaggag

SEQ ID NO: 1412 - protein, 612 aa, Arabidopsis thaliana
MAAGGVDVSRSSVAVKKDYDFYRNGSRDVYVRQSGRDDERRQIKRPSDHDLRRNDGRHRSRLAYEKGELREEAEVQRPSEKRRKFSPIVWNAEKVGRAPSREKTKSPFPVPTTTVISNQAVAGKTTSNDQVNALMSPEPSYLAPVQPSEALLAVKHPVDDLEEGQLEEEQVMQEDVKEGLLEEEQVMQEPNIKTSRWGTGLTSPKEELISVNVSKTNRWNRSSLTPECEEVMVSEEQQCYSSGSGSGHLSVEKLSADGNSGREYYSSDHDELEHEDQDSLTPGEMNMMFGSRSVNEFQKLNKINEGTYGIVYKARDEKTKEIVALKKIKMKEDRFEEEYGFPLTSLREINILLSCNHPAIVNVKEVVVGGKNDNDVYMVMEHLEHDLRGVMDRRKEPFSTSEVKCLMMQLLDGLKYLHTNWIIHRDLKPSNLLMNNCGELKICDFGMARQYGSPIKPYTQMVITQWYRPPELLLGAKEYSTAVDMWSVGCIMAELLSQKPLFPGKSELDQLQKIFAVLGTPNEAIWPGFSSFPNAKAKFPTQPYNMLRKKFPAISFVGGQILSERGFDLLNSLLTLDPEKRLTVEDALNHGWFHEVPLPKSKDFMPTYPPKR

SEQ ID NO: 1413 - protein, 478 aa, Arabidopsis thaliana
MSPEPSYLAPVQPSEALLAVKHPVDDLEEGQLEEEQVMQEDVKEGLLEEEQVMQEPNIKTSRWGTGLTSPKEELISVNVSKTNRWNRSSLTPECEEVMVSEEQQCYSSGSGSGHLSVEKLSADGNSGREYYSSDHDELEHEDQDSLTPGEMNMMFGSRSVNEFQKLNKINEGTYGIVYKARDEKTKEIVALKKIKMKEDRFEEEYGFPLTSLREINILLSCNHPAIVNVKEVVVGGKNDNDVYMVMEHLEHDLRGVMDRRKEPFSTSEVKCLMMQLLDGLKYLHTNWIIHRDLKPSNLLMNNCGELKICDFGMARQYGSPIKPYTQMVITQWYRPPELLLGAKEYSTAVDMWSVGCIMAELLSQKPLFPGKSELDQLQKIFAVLGTPNEAIWPGFSSFPNAKAKFPTQPYNMLRKKFPAISFVGGQILSERGFDLLNSLLTLDPEKRLTVEDALNHGWFHEVPLPKSKDFMPTYPPKR

SEQ ID NO: 1414 - protein, 441 aa, Arabidopsis thaliana
MQEDVKEGLLEEEQVMQEPNIKTSRWGTGLTSPKEELISVNVSKTNRWNRSSLTPECEEVMVSEEQQCYSSGSGSGHLSVEKLSADGNSGREYYSSDHDELEHEDQDSLTPGEMNMMFGSRSVNEFQKLNKINEGTYGIVYKARDEKTKEIVALKKIKMKEDRFEEEYGFPLTSLREINILLSCNHPAIVNVKEVVVGGKNDNDVYMVMEHLEHDLRGVMDRRKEPFSTSEVKCLMMQLLDGLKYLHTNWIIHRDLKPSNLLMNNCGELKICDFGMARQYGSPIKPYTQMVITQWYRPPELLLGAKEYSTAVDMWSVGCIMAELLSQKPLFPGKSELDQLQKIFAVLGTPNEAIWPGFSSFPNAKAKFPTQPYNMLRKKFPAISFVGGQILSERGFDLLNSLLTLDPEKRLTVEDALNHGWFHEVPLPKSKDFMPTYPPKR

SEQ ID NO: 1415 - DNA, 701 bp, Arabidopsis thaliana
atgccattgccacacactcactcactcgtagtttcgacgctatctctagaacattccgataaaccacaaagaagaagcagagcaaaagtaaagaagaagaagaaaacaaacatgtcgtggcagacttacgtcgacgatcacttaatgtgcgatgttgcaggcaaccgcctcaccgccgccgcaattctcggccaagacggtagcgtctgggctcagagcaacaattttcctcaggtgaagcctgaggaaattcagggcatcaaagacgattttactacacctggaacacttgccccaacaggattgttccttggtggtaacaagtacatggtaatccaaggagagcctaatgccgtcattcgaggaaagaagggagctggtggtgttaccatcaagaagaccaccttagctttggtatttggtatctatgatgaaccaatgactcctggacaatgcaatatggttgtggagaatctcggtgagtacctgattgaatcggggctctgaaacttaagctgctactatattcatattgctttatgtaatcttctagttgtgtcgtgagagaaaaactattcgataatccgactgtgtattacctaccttgtgatggatcttggggttgtatgattatttctaaaacaatatagtattgtctacatttgtgtcgagttgaaatatttaatgaatggcagtgtggt

SEQ ID NO: 1416 - protein, 168 aa, Arabidopsis thaliana
MPLPHTHSLVVSTLSLEHSDKPQRRSRAKVKKKKKTNMSWQTYVDDHLMCDVAGNRLTAAAILGQDGSVWAQSNNFPQVKPEEIQGIKDDFTTPGTLAPTGLFLGGNKYMVIQGEPNAVIRGKKGAGGVTIKKTTLALVFGIYDEPMTPGQCNMVVENLGEYLIESGL

SEQ ID NO: 1417 - protein, 131 aa, Arabidopsis thaliana
MSWQTYVDDHLMCDVAGNRLTAAAILGQDGSVWAQSNNFPQVKPEEIQGIKDDFTTPGTLAPTGLFLGGNKYMVIQGEPNAVIRGKKGAGGVTIKKTTLALVFGIYDEPMTPGQCNMVVENLGEYLIESGL

SEQ ID NO: 1418 - protein, 120 aa, Arabidopsis thaliana
MCDVAGNRLTAAAILGQDGSVWAQSNNFPQVKPEEIQGIKDDFTTPGTLAPTGLFLGGNKYMVIQGEPNAVIRGKKGAGGVTIKKTTLALVFGIYDEPMTPGQCNMVVENLGEYLIESGL

SEQ ID NO: 1419 - DNA, 976 bp, Arabidopsis thaliana
aacaactccacgacgagaggaaaaaaaaaaaactcagagagacaaatctaaatggcgatgattacgcgcaacaccgccacgcgcctccctctcctcctccaatctcaacgcgccgtcgccgctgcctcggtctctcacctccacacatcccttcccgctctctctccctccacatcaccgacttcctacaccagacctggtcctccttcgacctcccctcctcctcctggtctctctaaagcggccgaatttgtgatctccaaggtcgatgatctcatgaactgggctcgtaccggatcgatctggcctatgacctttggtctcgcttgctgcgccgtcgaaatgatgcataccggtgctgctcgctacgatctcgatcgattcggtatcatcttcaggcctagtcctcgccagtctgattgtatgattgtcgccggtactcttaccaataagatggctccggctcttcgcaaggtttatgaccagatgcctgagccaaggtgggtgatttcaatgggaagttgtgccaatggaggtggatactatcactactcctactcggtggttcgaggatgtgacagaattgtcccagtcgacatatacgtcccggggtgcccaccaaccgctgaggctttgctctatggactactccagcttcagaagaaaatcaacaggcgcaaggatttcttgcattggtggaacaagtgagcttcgaacccgtcctccaatcgtgaaagggacttttttcagacagttttaccaaagtttggggataataaatcgtggacgtttcattgcatatttctttgtggtggagatgccatgtaaaggagtgtgtttctaagtttgttgtggaaacttaataaacttaagatgtttgttgtctgagttcttttatgggctcttttattatatatctctctctaccagttttcagctacatgctgactattgctaaatacctacatatatttat

SEQ ID NO: 1420 - protein, 218 aa, Arabidopsis thaliana
MAMITRNTATRLPLLLQSQRAVAAASVSHLHTSLPALSPSTSPTSYTRPGPPSTSPPPPGLSKAAEFVISKVDDLMNWARTGSIWPMTFGLACCAVEMMHTGAARYDLDRFGIIFRPSPRQSDCMIVAGTLTNKMAPALRKVYDQMPEPRWVISMGSCANGGGYYHYSYSVVRGCDRIVPVDIYVPGCPPTAEALLYGLLQLQKKINRRKDFLHWWNK

SEQ ID NO: 1421 - protein, 216 aa, Arabidopsis thaliana
MITRNTATRLPLLLQSQRAVAAASVSHLHTSLPALSPSTSPTSYTRPGPPSTSPPPPGLSKAAEFVISKVDDLMNWARTGSIWPMTFGLACCAVEMMHTGAARYDLDRFGIIFRPSPRQSDCMIVAGTLTNKMAPALRKVYDQMPEPRWVISMGSCANGGGYYHYSYSVVRGCDRIVPVDIYVPGCPPTAEALLYGLLQLQKKINRRKDFLHWWNK

SEQ ID NO: 1422 - protein, 143 aa, Arabidopsis thaliana
MNWARTGSIWPMTFGLACCAVEMMHTGAARYDLDRFGIIFRPSPRQSDCMIVAGTLTNKMAPALRKVYDQMPEPRWVISMGSCANGGGYYHYSYSVVRGCDRIVPVDIYVPGCPPTAEALLYGLLQLQKKINRRKDFLHWWNK

SEQ ID NO: 1423 - DNA, 727 bp, Arabidopsis thaliana
atgaggcctttaaactctttagattcaaatgttatatttttgtgtctagtaggcctgttacggatccggatatccgggtttttttggagtatccggatccggtccgtaaccgccggatccgtagatataatattcggctccgcatccgtttgctacggatattcggaatccgggtatccgcaaaaaaaatcgtcggatccgttttttttctatggggatcaaatccgattctcttttacaacccagatcgaatccaccaatgtttgtcataagctttcgcaatctacaaaccaccatttccaagccatggctttcttctattcttcacctttaacgacattgattcagttcccaattaagcgacgagcgcacgatctcgagtcggaggtaagtggtgaccattgacgagaagttcttgcggggctaacgactgaggagaagatctcgttcatggattcatggcaatggagatgagatagagacggtgaaggagatggtttggagacggtgaaagagatggtgatggaagaacggcggcagagagaagacaagttgtgaaaccctaatgacgtgtcccaccaaatcacaaacaaactcaaattatgtcactttgtcgtattgggcttatatgggctataagattaataatatcagtatgtattaagcccatgatatcaatgtataagcttaattggtgtaatatcatattactagcggatttttgtcc

SEQ ID NO: 1424 - protein, 134 aa, Arabidopsis thaliana
MRPLNSLDSNVIFLCLVGLLRIRISGFFWSIRIRSVTAGSVDIIFGSASVCYGYSESGYPQKKSSDPFFFYGDQIRFSFTTQIESTNVCHKLSQSTNHHFQAMAFFYSSPLTTLIQFPIKRRAHDLESEVSGDH

SEQ ID NO: 1425 - protein, 89 aa, Arabidopsis thaliana
EAFKLFRFKCYIFVSSRPVTDPDIRVFLEYPDPVRNRRIRRYNIRLRIRLLRIFGIRVSAKKIVGSVFFLWGSNPILFYNPDRIHQCLS

SEQ ID NO: 1426 - DNA, 756 bp, Arabidopsis thaliana
aaaacaactctgcttcactctctatctttcttaagtaaacaaatctttagagagagtggaaaaaatgaattcgaagatcatcgaagctttcttcatcgttgctctcttcactacctcatgcctcgctcaagctccagctccttctccaaccaccaccgtcactcctcctcccgttgccactccaccacccgccgcaactcccgctccgaccaccactccaccacctgccgtctcccctgcccccacctcttctcctccgtcttcagctccttctccgtcgtctgatgcccctaccgcttctccacctgcaccggaaggtcccggagttagccccggcgaactagccccgacaccttccgatgcttccgctcctccacctaacgccgctttaaccaacaaagctttcgtcgtcggttcacttgtcgccgcgattatttacgccgtcgtgttggcttaggatctcattgtttacatcttgaaaacattatgttttacattttatagtttcggtgttaatttcgataatttgattgatttttcgttattcgattgtttacggtggagttaaaatgagatgttgacacgtgtaacttttcatggtttgttgtctacgtggaatatgttgtgtaaatccagtaataggctaataaaattactttattattcgttctcacatgtttcatcactcttttaataggaataaaatgtaagaactcaaaaagaaaattcagaatttttataaaatcaggtattctc

SEQ ID NO: 1427 - protein, 130 aa, Arabidopsis thaliana
MNSKIIEAFFIVALFTTSCLAQAPAPSPTTTVTPPPVATPPPAATPAPTTTPPPAVSPAPTSSPPSSAPSPSSDAPTASPPAPEGPGVSPGELAPTPSDASAPPPNAALTNKAFVVGSLVAAIIYAVVLA

SEQ ID NO: 1428 - protein, 94 aa, Arabidopsis thaliana
KTTLLHSLSFLSKQIFRESGKNEFEDHRSFLHRCSLHYLMPRSSSSSFSNHHRHSSSRCHSTTRRNSRSDHHSTTCRLPCPHLFSSVFSSFSVV

SEQ ID NO: 1429 - DNA, 4901 bp, Arabidopsis thaliana
gacaacagtaaaccaaacttctcacaaaaactccttggaaagttttcaccttctttcagccctaaccccatcgtctctctctcgcgaccgcctcatctctctctgtctggatcaatctcgctctctctttctctcggctacgtcgctgtttctcgtttcgtgatccgtagctgtctccgctactaccttaatcagcgagcttcttccggtggaataatcttcggataggaggaatcggagaattcttctaattgggtgtctgggttggattggaatacgtaattctgttgggtgttccaatttcgcgttcaaaattagggtttatagaggtctcgcctatggctcctgggcgtaaaagaggagcgagcaaggccaaagccaaagggcagttggttctcggtgatctggttctcgccaaagtcaaaggcttccctgcttggcctgccaagatcagccggcctgaagattgggatcgtgcgccagacccaaagaagtactttgttcagttctttggaacagaggaaatagcttttgttgcgccacctgatatccaagccttcactagtgaggcaaagagcaaactattagcaagatgtcaaggtaaaactgtcaagtactttgcacaagctgtagagcaaatctgcactgcatttgaagggttgcagaatcacaagtcaaatgctttgggcgatgaggattctctggatgctactgaacctggtttgacaaaggctgagatagtggatggaacagatcatattgtcattgagtctgagagaactgataactttaattttagggtggatccttgcttccccaaattagatgagaataatggtgaggagagaaaggctgagataaggaagctagattcatcttcatttctggaatcaaaggtcaaaaccacatcccctgttagcgagtcactggagcatagttcatttgaccctaaaataaagaaagaagattttgataaaggaactgacggtagtgcttgcaatgaacattttggtaatggccaaaagaagctggctaacggtaagagaattaagaaggaagcaggtggctctgatagaaaaggtgaagatacagttcatcgagacaaaagcaataactcacatgtgcctggtggtcgaactgccagtggtaactctgattccaaaaaatcgaaaggtctgttgacagagaaaaccagctccaaagtgtctgctgataagcatgaaaattcacctggcatcaaggttggggtttccggaaagaaaaggaggcttgaaagtgaacaaggtaagcttgcaccaagagtagatgaaagctcacgtgctgctaaaaagccgcgatgtgaaagtgcagacaataaagtaaagtgtgaaattgatgatggatctgattctactgggactgtatcagatattaagcgtgaaattgttttaggattaggtgctcgcggtggaaattttcaatatgataaagaagcagttgcatatacaaagcgccagagacagacaatggagcatgctacctctccttctttttctgggtctcgtgataaatctgggaaaggtcatctggaacagaaagaccgttcctctcctgttcgtaatgttaaggctccagctgcacagtcgctgaaaaaacggagggctgtttgtatctacgacgaagatgatgatgaagatccaaaaaccccattacatggaaaaccagccattgttccccaagcagcatctgttttgactgatggtcctaaaagggctaatgtgtgtcacagtacttctacaaaagctaagatatctgctggatctacagagagtactgaagtaagaaagttccctctgcgtaaacattgtgaggatgcatcacgtgtattaccaagcaatgcggagaattctactaatagcttacctgtggtaaaacccattaatgaattgccgccaaaggatgtcaaacagatcttgcaatctccgaagatgtcccctcagctggttttaactaacaagcacgttgcaggacagcataaagttgtaaaatcatcggtgaaagtttctggtgttgtgatggcaaagaagcctcaaagtgattcttgtaaggaggcggttgcgggatctgacaaaataagctcttctcagtctcagccagcaaatcagagacacaaatcagcttcagttggagagaggctaacagtggtttcaaaagctgcatcacgtttgaatgactctggttcaagagacatgtctgaggacttgtctgctgctatgcttgacctcaatagagaaaaggggagtgctacatttaccagtgcaaagaccccagattcggctgcatctatgaaggatctaattgctgctgcgcaggcaaaaagaaaacttgcacatacacaaaattcaatttttgggaatttgaaccctagtttcttgagcatcagtgatacacaggggaggagccatagcccatttatggttcagaatgcttcagcttctgctgccatctcaatgccgttagttgttcaaggtcatcatcaacaaggttcttctccgtcaaatcatgggcatcagtccttatcaagaaatcagattgagactgatgataatgaagagagaagacttagttcagggcataagtcagttggaggttcacttagttgtagcactgaggctgctatttctcgggatgcttttgaaggcatgttagagaccttatcaagaaccagggaaagtattggacgtgcaactcgcctagcaattgattgtgccaagtatgggcttgctagtgaggtggtggaacttctcatacgaaagttggaaagtgaatctcacttccatcgtaaagtggacttgttctttctcgtcgactctatcacccagcattcgcacagccaaaaaggtattgctggtgcttcttacgttcctactgtgcaagctgctttgccacgtcttttaggtgccgctgctcctccagggactggtgctagtgataaccgtcgtaaatgtctgaaggtcctgaagttgtggcttgaaaggaaagttttccctgaatctcttctgcgtcgttatattgatgatattagagcttctggtgatgatgcaactggtgggttttccctgcgacgtccttctagatctgagcgtgctgtagatgatcctatcagggaaatggaagggatgcttgttgatgagtatggcagcaatgcaacgtttcagctgccagggtttttttcatctcataattttgaagatgatgaagaagatgacgatcttccaacatcacaaaaagaaaaaagcacatctgcgggggaacgtgtcagtgctttagacgacctggaaatacatgatacctcgagtgataaatgccatcgagttttggaggatgtcgatcatgaacttgaaatggaagatgtatcaggccagcggaaagatgtagcaccttcctctttctgtgagaataagacaaaggagcaatcactggatgttatggaacctgttgcagaaaaatcaaccgagttcaatcctcttccagaggattctcctccgctacctcaggaatcacctccccctctccctcctctaccaccttctcccccacctccatcccctcctctcccgccatcatctctgccaccaccgcctcccgcagcgctgttcccacctcttccaccacctccgtctcagcctcctccaccaccactttcacctccaccttcaccgccgcctccacctccaccgccttcacaatcattaacaactcaactctccatagctagccatcatcagataccatttcaaccaggatttcctcccccaacatatcctttatcgcatcaaacatacccaggatctatgcagcaagaccgctctagtattttcaccggtgatcaaattgtccaggggcctggaaattcttcacgtggaggtcttgttgagggcgctggaaaacccgaatattttgtgcagcagtcctccagtttttcaccagcaggagtgtgcagctccagggagccttcatcatttacttcctccagacaactagaatttgggaacagcgatgtacttttcaatcctgaagcttcttcacagaaccatcggtttcagccgagcacccctctgtcccaaagacctatggttaggttgccttcagcaccgtccagtcatttttcgtatccaagccatattcaatcacaatctcagcattcctacactcatccttaccctttcccacctcaacgtgatgatgcacggcgatacagaaatgaggaaccatggcggattccttcaagtggacatagtgcagaaaatcagaatggtgcctggatacatggaagaaattcacatccaggccttcctagagtcacagacagtttctttcggccacctccagaacgtccaccttcagggacaatgaactatcagccttctgctgctagtaacttacaagctgtccctgcaattccaggtcatactgctccccagatgctaccgtctcggccagatatacctaccgtgaattgttggaggccagcttgaagtgaaggtagaattttgttggcctgctcctgttagtatcaatggaaaagaagctgctagtgtctcattaacaaggttaatcctctaggtttggttttctaaatactaaagtcaagtcttttatcagtgttgtcatcaaacagttacagttatactactttctcttccatggaggcctttttcggatatatccacttccagaggcacaaaaactactgcaggcttttgccaggattctgtatattgtatttttttcctgacaaatgtatctgtggatcatattcttaacagtataggttctttttttattggttagtacttcagttcctgtaattatgccaatcacaatttgctcaaagcttttactggaatgatttgatctcc

SEQ ID NO: 1430 - protein, 1392 aa, Arabidopsis thaliana
MAPGRKRGASKAKAKGQLVLGDLVLAKVKGFPAWPAKISRPEDWDRAPDPKKYFVQFFGTEEIAFVAPPDIQAFTSEAKSKLLARCQGKTVKYFAQAVEQICTAFEGLQNHKSNALGDEDSLDATEPGLTKAEIVDGTDHIVIESERTDNFNFRVDPCFPKLDENNGEERKAEIRKLDSSSFLESKVKTTSPVSESLEHSSFDPKIKKEDFDKGTDGSACNEHFGNGQKKLANGKRIKKEAGGSDRKGEDTVHRDKSNNSHVPGGRTASGNSDSKKSKGLLTEKTSSKVSADKHENSPGIKVGVSGKKRRLESEQGKLAPRVDESSRAAKKPRCESADNKVKCEIDDGSDSTGTVSDIKREIVLGLGARGGNFQYDKEAVAYTKRQRQTMEHATSPSFSGSRDKSGKGHLEQKDRSSPVRNVKAPAAQSLKKRRAVCIYDEDDDEDPKTPLHGKPAIVPQAASVLTDGPKRANVCHSTSTKAKISAGSTESTEVRKFPLRKHCEDASRVLPSNAENSTNSLPVVKPINELPPKDVKQILQSPKMSPQLVLTNKHVAGQHKVVKSSVKVSGVVMAKKPQSDSCKEAVAGSDKISSSQSQPANQRHKSASVGERLTVVSKAASRLNDSGSRDMSEDLSAAMLDLNREKGSATFTSAKTPDSAASMKDLIAAAQAKRKLAHTQNSIFGNLNPSFLSISDTQGRSHSPFMVQNASASAAISMPLVVQGHHQQGSSPSNHGHQSLSRNQIETDDNEERRLSSGHKSVGGSLSCSTEAAISRDAFEGMLETLSRTRESIGRATRLAIDCAKYGLASEVVELLIRKLESESHFHRKVDLFFLVDSITQHSHSQKGIAGASYVPTVQAALPRLLGAAAPPGTGASDNRRKCLKVLKLWLERKVFPESLLRRYIDDIRASGDDATGGFSLRRPSRSERAVDDPIREMEGMLVDEYGSNATFQLPGFFSSHNFEDDEEDDDLPTSQKEKSTSAGERVSALDDLEIHDTSSDKCHRVLEDVDHELEMEDVSGQRKDVAPSSFCENKTKEQSLDVMEPVAEKSTEFNPLPEDSPPLPQESPPPLPPLPPSPPPPSPPLPPSSLPPPPPAALFPPLPPPPSQPPPPPLSPPPSPPPPPPPPSQSLTTQLSIASHHQIPFQPGFPPPTYPLSHQTYPGSMQQDRSSIFTGDQIVQGPGNSSRGGLVEGAGKPEYFVQQSSSFSPAGVCSSREPSSFTSSRQLEFGNSDVLFNPEASSQNHRFQPSTPLSQRPMVRLPSAPSSHFSYPSHIQSQSQHSYTHPYPFPPQRDDARRYRNEEPWRIPSSGHSAENQNGAWIHGRNSHPGLPRVTDSFFRPPPERPPSGTMNYQPSAASNLQAVPAIPGHTAPQMLPSRPDIPTVNCWRPA

SEQ ID NO: 1431 - protein, 1003 aa, Arabidopsis thaliana
MEHATSPSFSGSRDKSGKGHLEQKDRSSPVRNVKAPAAQSLKKRRAVCIYDEDDDEDPKTPLHGKPAIVPQAASVLTDGPKRANVCHSTSTKAKISAGSTESTEVRKFPLRKHCEDASRVLPSNAENSTNSLPVVKPINELPPKDVKQILQSPKMSPQLVLTNKHVAGQHKVVKSSVKVSGVVMAKKPQSDSCKEAVAGSDKISSSQSQPANQRHKSASVGERLTVVSKAASRLNDSGSRDMSEDLSAAMLDLNREKGSATFTSAKTPDSAASMKDLIAAAQAKRKLAHTQNSIFGNLNPSFLSISDTQGRSHSPFMVQNASASAAISMPLVVQGHHQQGSSPSNHGHQSLSRNQIETDDNEERRLSSGHKSVGGSLSCSTEAAISRDAFEGMLETLSRTRESIGRATRLAIDCAKYGLASEVVELLIRKLESESHFHRKVDLFFLVDSITQHSHSQKGIAGASYVPTVQAALPRLLGAAAPPGTGASDNRRKCLKVLKLWLERKVFPESLLRRYIDDIRASGDDATGGFSLRRPSRSERAVDDPIREMEGMLVDEYGSNATFQLPGFFSSHNFEDDEEDDDLPTSQKEKSTSAGERVSALDDLEIHDTSSDKCHRVLEDVDHELEMEDVSGQRKDVAPSSFCENKTKEQSLDVMEPVAEKSTEFNPLPEDSPPLPQESPPPLPPLPPSPPPPSPPLPPSSLPPPPPAALFPPLPPPPSQPPPPPLSPPPSPPPPPPPPSQSLTTQLSIASHHQIPFQPGFPPPTYPLSHQTYPGSMQQDRSSIFTGDQIVQGPGNSSRGGLVEGAGKPEYFVQQSSSFSPAGVCSSREPSSFTSSRQLEFGNSDVLFNPEASSQNHRFQPSTPLSQRPMVRLPSAPSSHFSYPSHIQSQSQHSYTHPYPFPPQRDDARRYRNEEPWRIPSSGHSAENQNGAWIHGRNSHPGLPRVTDSFFRPPPERPPSGTMNYQPSAASNLQAVPAIPGHTAPQMLPSRPDIPTVNCWRPA

SEQ ID NO: 1432 - protein, 849 aa, Arabidopsis thaliana
MSPQLVLTNKHVAGQHKVVKSSVKVSGVVMAKKPQSDSCKEAVAGSDKISSSQSQPANQRHKSASVGERLTVVSKAASRLNDSGSRDMSEDLSAAMLDLNREKGSATFTSAKTPDSAASMKDLIAAAQAKRKLAHTQNSIFGNLNPSFLSISDTQGRSHSPFMVQNASASAAISMPLVVQGHHQQGSSPSNHGHQSLSRNQIETDDNEERRLSSGHKSVGGSLSCSTEAAISRDAFEGMLETLSRTRESIGRATRLAIDCAKYGLASEVVELLIRKLESESHFHRKVDLFFLVDSITQHSHSQKGIAGASYVPTVQAALPRLLGAAAPPGTGASDNRRKCLKVLKLWLERKVFPESLLRRYIDDIRASGDDATGGFSLRRPSRSERAVDDPIREMEGMLVDEYGSNATFQLPGFFSSHNFEDDEEDDDLPTSQKEKSTSAGERVSALDDLEIHDTSSDKCHRVLEDVDHELEMEDVSGQRKDVAPSSFCENKTKEQSLDVMEPVAEKSTEFNPLPEDSPPLPQESPPPLPPLPPSPPPPSPPLPPSSLPPPPPAALFPPLPPPPSQPPPPPLSPPPSPPPPPPPPSQSLTTQLSIASHHQIPFQPGFPPPTYPLSHQTYPGSMQQDRSSIFTGDQIVQGPGNSSRGGLVEGAGKPEYFVQQSSSFSPAGVCSSREPSSFTSSRQLEFGNSDVLFNPEASSQNHRFQPSTPLSQRPMVRLPSAPSSHFSYPSHIQSQSQHSYTHPYPFPPQRDDARRYRNEEPWRIPSSGHSAENQNGAWIHGRNSHPGLPRVTDSFFRPPPERPPSGTMNYQPSAASNLQAVPAIPGHTAPQMLPSRPDIPTVNCWRPA

SEQ ID NO: 1433 - DNA, 2458 bp, Arabidopsis thaliana
tctcaaatctcaaatctcaaattttttattaaacgcctacatatattactcacacttgttttcagatcataaagttttttcttggatttatatataatgcactaatacatacacacccacatgcttacacacatgttcgacctgtaatcagtaaaagaaacatcagagaggaagagaaggagaagaaaagatggagatgggtcgtctggtcttcgggttgtgtttgattcttattgtgggtacgtttcttgaattctccggcggtgctacggcggcgaagggagtaacgtacgacggacggtctttgataatcgatggacagaggaagcttctcttctccggttccatccactatcctcgcagcacacccgagatgtggccgtctctgataaaaaagacaaaggaaggaggcatcgatgtgatccaaacgtacgttttctggaacctccatgagcctaagcttggacagtatgattttagtggaagaaacgatttagtgaagtttattaaagaaattagatcacaaggtctctatgtctgtctacgtattggacccttcatcgaagccgagtggaattacgggggattgccattttggttacgggatgtacccggtatggtataccgaaccgacaatgagcccttcaagttccacatgcaaaaattcaccgctaagatcgtagatttgatgaaatctgagggcttatatgcttctcaaggaggtccaattattctttctcagatcgagaacgagtatgcaaacgtggagggggctttccatgagaaaggagcatcgtacatcaagtgggcaggtcaaatggcggtcgggcttaagaccggagtgccatggatcatgtgcaagtcgcccgacgctcctgatcccgtgatcaatacctgcaacgggatgaaatgcggcgagacttttcctggaccaaactcacccaataagccgaaaatgtggactgaggattggacttcattctttcaggtttatggaaaagagccttatattagatctgctgaggatattgctttccatgccgctcttttcgttgcaaaaaatggaagttacatcaactattacatgtaccatggtggaacaaactttggaaggacttcatcttcgtatttcattacaggatactatgatcaagctcctctcgacgaatacggtcttttaagacagcctaagtacggtcatttgaaggagcttcacgctgcgataaaatcctctgcaaatcctctgcttcaaggaaagcaaacgattctctccttgggaccaatgcaacaagcttatgtctttgaagacgcgaacaatggatgcgttgcgtttctggtaaacaatgacgctaaagccagtcaaatacaattcagaaacaatgcgtatagcttgagtcccaagtcaattggtattcttcagaactgcaaaaacctaatttatgaaactgcaaaagtgaatgtgaagatgaatacgagagttacaacgccggttcaagtgttcaacgttcccgataactggaatttgtttagagaaacaatccctgcattcccaggcacatctttgaagacaaatgctttgttggaacacactaatttgacaaaggacaaaactgattatctttggtacacttcaagctttaagctggattcaccctgcacgaacccgtctatctacacagaatcatcaggacatgttgtccacgtgttcgtcaacaatgcactagcaggatctggacatggaagcagagacataagggtagttaaactacaagctccggttagcttaatcaatggacaaaacaatatatcgatcctcagcggcatggttggtctaccggactctggagcttacatggagaggagatcttatggactaaccaaagtacaaattagctgtggcgggacaaaacccatcgatttgagtagatctcaatggggttactcggtgggtttgcttggagagaaagttaggttatatcaatggaagaatttaaatagagtgaagtggagtatgaataaagctggactaattaagaaccgccccctcgcttggtacaagacaacgtttgatgggccgaatggagatgggcccgtgggcctacacatgtcgagtatgggtaaaggagaaatttgggtgaatggtgaaagcattggtcgttattgggtctcgtttctcacccctgctggacaaccttctcaatctatatatcatattcctcgggcgttcttaaaaccatctggaaatttattggtggtatttgaagaggaaggtggtgatcctcttgggatatctttgaatacaatatcggttgttggttcgagtcaagctcaatctcaattctcctgaagattattttttaaaaaatggtttttgggtaattgggggtgttttataaaccaaacaatacattatattgaaatgatacaatacacaaattgaatgaaatatacaggtttc

SEQ ID NO: 1434 - protein, 718 aa, Arabidopsis thaliana
MEMGRLVFGLCLILIVGTFLEFSGGATAAKGVTYDGRSLIIDGQRKLLFSGSIHYPRSTPEMWPSLIKKTKEGGIDVIQTYVFWNLHEPKLGQYDFSGRNDLVKFIKEIRSQGLYVCLRIGPFIEAEWNYGGLPFWLRDVPGMVYRTDNEPFKFHMQKFTAKIVDLMKSEGLYASQGGPIILSQIENEYANVEGAFHEKGASYIKWAGQMAVGLKTGVPWIMCKSPDAPDPVINTCNGMKCGETFPGPNSPNKPKMWTEDWTSFFQVYGKEPYIRSAEDIAFHAALFVAKNGSYINYYMYHGGTNFGRTSSSYFITGYYDQAPLDEYGLLRQPKYGHLKELHAAIKSSANPLLQGKQTILSLGPMQQAYVFEDANNGCVAFLVNNDAKASQIQFRNNAYSLSPKSIGILQNCKNLIYETAKVNVKMNTRVTTPVQVFNVPDNWNLFRETIPAFPGTSLKTNALLEHTNLTKDKTDYLWYTSSFKLDSPCTNPSIYTESSGHVVHVFVNNALAGSGHGSRDIRVVKLQAPVSLINGQNNISILSGMVGLPDSGAYMERRSYGLTKVQISCGGTKPIDLSRSQWGYSVGLLGEKVRLYQWKNLNRVKWSMNKAGLIKNRPLAWYKTTFDGPNGDGPVGLHMSSMGKGEIWVNGESIGRYWVSFLTPAGQPSQSIYHIPRAFLKPSGNLLVVFEEEGGDPLGISLNTISVVGSSQAQSQFS

SEQ ID NO: 1435 - protein, 716 aa, Arabidopsis thaliana
MGRLVFGLCLILIVGTFLEFSGGATAAKGVTYDGRSLIIDGQRKLLFSGSIHYPRSTPEMWPSLIKKTKEGGIDVIQTYVFWNLHEPKLGQYDFSGRNDLVKFIKEIRSQGLYVCLRIGPFIEAEWNYGGLPFWLRDVPGMVYRTDNEPFKFHMQKFTAKIVDLMKSEGLYASQGGPIILSQIENEYANVEGAFHEKGASYIKWAGQMAVGLKTGVPWIMCKSPDAPDPVINTCNGMKCGETFPGPNSPNKPKMWTEDWTSFFQVYGKEPYIRSAEDIAFHAALFVAKNGSYINYYMYHGGTNFGRTSSSYFITGYYDQAPLDEYGLLRQPKYGHLKELHAAIKSSANPLLQGKQTILSLGPMQQAYVFEDANNGCVAFLVNNDAKASQIQFRNNAYSLSPKSIGILQNCKNLIYETAKVNVKMNTRVTTPVQVFNVPDNWNLFRETIPAFPGTSLKTNALLEHTNLTKDKTDYLWYTSSFKLDSPCTNPSIYTESSGHVVHVFVNNALAGSGHGSRDIRVVKLQAPVSLINGQNNISILSGMVGLPDSGAYMERRSYGLTKVQISCGGTKPIDLSRSQWGYSVGLLGEKVRLYQWKNLNRVKWSMNKAGLIKNRPLAWYKTTFDGPNGDGPVGLHMSSMGKGEIWVNGESIGRYWVSFLTPAGQPSQSIYHIPRAFLKPSGNLLVVFEEEGGDPLGISLNTISVVGSSQAQSQFS

SEQ ID NO: 1436 - protein, 657 aa, Arabidopsis thaliana
MWPSLIKKTKEGGIDVIQTYVFWNLHEPKLGQYDFSGRNDLVKFIKEIRSQGLYVCLRIGPFIEAEWNYGGLPFWLRDVPGMVYRTDNEPFKFHMQKFTAKIVDLMKSEGLYASQGGPIILSQIENEYANVEGAFHEKGASYIKWAGQMAVGLKTGVPWIMCKSPDAPDPVINTCNGMKCGETFPGPNSPNKPKMWTEDWTSFFQVYGKEPYIRSAEDIAFHAALFVAKNGSYINYYMYHGGTNFGRTSSSYFITGYYDQAPLDEYGLLRQPKYGHLKELHAAIKSSANPLLQGKQTILSLGPMQQAYVFEDANNGCVAFLVNNDAKASQIQFRNNAYSLSPKSIGILQNCKNLIYETAKVNVKMNTRVTTPVQVFNVPDNWNLFRETIPAFPGTSLKTNALLEHTNLTKDKTDYLWYTSSFKLDSPCTNPSIYTESSGHVVHVFVNNALAGSGHGSRDIRVVKLQAPVSLINGQNNISILSGMVGLPDSGAYMERRSYGLTKVQISCGGTKPIDLSRSQWGYSVGLLGEKVRLYQWKNLNRVKWSMNKAGLIKNRPLAWYKTTFDGPNGDGPVGLHMSSMGKGEIWVNGESIGRYWVSFLTPAGQPSQSIYHIPRAFLKPSGNLLVVFEEEGGDPLGISLNTISVVGSSQAQSQFS

SEQ ID NO: 1437 - DNA, 1755 bp, Arabidopsis thaliana
atgtctaaagttttttcgtgtttgtctggtgtgaagctcatacatcaagtgggtcaaaagagggggaggctgacaatggacgaggaggatgaacaaccaacaaagaagatcagattgggcatgccagcaacacaatggatcagcatttacagtgctcacagaccaatgaaacaacgatatcattataatgttactgatacaaggcttgcacaacacattgaaaaaggaaatgaggatgggttatttatcagcagtgtggcttcttgcacggatctctgggctttgatcatggatgcaggaagtggctttacggatcaagtttaccagttatcaccaagctttctccacaaggaatggattatggaacaatgggaaaagaattactatattacagcagtggcaggagcaaatagtgggaactcattcgtggttatgtcaaaagggacccagtatttacaacaatcctacaaagtcagtgattcttttcccttcaagtggataaataaaaagtggagggaagggttttatgttacatcaatggcaactgctggaagcaaatggggaattgtaatgtctcgtggggcttctttttctgatcaggttatagaactagattttctataccctagtgaaggtatacatcgtcgatgggaaaatggctacagaattacatcagttgctgcaacttgggatcaggctgcctttgttcttagtgtgccaagaaggaagcttaccgatgagacacaggagactcttagaacctctgcttttcctagtaatcatgtcaaggaaaaatggggcaagaatctttacattgcatcgatttgttatggtcgaactgtgtcatgaagttctaaattttttgttaggatgcatctcaatttagctttaccatatatccgctaagaaaaaagaatcgttgtgatcagtgatggtatgggcttagggaaccttttagcaaggttgaatgaatgtttgccaaacttcagtgatgctgcaatgtagtgtatcgactgcaaaaacttatcctacttttcaacttggatgacttgtttgatgaaagaagttaaaatttctttagattaaaaaggtcttgtattatcttcaactaatgttgatttattagaagtgaacgccacagtttgattttatgtggctagtaatgtgatttttattgtgtttcttgcatgccgttttccgttaatcgtgtaggaaaccagggagggtctttgaaccttttggtcttcttctttagctgaaaaatgaggtgatgctggtttaccaatgttcctttggaaatgtaatgatttgttttctgagatccagagattgacagttcgaagttatatgggttgattttccctactttgttgcagaagttcttcactattgtaaactaacgtagtgaaactttaagtgcagaatacggggcatgtcggtacaactgttgctgcctgtatccaagttgaatggtagttatattttcttcgtgctcaaatgtattgtttgaagcatgaagaagaaatgtgggaaagactaaagaaaatctgaatggcaatagcaaatctttgacaatggtgatttgttgcaacagttgcagtatacaagttcacggtggtaaacaagtcgagcattctgattctattctctttcttgattttctgcccttgttttgttccaaatgtctctctttgaaaaataaaagttgtgaagttgcattggccatttatttgggcatctataataataatgttg

SEQ ID NO: 1438 - protein, 282 aa, Arabidopsis thaliana
MSKVFSCLSGVKLIHQVGQKRGRLTMDEEDEQPTKKIRLGMPATQWISIYSAHRPMKQRYHYNVTDTRLAQHIEKGNEDGLFISSVASCTDLWALIMDAGSGFTDQVYQLSPSFLHKEWIMEQWEKNYYITAVAGANSGNSFVVMSKGTQYLQQSYKVSDSFPFKWINKKWREGFYVTSMATAGSKWGIVMSRGASFSDQVIELDFLYPSEGIHRRWENGYRITSVAATWDQAAFVLSVPRRKLTDETQETLRTSAFPSNHVKEKWGKNLYIASICYGRTVS

SEQ ID NO: 1439 - protein, 257 aa, Arabidopsis thaliana
MDEEDEQPTKKIRLGMPATQWISIYSAHRPMKQRYHYNVTDTRLAQHIEKGNEDGLFISSVASCTDLWALIMDAGSGFTDQVYQLSPSFLHKEWIMEQWEKNYYITAVAGANSGNSFVVMSKGTQYLQQSYKVSDSFPFKWINKKWREGFYVTSMATAGSKWGIVMSRGASFSDQVIELDFLYPSEGIHRRWENGYRITSVAATWDQAAFVLSVPRRKLTDETQETLRTSAFPSNHVKEKWGKNLYIASICYGRTVS

SEQ ID NO: 1440 - protein, 242 aa, Arabidopsis thaliana
MPATQWISIYSAHRPMKQRYHYNVTDTRLAQHIEKGNEDGLFISSVASCTDLWALIMDAGSGFTDQVYQLSPSFLHKEWIMEQWEKNYYITAVAGANSGNSFVVMSKGTQYLQQSYKVSDSFPFKWINKKWREGFYVTSMATAGSKWGIVMSRGASFSDQVIELDFLYPSEGIHRRWENGYRITSVAATWDQAAFVLSVPRRKLTDETQETLRTSAFPSNHVKEKWGKNLYIASICYGRTVS

SEQ ID NO: 1441 - DNA, 944 bp, Arabidopsis thaliana
aagatcatcaagaccaatctcgtagacttcttgtctctgtccaaaaaccataaagaaactttattggcataaaaagagaacaatctcgtagattcttgagcttctgacaatggattctttgaagaatagaacattgcttaaggtcattgttcttggagatagcggggtaggcaaaacttcattgatgaatcaatatgtgtacaagaaatttaacaagcaatataaggctacgatcggagcagatttcgtgaccaaagagcttcatatagatgaaaaatctgtcactttacagatatgggataccgctggacaagagagatttcaaagtctaggggccgcgttctatagaggtgctgattgttgcgttcttgtctacgacgtgaacaatctcaaatcttttgaaactctcaataactggcacacagagttcctcaaacaggcaaatcctatggaaccggagacatttccctttgttttgatcgggaacaagaccgatgtagatggcggaaacagccgagttgtttcaaataagagagccatcgagtggtgtggctcaaagggaaacataccgtaccatgaaacctctgcgaaggaagataccaatatcgatgaagcttttttgagtgttgcacacattgctctctctaatgaacgtaaacaaagcaatgacatatatcctagaggccagtatcatgactctgttacggatattattgatccagatcagtcaagaggttgtgcttgctgattccatgtttgacatatctgatcaaataatatcgagtcccagctctttcatttgcagtccttgtttttggtaactttttttctatttattggtttaataatatcatttatagaggtttattaacgacaaaaaacagttgatacatactactttctgagtgttttgattcatgtaaagcattaattaatttctattt

SEQ ID NO: 1442 - protein, 212 aa, Arabidopsis thaliana
MDSLKNRTLLKVIVLGDSGVGKTSLMNQYVYKKFNKQYKATIGADFVTKELHIDEKSVTLQIWDTAGQERFQSLGAAFYRGADCCVLVYDVNNLKSFETLNNWHTEFLKQANPMEPETFPFVLIGNKTDVDGGNSRVVSNKRAIEWCGSKGNIPYHETSAKEDTNIDEAFLSVAHIALSNERKQSNDIYPRGQYHDSVTDIIDPDQSRGCAC

SEQ ID NO: 1443 - protein, 187 aa, Arabidopsis thaliana
MNQYVYKKFNKQYKATIGADFVTKELHIDEKSVTLQIWDTAGQERFQSLGAAFYRGADCCVLVYDVNNLKSFETLNNWHTEFLKQANPMEPETFPFVLIGNKTDVDGGNSRVVSNKRAIEWCGSKGNIPYHETSAKEDTNIDEAFLSVAHIALSNERKQSNDIYPRGQYHDSVTDIIDPDQSRGCAC

SEQ ID NO: 1444 - DNA, 909 bp, Arabidopsis thaliana
tcatcgctgtctggaacaacacacacacacaaagaaaaacgtaattgccaaagctatggagaagaagttgttggatataactcggactgactcggctgagaaaaagcgagtcagagacgagtcattcgacgaagcggttcttgactcgccggaggtgaagaggttgagagatgatttattcgatgtcctggatgactcggatcctgaaccagtgagtcaagatctcgactcggttatgaaaagtttcgaagacgagttatcaacggtcaccaccacgacggcgcaaggttcctctaccgccggcgaaactcagcctgatctcggatatcttcttgaagcttccgatgatgagcttggtttaccaccacctccatcgatttctccggttcccgtcgcgaaggaggaggtaacgacggagacggtaacggatttggtacgagcgtcttctgattcgtcaggaatcgacgagatttggggatttgaagatcacgtgtcgaattacggtggtttagattttggttccggcgtcggagatggtggagattacgtggctgttgaggggttgtttgaattttccgacgattgttttgactccggcgatctgttttcgtggcggtcggagtcgttaccggcggaataaataaataacaaactttttttttaattaggtgggaaatgaaaacgatatcgttttgttaaagcgtttggctctccctcgcttttttttttaacccgatggttaatatctattaactaaaattattaggatttaggaaaagttaaatattttgtaagggtaatttgctagattagtattagcgaattcgtttgtttgttcttccagatctttttttcatagcttttgttaatgtgaaatttcagaatgaaaaactctctttgtcagttttt

SEQ ID NO: 1445 - protein, 212 aa, Arabidopsis thaliana
HRCLEQHTHTKKNVIAKAMEKKLLDITRTDSAEKKRVRDESFDEAVLDSPEVKRLRDDLFDVLDDSDPEPVSQDLDSVMKSFEDELSTVTTTTAQGSSTAGETQPDLGYLLEASDDELGLPPPPSISPVPVAKEEVTTETVTDLVRASSDSSGIDEIWGFEDHVSNYGGLDFGSGVGDGGDYVAVEGLFEFSDDCFDSGDLFSWRSESLPAE

SEQ ID NO: 1446 - protein, 194 aa, Arabidopsis thaliana
MEKKLLDITRTDSAEKKRVRDESFDEAVLDSPEVKRLRDDLFDVLDDSDPEPVSQDLDSVMKSFEDELSTVTTTTAQGSSTAGETQPDLGYLLEASDDELGLPPPPSISPVPVAKEEVTTETVTDLVRASSDSSGIDEIWGFEDHVSNYGGLDFGSGVGDGGDYVAVEGLFEFSDDCFDSGDLFSWRSESLPAE

SEQ ID NO: 1447 - protein, 134 aa, Arabidopsis thaliana
MKSFEDELSTVTTTTAQGSSTAGETQPDLGYLLEASDDELGLPPPPSISPVPVAKEEVTTETVTDLVRASSDSSGIDEIWGFEDHVSNYGGLDFGSGVGDGGDYVAVEGLFEFSDDCFDSGDLFSWRSESLPAE

SEQ ID NO: 1448 - DNA, 912 bp, Arabidopsis thaliana
aatttttcatcttcttcgagtgattagtacagattagggttttattcgttattattgtctatattactccttgattgtggtcgatgacctcgctacttcttctcagaacgcttccgcttctccgcaacggatttctcaaccatcgtcatcaagttggtatcgtagctggtggaattctcagtcaccgtcggcgtttgttgtgttctcttgctgatagaccacagttttacgagaataatgattctgtttctccggtggagggatccggcgcggcggcgatgaacgtgacatcgcctgttgttgataatagctggcgttatgaagatcctgattatcggaaatggaagaatctagaggctgagattcttcgagatattgaacctatttctcttctcgctaaagaaattcttcattccgataggtatttggatggagaacgcttagattttgaggatgagaaaattgtcatggaaaagcttcttccttatcacccatattccaaagacaaaattggttgtggtcttgattttataatggttgatcggcatccacaattcaggcactcaagatgcctctttgttgtgagaacagatggtggatggatagatttctcgtaccaaaagtgtcttcgagcctatgttcgagataagtacccgtctcacgctgagaggtttattcgtgaacattttaagcgtgctagtagctaaaaatctgtataactgtcccactcatcatcacagcaaattctcataaatttttagctgaaataacacaatcagctatgaagctttgttgtacaaaatttataaattgctcaatctattggaagacttgaatgagttaggaaaatagtagttggttcagactgcagaacaatcaatttttgagaccgaaagtaattctagttatggc

SEQ ID NO: 1449 - protein, 207 aa, Arabidopsis thaliana
MTSLLLLRTLPLLRNGFLNHRHQVGIVAGGILSHRRRLLCSLADRPQFYENNDSVSPVEGSGAAAMNVTSPVVDNSWRYEDPDYRKWKNLEAEILRDIEPISLLAKEILHSDRYLDGERLDFEDEKIVMEKLLPYHPYSKDKIGCGLDFIMVDRHPQFRHSRCLFVVRTDGGWIDFSYQKCLRAYVRDKYPSHAERFIREHFKRASS

SEQ ID NO: 1450 - protein, 142 aa, Arabidopsis thaliana
MNVTSPVVDNSWRYEDPDYRKWKNLEAEILRDIEPISLLAKEILHSDRYLDGERLDFEDEKIVMEKLLPYHPYSKDKIGCGLDFIMVDRHPQFRHSRCLFVVRTDGGWIDFSYQKCLRAYVRDKYPSHAERFIREHFKRASS

SEQ ID NO: 1451 - DNA, 984 bp, Arabidopsis thaliana
atgattgcatctccgtctctgatacccaattcgaaaaccacttctcagcctccgccgattcagacctcgcatattcagcttcccagtctttctctctgcgtcgttctagggtttttgttactctttgcttcgaagatgggaaaggcaaagaaacctcaaaagtttgctgtcgtgaagaagatgattagccacaaagctttgaagcattacaaggaagaggttctgaatccaaacaagaaggacctcacggaacttccgagaaacgtaccgagtgttcctgcagggcttttcttttcttacaactctacattggttcctccttaccgtgttttggtggatactaacttcatcaacttctctatccagaataagatcgatcttgagaagggaatgagagactgtctgtacgcaaattgcactccttgtatcacggattgtgtcatggctgagttagagaagttaggtcagaagtatcgtgtagctctaaggattgcgaaagatcctcacttcgaaagactaccttgtatacacaaagggacatatgctgatgactgtctcgttgacagagttactcagcataaatgcttcatagtggctacatgtgatagagacttaaagcgaaggattcgaaagattcctggtgtgcccatcatgtatgtgactaatcgcaagtactcaatagagaagttgcctgaagctacacttggtggagctccaaggtactgataatttattagagaccttatgaattccatgaagccctgaagcctcaagcctgagttggtatcggtttacgcgctgaatcaactgagttggaatggctatgttgtgagccattttgttctctatgttggtttctctgttgttaatttgatacaatgttaattaataactcaacagaaatctttattaagcttttacattctaaaaacacattcttaatctattacacagttttgttaatgatagaccaaaatcatgtct

SEQ ID NO: 1452 - protein, 241 aa, Arabidopsis thaliana
MIASPSLIPNSKTTSQPPPIQTSHIQLPSLSLCVVLGFLLLFASKMGKAKKPQKFAVVKKMISHKALKHYKEEVLNPNKKDLTELPRNVPSVPAGLFFSYNSTLVPPYRVLVDTNFINFSIQNKIDLEKGMRDCLYANCTPCITDCVMAELEKLGQKYRVALRIAKDPHFERLPCIHKGTYADDCLVDRVTQHKCFIVATCDRDLKRRIRKIPGVPIMYVTNRKYSIEKLPEATLGGAPRY

SEQ ID NO: 1453 - protein, 196 aa, Arabidopsis thaliana
MGKAKKPQKFAVVKKMISHKALKHYKEEVLNPNKKDLTELPRNVPSVPAGLFFSYNSTLVPPYRVLVDTNFINFSIQNKIDLEKGMRDCLYANCTPCITDCVMAELEKLGQKYRVALRIAKDPHFERLPCIHKGTYADDCLVDRVTQHKCFIVATCDRDLKRRIRKIPGVPIMYVTNRKYSIEKLPEATLGGAPRY

SEQ ID NO: 1454 - protein, 181 aa, Arabidopsis thaliana
MISHKALKHYKEEVLNPNKKDLTELPRNVPSVPAGLFFSYNSTLVPPYRVLVDTNFINFSIQNKIDLEKGMRDCLYANCTPCITDCVMAELEKLGQKYRVALRIAKDPHFERLPCIHKGTYADDCLVDRVTQHKCFIVATCDRDLKRRIRKIPGVPIMYVTNRKYSIEKLPEATLGGAPRY

SEQ ID NO: 1455 - DNA, 762 bp, Arabidopsis thaliana
agtgtagcgtcgcatcatacactccttcggttcccgacgaatcgctgcttttttctctctctctctccgtcgctgaaaaatgtcggcaagacctgaaggaagtccgccggaggttacgctcgagacctccatgggtcctttcaccgtcgagatgtattacaaacactccccgagaacttgccggaacttccttgagctatcccggagaggttactatgacaacgttctgtttcacagaatcgtcaaggatttcattgtgcaaggtggggatcctacaggaactggaagaggtggtgaatccatttatggttcgaagtttgaggatgagataaacaaagagttgaagcacacaggagccggaattttatcaatggcgaacgctggtcctaatacaaatgggagtcaatttttcatcaccttagccccacaaccgtccttggatggaaaacacacaatatttggtagagtgtgccgaggcatggaggtgatcaagaggctcggtagtgtccaaaccgataacaccgacaggccgatccatgaagtgaagattctaaggaccaaagtgatcgattgattgggtcagaggagtttttgtcaaggagaagaagaagcatttagtaaaccgtttatgacatgaagaactataactctgtgtactgatcccttgatactattgtagactggtttttgtctaagtcttgactctactttgatggaaaaaaatgattgaaatacgttaaatcactctctatttctttttgc

SEQ ID NO: 1456 - protein, 164 aa, Arabidopsis thaliana
MSARPEGSPPEVTLETSMGPFTVEMYYKHSPRTCRNFLELSRRGYYDNVLFHRIVKDFIVQGGDPTGTGRGGESIYGSKFEDEINKELKHTGAGILSMANAGPNTNGSQFFITLAPQPSLDGKHTIFGRVCRGMEVIKRLGSVQTDNTDRPIHEVKILRTKVID

SEQ ID NO: 1457 - protein, 147 aa, Arabidopsis thaliana
MGPFTVEMYYKHSPRTCRNFLELSRRGYYDNVLFHRIVKDFIVQGGDPTGTGRGGESIYGSKFEDEINKELKHTGAGILSMANAGPNTNGSQFFITLAPQPSLDGKHTIFGRVCRGMEVIKRLGSVQTDNTDRPIHEVKILRTKVID

SEQ ID NO: 1458 - protein, 140 aa, Arabidopsis thaliana
MYYKHSPRTCRNFLELSRRGYYDNVLFHRIVKDFIVQGGDPTGTGRGGESIYGSKFEDEINKELKHTGAGILSMANAGPNTNGSQFFITLAPQPSLDGKHTIFGRVCRGMEVIKRLGSVQTDNTDRPIHEVKILRTKVID

SEQ ID NO: 1459 - DNA, 848 bp, Arabidopsis thaliana
aattcggatagcttgcaaataacgctgacaaaaaaagaaacagtgaagaagaaaaaaaagaaggtcattttcattttctccatttgatttttgccgaccggagaaaatatcttcttgccgtcttcttcttcatttcaccaggaacttttatttgaaatcggtttgatttagccatggcaaacgcggcatcgggaatggctgtgcatgatgattgcaagctgaaatttatggaactgaaggcgaaaagaacattccgtaccatagtctacaagattgaggataagcaagtgattgtagagaaactcggtgaacctgaacaatcatatgatgactttgcagctagtcttccagctgatgattgccgatattgcatttacgatttcgactttgtcactgcggagaactgccagaagagcaagatcttcttcattgcatggtctccggacactgccaaagtgagagacaagatgatttacgcgagctctaaagataggttcaagagagaactagatggaattcaagtggaacttcaagctactgatccaacagaaatgggtcttgatgttttcaaaagccgcaccaactaagtaaaacaaaaccctgtaagggcatttgaataagtttggtttctggagtgaatatgtttcctctgactgttatgaaaactttttaacaccttcaacttcattctacttggtattattgtatgtctttgatgtgttatgtgtgccttgtgatggttttcaattagttttacatgtacaatacttgaaatcagattgttgctaggcttcaagccttgtctcagttatctatctgataatttattcgtatatgtttggagtcct

SEQ ID NO: 1460 - protein, 137 aa, Arabidopsis thaliana
MANAASGMAVHDDCKLKFMELKAKRTFRTIVYKIEDKQVIVEKLGEPEQSYDDFAASLPADDCRYCIYDFDFVTAENCQKSKIFFIAWSPDTAKVRDKMIYASSKDRFKRELDGIQVELQATDPTEMGLDVFKSRTN

SEQ ID NO: 1461 - protein, 130 aa, Arabidopsis thaliana
MAVHDDCKLKFMELKAKRTFRTIVYKIEDKQVIVEKLGEPEQSYDDFAASLPADDCRYCIYDFDFVTAENCQKSKIFFIAWSPDTAKVRDKMIYASSKDRFKRELDGIQVELQATDPTEMGLDVFKSRTN

SEQ ID NO: 1462 - protein, 119 aa, Arabidopsis thaliana
MELKAKRTFRTIVYKIEDKQVIVEKLGEPEQSYDDFAASLPADDCRYCIYDFDFVTAENCQKSKIFFIAWSPDTAKVRDKMIYASSKDRFKRELDGIQVELQATDPTEMGLDVFKSRTN

SEQ ID NO: 1463 - DNA, 1464 bp, Arabidopsis thaliana
tgaagggaaacaaaaataaattcctcgagagatagaagtaaaaaaaaaagaaggggattttcgcatttgccctgagcgaaagagagagaatgtatttgacgagttccaggagaaatcagagctagagaaatctagtggtaatggggagagaacttgtagacaaacacatggataagaaagcgaatagtttgacagctagctcgacgggatcttcagatgataataaagtcccaagtccgtctactaatgaagctgcagaggtgaaagaatgcaccgagcagaatttggttgcggatgatgctcgtttgaggcaacaagggataactgagacacctggatcccataaatcttctgttaaacctcgtgttactgcgaaaacaactgttccaaagccgttttccctgtcggctgaaaagcctagaagagcagcggttgataataattcattaggaaatggtgctagccataactcttcttcagcatcaagagtttcacagctaaactctcctttaccaactaggaggataccagatcataagatgcaccatgatgaagaagatagtttttctgttgcttcctcatcagctacatccataagaagttttaaacccaagataacgattggagttgctccaacatttagtagcacatcgcgactggagagacgaagagagttttaccagaagttagaggaaaaacagaaagcacttgaagcagagaaaagagaaaacgagaaaaggcttaaggaagagcaagaagcagtcactaagcaacttaggaagaacatggcttacaaagctaatccggtaccaagtttctaccaagagggtcctccaccgaaacaaccattgaaaaagtttccattgactcggcctaagtcaccaaaccttaaccgtagaaagagctgcagcgacacagttaacgcatcatatcaggaagtgaaggggaagcattgtgctcgacatcgtcacagtgtaggtggttgcaaggatgaagtcaaaacgaacagtgtcccaaggacaccaaatagcagcagcaaagatcagatgagaaagtccaaaaagggaacaccaaagtctgaagaagtacatgaaatgtttaatagtggccatgatggagagactggtgagaatggcgttggtgttgtggaggagtgaagcttcgcgtagttgtagtttcgttttgactaactttggtgaatgagaaaaacaagaaaaatggtgagaagcaactgcaaggagaagaacaggttttagagtgaaagaacaagtttaaagtttgtttgtttgtttgttgtctaatgttctgcagattgattgttctaaatttgattgctaaaatcagctgctctattttcgtatgatcttttcttatctgtttgacaattaatgtgaaatgtatattaaagttgttgttgtatggatcccaaattcccaattattataactagattaatggttaagc

SEQ ID NO: 1464 - protein, 338 aa, Arabidopsis thaliana
MGRELVDKHMDKKANSLTASSTGSSDDNKVPSPSTNEAAEVKECTEQNLVADDARLRQQGITETPGSHKSSVKPRVTAKTTVPKPFSLSAEKPRRAAVDNNSLGNGASHNSSSASRVSQLNSPLPTRRIPDHKMHHDEEDSFSVASSSATSIRSFKPKITIGVAPTFSSTSRLERRREFYQKLEEKQKALEAEKRENEKRLKEEQEAVTKQLRKNMAYKANPVPSFYQEGPPPKQPLKKFPLTRPKSPNLNRRKSCSDTVNASYQEVKGKHCARHRHSVGGCKDEVKTNSVPRTPNSSSKDQMRKSKKGTPKSEEVHEMFNSGHDGETGENGVGVVEE

SEQ ID NO: 1465 - protein, 329 aa, Arabidopsis thaliana
MDKKANSLTASSTGSSDDNKVPSPSTNEAAEVKECTEQNLVADDARLRQQGITETPGSHKSSVKPRVTAKTTVPKPFSLSAEKPRRAAVDNNSLGNGASHNSSSASRVSQLNSPLPTRRIPDHKMHHDEEDSFSVASSSATSIRSFKPKITIGVAPTFSSTSRLERRREFYQKLEEKQKALEAEKRENEKRLKEEQEAVTKQLRKNMAYKANPVPSFYQEGPPPKQPLKKFPLTRPKSPNLNRRKSCSDTVNASYQEVKGKHCARHRHSVGGCKDEVKTNSVPRTPNSSSKDQMRKSKKGTPKSEEVHEMFNSGHDGETGENGVGVVEE

SEQ ID NO: 1466 - protein, 205 aa, Arabidopsis thaliana
MHHDEEDSFSVASSSATSIRSFKPKITIGVAPTFSSTSRLERRREFYQKLEEKQKALEAEKRENEKRLKEEQEAVTKQLRKNMAYKANPVPSFYQEGPPPKQPLKKFPLTRPKSPNLNRRKSCSDTVNASYQEVKGKHCARHRHSVGGCKDEVKTNSVPRTPNSSSKDQMRKSKKGTPKSEEVHEMFNSGHDGETGENGVGVVEE

SEQ ID NO: 1467 - DNA, 750 bp, Arabidopsis thaliana
atctgaagcttctgcagtattcaaacaaataaaatatactgctttagctttggacacctcctcttactaatctctataactatatttaaaaagtagaaaataatggcacgtctatttgtcgtagttgcccttttggctttggccgtgggcaccgtattcgccgccgatgcaccttcagctgcacccaccgcctcaccaaccaaatccccaaccaaggctcctgccgctgcacccaaatcctccgccgccgcaccgaaagcatcatcccctgttgctgaggaacccacccctgaagacgactactctgcagccagccccagtgactccgccgaggcacccaccgtctcctccccacccgctcctacccccgaagccgatggtccctcctccgacggaccctcatctgatggacccgccgccgccgagtcacccaaaagtggcgccacgactaatgtgaagctctccatcgccggcactgtcgccgccgccggattcttcatcttctctctctaagttttgttttttaattaaacttgagacggaatcataagattcacattatgagatgaggccgtatctctttaactaactaactatactatatacagtgatttatattaatcaagagattgaatggagttattattattacgtaccgttgttgtactatgttttttttgattacgtaatttttgatgattgtgaacttattaatgtttatttagaaattaaatgaaaaacaaatttttc

SEQ ID NO: 1468 - protein, 136 aa, Arabidopsis thaliana
MARLFVVVALLALAVGTVFAADAPSAAPTASPTKSPTKAPAAAPKSSAAAPKASSPVAEEPTPEDDYSAASPSDSAEAPTVSSPPAPTPEADGPSSDGPSSDGPAAAESPKSGATTNVKLSIAGTVAAAGFFIFSL

SEQ ID NO: 1469 - protein, 96 aa, Arabidopsis thaliana
MHLQLHPPPHQPNPQPRLLPLHPNPPPPHRKHHPLLLRNPPLKTTTLQPAPVTPPRHPPSPPHPLLPPKPMVPPPTDPHLMDPPPPSHPKVAPRLM

SEQ ID NO: 1470 - DNA, 1273 bp, Arabidopsis thaliana
taagtgggtcaccaatgtagctgacaactataccatctatctgatccgatcgctcttataacataagcgtatgggataccattttctcggacaaagctgaaatccctaaagaaaaaacacttctccaaacttttcatctccgatatctctttaactaacatgtcgaataatcaagctttcatggaattgggatggagaaacgacgtcggatcacttgctgtgaaagatcagggcatgatgtcagaaagagcaagaagtgatgaagatcgtctaatcaacggtctaaaatggggctacggctactttgatcatgatcaaactgataattatcttcagattgttccagagattcataaagaagtagaaaatgcgaaggaggatttattggttgttgtccctgatgaacattctgaaactgatgatcatcatcatattaaagatttttcagagagatcagatcatcgattttatctgagaaacaaacatgagaaccccaaaaaacgtcgtatccaggtcttaagtagtgatgatgaatcggaggagtttacaagagaagttccttcagttactcgaaaaggttccaagagaagaagaagagacgagaagatgagtaataagatgcgtaagctacagcaactcgtacctaattgtcacaagacggacaaggtttcggttctcgacaagaccatagagtatatgaaaaaccttcaacttcaacttcagatgatgtcaacagtgggggtgaatccttattttcttccggcgacattaggatttggaatgcacaaccacatgctgacggcaatggcttcggctcacggcctaaatccggcgaatcacatgatgccatcgccgctaattccggcgttaaattggccattaccaccgtttactaatatttcattcccacattcatctagtcaatctctatttcttacaacatcatcaccagcttcttctcctcagtctcttcacggtttggttccttatttcccaagtttcttggatttttcttcccatgcgatgagaagactatgataagtaagtagctcgataaaagtttatgtgaaatgatcgttgactaattaagagagaaaagagttccaaattaggacagtttgtgtgaaccatttgtgtcatatacttttttttccgggtggttttgtatattaataataatcaataagttaaaactttttgtataaattcttgcatgtaacaattttttcatttatctgatattttgtaaaatatattgagacatgcttataag

SEQ ID NO: 1471 - protein, 292 aa, Arabidopsis thaliana
MSNNQAFMELGWRNDVGSLAVKDQGMMSERARSDEDRLINGLKWGYGYFDHDQTDNYLQIVPEIHKEVENAKEDLLVVVPDEHSETDDHHHIKDFSERSDHRFYLRNKHENPKKRRIQVLSSDDESEEFTREVPSVTRKGSKRRRRDEKMSNKMRKLQQLVPNCHKTDKVSVLDKTIEYMKNLQLQLQMMSTVGVNPYFLPATLGFGMHNHMLTAMASAHGLNPANHMMPSPLIPALNWPLPPFTNISFPHSSSQSLFLTTSSPASSPQSLHGLVPYFPSFLDFSSHAMRRL

SEQ ID NO: 1472 - protein, 285 aa, Arabidopsis thaliana
MELGWRNDVGSLAVKDQGMMSERARSDEDRLINGLKWGYGYFDHDQTDNYLQIVPEIHKEVENAKEDLLVVVPDEHSETDDHHHIKDFSERSDHRFYLRNKHENPKKRRIQVLSSDDESEEFTREVPSVTRKGSKRRRRDEKMSNKMRKLQQLVPNCHKTDKVSVLDKTIEYMKNLQLQLQMMSTVGVNPYFLPATLGFGMHNHMLTAMASAHGLNPANHMMPSPLIPALNWPLPPFTNISFPHSSSQSLFLTTSSPASSPQSLHGLVPYFPSFLDFSSHAMRRL

SEQ ID NO: 1473 - protein, 267 aa, Arabidopsis thaliana
MMSERARSDEDRLINGLKWGYGYFDHDQTDNYLQIVPEIHKEVENAKEDLLVVVPDEHSETDDHHHIKDFSERSDHRFYLRNKHENPKKRRIQVLSSDDESEEFTREVPSVTRKGSKRRRRDEKMSNKMRKLQQLVPNCHKTDKVSVLDKTIEYMKNLQLQLQMMSTVGVNPYFLPATLGFGMHNHMLTAMASAHGLNPANHMMPSPLIPALNWPLPPFTNISFPHSSSQSLFLTTSSPASSPQSLHGLVPYFPSFLDFSSHAMRRL

SEQ ID NO: 1474 - DNA, 1689 bp, Arabidopsis thaliana
cgatagaaatagaaggcgaagagataatttccaaaaacaagaaaaacctctaagctcaaaagatgttgttgagaacgatggcggcgacttccccgcggccaccaccgtcaacatccctaacatctcagcagccaccatcacccccctcacagcttcccctccgtacaatgccgggatcgtacggctggccgttggttggaccattatcggaccgtttagattacttctggttccaaggacccgataagtttttccggacaagagctgagaagtataagagcactgtgttccgtacaaatattcctccgacgtttcctttcttcggcaacgttaaccctaacatcgtcgccgttcttgacgtcaagtcttttagccatctttttgacatggatctagttgataaaagagatgttctcatcggagacttccggcctagccttgggttctacggcggcgttcgtgttggagtttatctcgacactactgagccaaagcacgccaagataaaaggtttcgctatggaaacactaaaacgaagctcaaaagtatggctacaagagcttcgttcaaacctaaacattttctggggaacaatcgaatccgaaatctccaaaaacggtgccgcttcatatatcttccctctccaacgttgcatcttcagtttcctctgcgcctctctcgccggcgttgacgcttccgtatcgccggacatcgctgagaacggttggaaaacaatcaatacttggcttgcgttgcaagttattcccactgctaaacttggcgtagttcctcagcctcttgaagagattttacttcatacttggccttatccttctctcttaatcgccggaaattacaaaaagctttacaatttcatcgacgagaacgccggagattgtctccggttaggtcaagaagaattcgggttgacccgagatgaggctattcaaaatcttctctttgttttaggttttaatgcctacgggggcttttccgtcttcttaccttctttgatcgggagaataaccggcgacaattccggtttacaggagaggattagaaccgaagtcaggagagtttgcggatccgggtcggatcttaatttcaagacggttaacgaaatggagctggttaaatccgtggtttacgaaacgctgcgttttagtcctccggttccgctgcaattcgcacgtgcgaggaaagattttcagataagttcacacgatgctgtttttgaggtcaagaaaggtgagcttctttgtggttatcagccgcttgtgatgagagacgctaatgtttttgacgaaccggaggaatttaaaccggaccggtatgtaggtgagaccgggtctgaattgctgaattatctctactggtctaacggtccacaaaccggtaccccgagcgcgtcgaacaaacagtgtgcagctaaggacattgtcactctcacggcttccttgctcgttgccgatttatttctccggtatgatacgattactggtgactccggttcaattaaagctgttgttaaagctaaataagttaaagattgattagtgtttaatgttatgtaatcaatcttcaacggtttcatttgttcggagtgtataaattatatgtaaactaaaataatccgaattgaaactcaaattgttatgttagatggtgttgctatgttagagagatttt

SEQ ID NO: 1475 - protein, 492 aa, Arabidopsis thaliana
MLLRTMAATSPRPPPSTSLTSQQPPSPPSQLPLRTMPGSYGWPLVGPLSDRLDYFWFQGPDKFFRTRAEKYKSTVFRTNIPPTFPFFGNVNPNIVAVLDVKSFSHLFDMDLVDKRDVLIGDFRPSLGFYGGVRVGVYLDTTEPKHAKIKGFAMETLKRSSKVWLQELRSNLNIFWGTIESEISKNGAASYIFPLQRCIFSFLCASLAGVDASVSPDIAENGWKTINTWLALQVIPTAKLGVVPQPLEEILLHTWPYPSLLIAGNYKKLYNFIDENAGDCLRLGQEEFGLTRDEAIQNLLFVLGFNAYGGFSVFLPSLIGRITGDNSGLQERIRTEVRRVCGSGSDLNFKTVNEMELVKSVVYETLRFSPPVPLQFARARKDFQISSHDAVFEVKKGELLCGYQPLVMRDANVFDEPEEFKPDRYVGETGSELLNYLYWSNGPQTGTPSASNKQCAAKDIVTLTASLLVADLFLRYDTITGDSGSIKAVVKAK

SEQ ID NO: 1476 - protein, 487 aa, Arabidopsis thaliana
MAATSPRPPPSTSLTSQQPPSPPSQLPLRTMPGSYGWPLVGPLSDRLDYFWFQGPDKFFRTRAEKYKSTVFRTNIPPTFPFFGNVNPNIVAVLDVKSFSHLFDMDLVDKRDVLIGDFRPSLGFYGGVRVGVYLDTTEPKHAKIKGFAMETLKRSSKVWLQELRSNLNIFWGTIESEISKNGAASYIFPLQRCIFSFLCASLAGVDASVSPDIAENGWKTINTWLALQVIPTAKLGVVPQPLEEILLHTWPYPSLLIAGNYKKLYNFIDENAGDCLRLGQEEFGLTRDEAIQNLLFVLGFNAYGGFSVFLPSLIGRITGDNSGLQERIRTEVRRVCGSGSDLNFKTVNEMELVKSVVYETLRFSPPVPLQFARARKDFQISSHDAVFEVKKGELLCGYQPLVMRDANVFDEPEEFKPDRYVGETGSELLNYLYWSNGPQTGTPSASNKQCAAKDIVTLTASLLVADLFLRYDTITGDSGSIKAVVKAK

SEQ ID NO: 1477 - protein, 457 aa, Arabidopsis thaliana
MPGSYGWPLVGPLSDRLDYFWFQGPDKFFRTRAEKYKSTVFRTNIPPTFPFFGNVNPNIVAVLDVKSFSHLFDMDLVDKRDVLIGDFRPSLGFYGGVRVGVYLDTTEPKHAKIKGFAMETLKRSSKVWLQELRSNLNIFWGTIESEISKNGAASYIFPLQRCIFSFLCASLAGVDASVSPDIAENGWKTINTWLALQVIPTAKLGVVPQPLEEILLHTWPYPSLLIAGNYKKLYNFIDENAGDCLRLGQEEFGLTRDEAIQNLLFVLGFNAYGGFSVFLPSLIGRITGDNSGLQERIRTEVRRVCGSGSDLNFKTVNEMELVKSVVYETLRFSPPVPLQFARARKDFQISSHDAVFEVKKGELLCGYQPLVMRDANVFDEPEEFKPDRYVGETGSELLNYLYWSNGPQTGTPSASNKQCAAKDIVTLTASLLVADLFLRYDTITGDSGSIKAVVKAK

SEQ ID NO: 1478 - DNA, 4288 bp, Arabidopsis thaliana
atcacgccgtttcaatgggcctttaatgggctctttttttcataaacccgttttgttttatcttttctcagtgtcggtaaaaactagaaagatccggtgattatttcatcatcggcgattatggaattattcgcattgttaattaaggtcgccggacttttggccactgtcaccgttggagccaacgtagtttcctactctcgtttccgtcgccagaatctcgcgaagtttcgctctccaatcgacgaatctaaagaagttctcgctgatttcaattccattgaacacgaggaaggaaaattcttctttgggttagctactgcacctgctcatgcggaggatgatttagatgatgcttggctccagtttgctaaagaaacaccatgttcagcagaagaagcagaggctgctgataagaaagctaggaggaagaaggttaagcttgctgtgggagctataaccaaaggcttggccaagaacactcatggcaaagaagataagaatgcagctgataagccaccctctaaaaatgttgccgcgtggcataacgctcctcacgcggaggacaggcttaaattttggtcagatcctgacaaagaagtgaagctagccaaagatactggcgttactgtctttaggatgggagtcgattggtctaggatcatgccagttgagcccaccaaaggaattaaggaagcagttaactatgaggctgtcgaacactataaatggatacttaaaaaagttcgttcaaatggaatgaaggtgatgctaacgctgtttcatcattcattgccaccatgggcagctgactatggtggctggaaaatggagaagacagtcgactactttatggactttaccaggattgttgtggattccatgtatgatttggtagactcttgggtaacatttaatgaaccccatatcttcaccatgcttacctacatgtgtggatcttggcccggtaacaaccctgattttctggagatagctacatctactctaccaatgggtgtattccatcgagccttacactggatggctgttgctcactcaaaggcctatgactacatccatgggaaaatttctttgaaaaaacctttggtaggggttgcgcaccacgtctcctttatgcgaccatatgggctctttgatatcggggctgttaccattagtaattccctcactatatttccatatatcgatagcatttgtgagaagttggatttcataggcatcaactactacggacaggaagcagtgtgtggtgctggactaaagcttgtagagactgatgaatacagtgaatcgggaagaggggtatatcctgatggtctctaccgcgtgttgttgatgttccacgagagatacaaacacctgaaagttccttttatcgtcacagaaaatggcgtgtctgatgaaacagatgtgattcgacgaccttacctgatcgagcatctccttgccttatatgctgcaatgctaaagggtgttcctgtgctcggttacatattctggactatttcggacaattgggaatgggctgatggatatggtccaaaatttggacttgttgcggttgaccgatcccatgatcttgcccgaactcttcggcaatcataccatctcttttccaagatagttaaaagtggaaaagtcactcggaaagatcggtctcttgcatggaacgaactccaaaaagctgccaaagcaggaaaactacggccattctaccgaggcgttgataatcataatcttatgtacgcagatggtctcgacaagcctcaatggagaccgtttgttgaccgcgactggcggtttggtcactaccaaatggatggtcttcaagacccgttgagtcgcgtggctcgaacccttctcatatggccgcttatcatgaaaaagaggataagaaaagttaagatcaagcacaccgatgatgctgggcttgttctacatcctgctttagcctcaccctttgactagagaaagaggtagaagaaatccgagtgtacaaactcatttccctgtatgatttgccaaacctttgggcctttggcgccattagagacgattcaccgttttgttgttaatgtttaaataaaggcaaaacggcatgatgttcggatgaggtgctttgttttttacatacgcctcgggactttaaccaacgacatttggttggaccaattaatagtaagtttaaccgacccaatgtccggtttttgttcagcttgataccttaccctggttggaacttggaaacggcaagcattcagctatttgtataaaaaggaaaggtggaaaaactacacgacttctctggagcaaaattttaggatgaggtaggctaggcccattttaatgtccatgagtgatttactagacttgagatccacggtagtcccagatcaacggctcttattttgacacgtgaacaaaacacaaaaaacacctcgcgttgtgatctgaaggataaagaaaaacaacaggacgttgtattacataaattagaaacgaggtgctgttttggtgttttccttttttcggcattgacctatcttgaccgactcataatataagcatgcttgtgtcgccactgtctctttctctatatataatagctctcactcttctctgattttcttctgttgaatcaaggtctctggaaatttcatcatcttcagtcttactcctatccctattttctcgttgggttgcacaaattgtttactgatgacgagcgatcgattttggcgcggcggtgaccgcgttgaggtggaacgactagtttctggcgcgacggcatattttccggcgagtgttgttagcgcgccttcggtgagaaagaaactcgtttgggtggagcatgaatccctaactgttggaggttccgtttccgtacgtatgaaggagtacgtcactcccacgcgcctccgtccatctccaccgcgtgaactcaacagacggttcaaagctgacgatgaggtcgatgtcttcagagatagcgaaggttgctgggttagaggcaatgttacgaccgtacttgaagattcaaggtacattgtggagtttaaaggggaaaatcgtccagaaatagaggttgatcagttcaatttgaggcttcatcgtgaatggctagatggtgggtgggttccttctcttctccaacagagcaatttctcggaatcgacagcccaaagaattaaactgaagataaaaatcaagagaagagatcaatatgagaagggagctcttgtcgaagtcagaagtgaagaaaaagcttacaagggttcttggtattgtgctcgtatactttgtttattaggtgatgataagtacattgttgaacacttgaaatttagtagagatgatggtgagtcgatccctctgagagatgtggtagaagccaaggacataagaccagttcctccttcagaactctcgcctgttgtgtgctatgaaccaggggttatagttgatgcttggttcaacaaacggtggtggaccagtagggtttccaaagtcctaggaggaggttctaataagtattcagtttttatcatctcaactggtgaagaaacgacaatcttaaatttcaacttaaggccccacaaagattggatcaatggacaatgggtcattccttccaaggtattgactgatgtgccggaagaatgttacaaacctccattgaagaagctgaaatcttgtgagagagcagagaaggtgtttaacaatggaatggaggtggaagttagaagcgacgaaccaggttacgaagcctcatggttctctgcaaagatcgtaagttacttgggcgaaaacagatacacagtggagtatcaaacactaaaaacagacgatgaaagagagttgttgaaggaagaagcaagaggttcagatataagacctcctcctcctccactgattccaaaggggtatcgatatgaattgtatgaacttgtggatgcttggtacaatgaaggatggtggtctggtcgagtatataagataaacaacaacaaaacgagatatggtgtctacttccaaacgactgatgagagtttggagtttgcttacaatgaccttaggccttgccaagtgtggagaaacggaaaatggagtcgtgtataaggatgagaagaagttggctaacggttacaactattaatgaagaggataaggaaaatgacttgtttatagtacattttttgtttatgaacatatgtttgaagttgatgatgtcgttaattgtctgcgtataatataatatttaacttct

SEQ ID NO: 1479 - protein, 622 aa, Arabidopsis thaliana
MELFALLIKVAGLLATVTVGANVVSYSRFRRQNLAKFRSPIDESKEVLADFNSIEHEEGKFFFGLATAPAHAEDDLDDAWLQFAKETPCSAEEAEAADKKARRKKVKLAVGAITKGLAKNTHGKEDKNAADKPPSKNVAAWHNAPHAEDRLKFWSDPDKEVKLAKDTGVTVFRMGVDWSRIMPVEPTKGIKEAVNYEAVEHYKWILKKVRSNGMKVMLTLFHHSLPPWAADYGGWKMEKTVDYFMDFTRIVVDSMYDLVDSWVTFNEPHIFTMLTYMCGSWPGNNPDFLEIATSTLPMGVFHRALHWMAVAHSKAYDYIHGKISLKKPLVGVAHHVSFMRPYGLFDIGAVTISNSLTIFPYIDSICEKLDFIGINYYGQEAVCGAGLKLVETDEYSESGRGVYPDGLYRVLLMFHERYKHLKVPFIVTENGVSDETDVIRRPYLIEHLLALYAAMLKGVPVLGYIFWTISDNWEWADGYGPKFGLVAVDRSHDLARTLRQSYHLFSKIVKSGKVTRKDRSLAWNELQKAAKAGKLRPFYRGVDNHNLMYADGLDKPQWRPFVDRDWRFGHYQMDGLQDPLSRVARTLLIWPLIMKKRIRKVKIKHTDDAGLVLHPALASPFD

SEQ ID NO: 1480 - protein, 466 aa, Arabidopsis thaliana
MTSDRFWRGGDRVEVERLVSGATAYFPASVVSAPSVRKKLVWVEHESLTVGGSVSVRMKEYVTPTRLRPSPPRELNRRFKADDEVDVFRDSEGCWVRGNVTTVLEDSRYIVEFKGENRPEIEVDQFNLRLHREWLDGGWVPSLLQQSNFSESTAQRIKLKIKIKRRDQYEKGALVEVRSEEKAYKGSWYCARILCLLGDDKYIVEHLKFSRDDGESIPLRDVVEAKDIRPVPPSELSPVVCYEPGVIVDAWFNKRWWTSRVSKVLGGGSNKYSVFIISTGEETTILNFNLRPHKDWINGQWVIPSKVLTDVPEECYKPPLKKLKSCERAEKVFNNGMEVEVRSDEPGYEASWFSAKIVSYLGENRYTVEYQTLKTDDERELLKEEARGSDIRPPPPPLIPKGYRYELYELVDAWYNEGWWSGRVYKINNNKTRYGVYFQTTDESLEFAYNDLRPCQVWRNGKWSRV

SEQ ID NO: 1481 - protein, 449 aa, Arabidopsis thaliana
MGVDWSRIMPVEPTKGIKEAVNYEAVEHYKWILKKVRSNGMKVMLTLFHHSLPPWAADYGGWKMEKTVDYFMDFTRIVVDSMYDLVDSWVTFNEPHIFTMLTYMCGSWPGNNPDFLEIATSTLPMGVFHRALHWMAVAHSKAYDYIHGKISLKKPLVGVAHHVSFMRPYGLFDIGAVTISNSLTIFPYIDSICEKLDFIGINYYGQEAVCGAGLKLVETDEYSESGRGVYPDGLYRVLLMFHERYKHLKVPFIVTENGVSDETDVIRRPYLIEHLLALYAAMLKGVPVLGYIFWTISDNWEWADGYGPKFGLVAVDRSHDLARTLRQSYHLFSKIVKSGKVTRKDRSLAWNELQKAAKAGKLRPFYRGVDNHNLMYADGLDKPQWRPFVDRDWRFGHYQMDGLQDPLSRVARTLLIWPLIMKKRIRKVKIKHTDDAGLVLHPALASPFD

SEQ ID NO: 1482 - DNA, 1395 bp, Arabidopsis thaliana
tcatcccatccagaaaaaacaaaaaaaaacaaaaaaataataaaacaaaaaaatatcttttttttttctaataaaaaaaaaataataaataaatatgagatacacaaatgtgtccattttattaggcatgttggtgatctttgtttcaccaatggtgttcgcagatgatttgacaccaatcccagagggcaaaccccaagtggtgcagtggttcaatacccacgttggtccattggctcaacgtaaaggcttagatcctgctctcgtagctgctgaggctgctccacgtatcatcaacgtgaatccaaagggaggtgaattcaaaacactaacagacgcaataaagagcgttcccgcagggaacacaaagcgggtgatcataaagatggctcatggtgagtacagagagaaggtcactatcgacaggaacaaacccttcattacattgatgggacaacccaatgccatgcctgttatcacctacgacggtaccgccgccaagtatggaaccgttgatagtgcctctctcattatcttatccgactatttcatggccgttaacatcgtcgttaagaacactgcaccggcaccagatggtaaaactaagggagcacaagccttatccatgagaatctccggaaactttgctgctttctacaactgcaaattctacggtttccaagatacaatctgtgatgataccggaaaccatttcttcaaggattgttacgtcgaaggaacattcgatttcatcttcggaagtggaacctctatgtacttgggaacacaattgcacgtggttggagacggtattagagtgatcgcagcgcatgcaggaaagagcgcagaagaaaagagtggatactctttcgtgcactgaaaggtgactggaactggaggaggaatctatttgggaagagcatggatgagccaccctaaggttgtctatgcctacaccgagatgaccagcgttgtcaaccccaccggatggcaagaaaacaagactcccgcacatgacaagaccgtgttctacggagagtacaagtgttcaggaccagggtcacacaaagccaagagagtgccattcacacaagacatcgacgacaaagaagctaactgtttcctatccctcggctacatccaaggatccaagtggcttctcccaccacccgctttgtaaattctttaatatcaacctattaaaattaaaattaaaacgtaaaactaaaattaaaacttctacttacatccttttttcaccgaaatatgtttatcggtgtatattatttttgtcgatattttctttcaatttccagaaatcctctcttctttaaatagcatggaggagttgagatttatgtaattttggtttcattataataaaatgttgtttcc

SEQ ID NO: 1483 - protein, 261 aa, Arabidopsis thaliana
MRYTNVSILLGMLVIFVSPMVFADDLTPIPEGKPQVVQWFNTHVGPLAQRKGLDPALVAAEAAPRIINVNPKGGEFKTLTDAIKSVPAGNTKRVIIKMAHGEYREKVTIDRNKPFITLMGQPNAMPVITYDGTAAKYGTVDSASLIILSDYFMAVNIVVKNTAPAPDGKTKGAQALSMRISGNFAAFYNCKFYGFQDTICDDTGNHFFKDCYVEGTFDFIFGSGTSMYLGTQLHVVGDGIRVIAAHAGKSAEEKSGYSFVH

SEQ ID NO: 1484 - protein, 250 aa, Arabidopsis thaliana
MLVIFVSPMVFADDLTPIPEGKPQVVQWFNTHVGPLAQRKGLDPALVAAEAAPRIINVNPKGGEFKTLTDAIKSVPAGNTKRVIIKMAHGEYREKVTIDRNKPFITLMGQPNAMPVITYDGTAAKYGTVDSASLIILSDYFMAVNIVVKNTAPAPDGKTKGAQALSMRISGNFAAFYNCKFYGFQDTICDDTGNHFFKDCYVEGTFDFIFGSGTSMYLGTQLHVVGDGIRVIAAHAGKSAEEKSGYSFVH

SEQ ID NO: 1485 - protein, 242 aa, Arabidopsis thaliana
MVFADDLTPIPEGKPQVVQWFNTHVGPLAQRKGLDPALVAAEAAPRIINVNPKGGEFKTLTDAIKSVPAGNTKRVIIKMAHGEYREKVTIDRNKPFITLMGQPNAMPVITYDGTAAKYGTVDSASLIILSDYFMAVNIVVKNTAPAPDGKTKGAQALSMRISGNFAAFYNCKFYGFQDTICDDTGNHFFKDCYVEGTFDFIFGSGTSMYLGTQLHVVGDGIRVIAAHAGKSAEEKSGYSFVH

SEQ ID NO: 1486 - DNA, 1997 bp, Arabidopsis thaliana
tgacaccaccattgaattgaacttccctcacacgcaagtaccacaccttctctctctctctctctatcatctcttttctttttctctcatcgccttgaagctctgagaagtagagagaagctccgatctgataggaactgtgagtttccttgagtctccggagaaagaagtcgccgatttgctcctgataatcttagtctcgaaatcaaaacgatgttttgcgattgcttctactggaataaaggtttctccgagttggaatcggaatcgtccgagtcaaagcccttctcgcttccatctcctcttcctcaatggccacaaggcagaggttttgctactggaaggataagtcttggagaaatccaagtggtgaaagtcaccgagttcgatagagtttggaaatgtggcacctcgcgtggtaaattaagatgcgcatctttttacaaacctgtggggataccagaaggtttccattgccttggtcattactgccagccaaacaatcagccattgagaggctttgttcttgcagctcgggctaacaagcccggtcatctagcggatgatcatcgccctcctttgaaaaagcctttgaattattctttagtttggagttcagattcagattgctacttctggttacctaatcctcctgttggttatagagccgtgggagttattgtcactgatggatcagaggagcctgaagttgatgaagtgagatgtgtacgagaggatcttacagagagctgtgaaaccggtgagaaggttcttggtgtaggatcttttaatgtttggagcactaaaccttgcgagagaggtatttggtctcgtggagtggaggttgggtcattcgtttgctctactaatgatctgtcttctgataataaagccgccatgaacattgcgtgtttgaaaaatctcgacccgagcctacaaggtatgccaaatcttgatcaggtccatgcacttattcaccattatggaccgatggtctacttccatcccgaagagacttacatgccttcgtctgtgccatggttctttaaaaacggagctttgttgcaccggtttgggaaatctcaaggcgaaccgattaactcagctggctcgaacttgcctgcgggtggagaaaacgatgggagcttctggattgatctccctgaagatgaagaagttagaagtaatctaaagaagggaaatatagaaagctcagagctttacgtccacgtgaaacccgcgcttggcgggattttcacggacgttgtaatgtggatattctgtccatttaatggtccagccactctcaaaatcgggcttctcacggtaccaatgaaccgccttggagagcatgttggtgattgggaacatttcacattccggataagcaacttcaacggcgatcttacacagatgttcttctcacagcatagtggtggaggatgggttgatgtatcggatcttgagtttgtcaaaggaagcaataaaccggttgtgtactcatccaaacacggtcacgctagtttcccacacccgggaatgtatcttcaaggcccgtcgaagctcgggattggagtaagaaacgatgttgcgaaaagcaagtatatggtggattctagtcaaaggtacagaatcgtagcagcagagtatttaggcgaaggagcggtttcagaaccgtactggctgcagtttatgagagaatggggaccaactatagtatatgattcagcagctgagatcaataagatcattgatctacttccactgattctgaggaattcttttgagagtctgtttcctattgagctttacggtgaggaaggtcctacaggaccaaaggagaaggataattgggaaggagatgaaatttgttgaaaacagagctcctctgtttcagtgaagctttttgctaagtgtatgtgtaaataagtgtgtatatatatatatatggaaattgtatacaaattttggattcaatattaatcatttcgatcttg

SEQ ID NO: 1487 - protein, 553 aa, Arabidopsis thaliana
MFCDCFYWNKGFSELESESSESKPFSLPSPLPQWPQGRGFATGRISLGEIQVVKVTEFDRVWKCGTSRGKLRCASFYKPVGIPEGFHCLGHYCQPNNQPLRGFVLAARANKPGHLADDHRPPLKKPLNYSLVWSSDSDCYFWLPNPPVGYRAVGVIVTDGSEEPEVDEVRCVREDLTESCETGEKVLGVGSFNVWSTKPCERGIWSRGVEVGSFVCSTNDLSSDNKAAMNIACLKNLDPSLQGMPNLDQVHALIHHYGPMVYFHPEETYMPSSVPWFFKNGALLHRFGKSQGEPINSAGSNLPAGGENDGSFWIDLPEDEEVRSNLKKGNIESSELYVHVKPALGGIFTDVVMWIFCPFNGPATLKIGLLTVPMNRLGEHVGDWEHFTFRISNFNGDLTQMFFSQHSGGGWVDVSDLEFVKGSNKPVVYSSKHGHASFPHPGMYLQGPSKLGIGVRNDVAKSKYMVDSSQRYRIVAAEYLGEGAVSEPYWLQFMREWGPTIVYDSAAEINKIIDLLPLILRNSFESLFPIELYGEEGPTGPKEKDNWEGDEIC

SEQ ID NO: 1488 - protein, 325 aa, Arabidopsis thaliana
MNIACLKNLDPSLQGMPNLDQVHALIHHYGPMVYFHPEETYMPSSVPWFFKNGALLHRFGKSQGEPINSAGSNLPAGGENDGSFWIDLPEDEEVRSNLKKGNIESSELYVHVKPALGGIFTDVVMWIFCPFNGPATLKIGLLTVPMNRLGEHVGDWEHFTFRISNFNGDLTQMFFSQHSGGGWVDVSDLEFVKGSNKPVVYSSKHGHASFPHPGMYLQGPSKLGIGVRNDVAKSKYMVDSSQRYRIVAAEYLGEGAVSEPYWLQFMREWGPTIVYDSAAEINKIIDLLPLILRNSFESLFPIELYGEEGPTGPKEKDNWEGDEIC

SEQ ID NO: 1489 - protein, 310 aa, Arabidopsis thaliana
MPNLDQVHALIHHYGPMVYFHPEETYMPSSVPWFFKNGALLHRFGKSQGEPINSAGSNLPAGGENDGSFWIDLPEDEEVRSNLKKGNIESSELYVHVKPALGGIFTDVVMWIFCPFNGPATLKIGLLTVPMNRLGEHVGDWEHFTFRISNFNGDLTQMFFSQHSGGGWVDVSDLEFVKGSNKPVVYSSKHGHASFPHPGMYLQGPSKLGIGVRNDVAKSKYMVDSSQRYRIVAAEYLGEGAVSEPYWLQFMREWGPTIVYDSAAEINKIIDLLPLILRNSFESLFPIELYGEEGPTGPKEKDNWEGDEIC

SEQ ID NO: 1490 - DNA, 2364 bp, Arabidopsis thaliana
gaaacaaacacttcgtcgaatgcgcatcttctctacattcgtctttcatcgcagacaacaaatcttcaatcttcgtcaattccaaaccaccacaatccttcgcaacccaatctccatcgctccgatccagattccgatggacgccaccgagcagtctctccgtcaatctctttccgagaaatcctcatccgtcgaagctcagggtaacgccgtccgagctctcaaggcttcccgtgcagctaaaccagaaatcgatgctgccatggagcaactcaacaaattgaagctcgagaaatctaccgtcgagaaggagcttcagtctattatcagtagctccggtaatggttcgcttaaccgtgaggcttttcgaaaagctgttgtcaatactctcgagcggcgtttgttctatatcccttcgtttaagatctacagtggcgtcgctggactttttgattatggtcctcctggctgtgctattaaatccaatgttctcagcttttggcgtcaacatttcattcttgaggagaacatgctagaagttgattgtccatgtgtgacaccagaggttgttctcaaggcatctgggcatgtagataagttcactgatcttatggttaaggatgagaaaactggaacatgttaccgtgctgaccacttgctcaaggattattgtaccgagaagctggagaaagatcttaccatctctgctgagaaagctgctgaattgaaggatgttcttgctgttatggaagatttttctcctgaacagctaggtgccaagatcagggagtatgggatcactgctccagacacgaagaatccactctctgatccttacccgtttaatttgatgtttcaaacatccattggcccatctggtttgattcctggttacatgcgtcctgaaactgctcaaggtatttttgtcaactttaaggacttgtactattacaatgggaagaaacttccttttgccgcggctcaaattggtcaagcctttagaaatgagatatctcctcgacaagggcttcttagagttcgtgaattcacgctggcagagattgagcacttcgttgatcctgagaataagtcacatcctaagttctctgacgtagcaaaattggaattccttatgttcccaagggaagaacaaatgtctggccaatctgccaaaaaactttgccttggtgaagctgttgctaaaggtactgtgaacaatgaaactctaggatacttcattgggagagtgtatcttttccttactcgtcttggcattgacaaggaacggctgcgcttccgtcagcatctagcaaatgaaatggcccactatgcagcagattgttgggatgctgaaattgaaagttcatatgggtggattgaatgtgttgggattgcagataggtctgcttacgacttacgtgctcactctgacaaaagtggtactcctcttgtggctgaagagaaatttgcagaacctaaagaagtagagaaacttgtgataactcctgtgaagaaagaactgggtcttgcattcaagggaaatcaaaagaatgtggttgaatctttggaggcgatgaatgaggaagaagctatggagatgaaagcaaccctggaatccaaaggggaagtggagttttacgtgtgtaccctaaagaaaagcgtgaacatcaagaaaaacatggtgtctatatcaaaggagaagaagaaagagcaccagcgggttttcactccatcagtgattgaaccatcgtttgggattggtcggatcatatattgtctgtatgagcattgtttcagcacaaggccaagcaaagcaggggatgagcagttgaacttgttccgtttccctcctcttgtagctcccatcaagtgcacggttttcccgcttgttcagaaccaacaattcgaggaagtagccaaagttatttccaaggaactcgcctctgtcggtatctcccataagattgacatcactggtacatcgatagggaagagatatgcgagaaccgatgagcttggagtgccatttgcaataacagtggactcggatacatcagtgacaatcagagaaagagacagcaaagatcaagtccgagtcaccttgaaggaggcagcttccgttgtgagctcagtctcagaggggaaaatgacgtggcaagacgtctgggcaaccttccctcaccattcttctgctgctgcagacgagtagctagctccttgtttttttccgaattaaaaaccaaagtgttaaattaattgttgctgaatctactcatttttaatgttttgtttcttagtgtcacgtaaaaagttcgataccagatttggagacgaagtggctataaagtataaactctctgttat

SEQ ID NO: 1491 - protein, 735 aa, Arabidopsis thaliana
KQTLRRMRIFSTFVFHRRQQIFNLRQFQTTTILRNPISIAPIQIPMDATEQSLRQSLSEKSSSVEAQGNAVRALKASRAAKPEIDAAMEQLNKLKLEKSTVEKELQSIISSSGNGSLNREAFRKAVVNTLERRLFYIPSFKIYSGVAGLFDYGPPGCAIKSNVLSFWRQHFILEENMLEVDCPCVTPEVVLKASGHVDKFTDLMVKDEKTGTCYRADHLLKDYCTEKLEKDLTISAEKAAELKDVLAVMEDFSPEQLGAKIREYGITAPDTKNPLSDPYPFNLMFQTSIGPSGLIPGYMRPETAQGIFVNFKDLYYYNGKKLPFAAAQIGQAFRNEISPRQGLLRVREFTLAEIEHFVDPENKSHPKFSDVAKLEFLMFPREEQMSGQSAKKLCLGEAVAKGTVNNETLGYFIGRVYLFLTRLGIDKERLRFRQHLANEMAHYAADCWDAEIESSYGWIECVGIADRSAYDLRAHSDKSGTPLVAEEKFAEPKEVEKLVITPVKKELGLAFKGNQKNVVESLEAMNEEEAMEMKATLESKGEVEFYVCTLKKSVNIKKNMVSISKEKKKEHQRVFTPSVIEPSFGIGRIIYCLYEHCFSTRPSKAGDEQLNLFRFPPLVAPIKCTVFPLVQNQQFEEVAKVISKELASVGISHKIDITGTSIGKRYARTDELGVPFAITVDSDTSVTIRERDSKDQVRVTLKEAASVVSSVSEGKMTWQDVWATFPHHSSAAADE

SEQ ID NO: 1492 - protein, 729 aa, Arabidopsis thaliana
MRIFSTFVFHRRQQIFNLRQFQTTTILRNPISIAPIQIPMDATEQSLRQSLSEKSSSVEAQGNAVRALKASRAAKPEIDAAMEQLNKLKLEKSTVEKELQSIISSSGNGSLNREAFRKAVVNTLERRLFYIPSFKIYSGVAGLFDYGPPGCAIKSNVLSFWRQHFILEENMLEVDCPCVTPEVVLKASGHVDKFTDLMVKDEKTGTCYRADHLLKDYCTEKLEKDLTISAEKAAELKDVLAVMEDFSPEQLGAKIREYGITAPDTKNPLSDPYPFNLMFQTSIGPSGLIPGYMRPETAQGIFVNFKDLYYYNGKKLPFAAAQIGQAFRNEISPRQGLLRVREFTLAEIEHFVDPENKSHPKFSDVAKLEFLMFPREEQMSGQSAKKLCLGEAVAKGTVNNETLGYFIGRVYLFLTRLGIDKERLRFRQHLANEMAHYAADCWDAEIESSYGWIECVGIADRSAYDLRAHSDKSGTPLVAEEKFAEPKEVEKLVITPVKKELGLAFKGNQKNVVESLEAMNEEEAMEMKATLESKGEVEFYVCTLKKSVNIKKNMVSISKEKKKEHQRVFTPSVIEPSFGIGRIIYCLYEHCFSTRPSKAGDEQLNLFRFPPLVAPIKCTVFPLVQNQQFEEVAKVISKELASVGISHKIDITGTSIGKRYARTDELGVPFAITVDSDTSVTIRERDSKDQVRVTLKEAASVVSSVSEGKMTWQDVWATFPHHSSAAADE

SEQ ID NO: 1493 - protein, 690 aa, Arabidopsis thaliana
MDATEQSLRQSLSEKSSSVEAQGNAVRALKASRAAKPEIDAAMEQLNKLKLEKSTVEKELQSIISSSGNGSLNREAFRKAVVNTLERRLFYIPSFKIYSGVAGLFDYGPPGCAIKSNVLSFWRQHFILEENMLEVDCPCVTPEVVLKASGHVDKFTDLMVKDEKTGTCYRADHLLKDYCTEKLEKDLTISAEKAAELKDVLAVMEDFSPEQLGAKIREYGITAPDTKNPLSDPYPFNLMFQTSIGPSGLIPGYMRPETAQGIFVNFKDLYYYNGKKLPFAAAQIGQAFRNEISPRQGLLRVREFTLAEIEHFVDPENKSHPKFSDVAKLEFLMFPREEQMSGQSAKKLCLGEAVAKGTVNNETLGYFIGRVYLFLTRLGIDKERLRFRQHLANEMAHYAADCWDAEIESSYGWIECVGIADRSAYDLRAHSDKSGTPLVAEEKFAEPKEVEKLVITPVKKELGLAFKGNQKNVVESLEAMNEEEAMEMKATLESKGEVEFYVCTLKKSVNIKKNMVSISKEKKKEHQRVFTPSVIEPSFGIGRIIYCLYEHCFSTRPSKAGDEQLNLFRFPPLVAPIKCTVFPLVQNQQFEEVAKVISKELASVGISHKIDITGTSIGKRYARTDELGVPFAITVDSDTSVTIRERDSKDQVRVTLKEAASVVSSVSEGKMTWQDVWATFPHHSSAAADE

SEQ ID NO: 1494 - DNA, 1646 bp, Arabidopsis thaliana
tggtactctgttgcattatttctctcactcaaacgtatatacaaacataaattatgtcgacagaaatggaggtcgttagtgttcttaagtaccttgacaacaaatccatattggtcgttggagctgctgggttcttagcaaatatctttgtggagaagatattaagggtggcaccaaacgtgaagaaactctatctccttctaagagcatcaaaaggaaaatctgctacccagaggtttaacgacgagattttgaagaaagatttgttcaaggtgctgaaggagaagtatggtcccaatctaaatcaacttacatcagagaaaatcactattgtcgacggagacatttgccttgaggatttaggtcttcaagacttcgacttggctcatgagatgatccaccaagttgatgccattgttaatttagctgcaactactaagtttgatgaaagatacgatgtagctcttgggatcaacacattgggtgctctcaatgtcttgaactttgccaagagatgtgcaaaggttaagatccttgttcatgtatcaacagcttacgtgtgcggagaaaaatctggcttgataatggaaacaccgtaccgtatgggtgagacgttgaatggaaccaccggtttagacatcaactacgagaaaaaattggttcaggagaaacttgaccagctccgagtaatcggagccgctcctgaaaccatcacggaaaccatgaaggatctcggactcagacgggcaaagatgtacggatggccaaacacatatgtgttcaccaaagcaatgggggagatgatggtagggacaaaaagagaaaatctgtcacttgtgttgcttcgtccttcaattattaccagcacattcaaagaaccatttcctggttggactgagggcatcaggactattgatagtttagctgttggatatggcaaaggcaaactcacgtgcttcctctgtgatcttgatgctgtttctgatgtgatgccggcagatatggtagtaaattcgattcttgtatcaatggccgctcaagccggtaaacaagaagagattatttaccatgtgggttcttcacttagaaatccgatgaaaaattcaaagtttcctgaattagcgtatcggtatttctcaatcaaaccgtggaccaacaaagaagggaaggtcgttaaggtcggggccattgagatcctgagttctatgcgtagtttccatagatacatgaccatacgctacttgattgcattgaagggacttgaattggtaaacataatactttgcaagttgtttgagaaggaatttcagtatttcaataagaaaataaattttatattccggcttgttgatctctatcagccttacctctttttctatggaatatttgatgattcaaacacagaaaaattgcgaaaaatggtatcgaagacgggagtcgaaaacgagatgttttatttcgatccaaaggttctcgattgggacgactattttttgaacacacatgttattgggctgcttaagtatgtcttctaataattttagttgtataatctttatcttattttactacaacgagtataaattatgtggacactatcgttctccttaatccgttttcatacggctatgtttcgaaatttggtt

SEQ ID NO: 1495 - protein, 493 aa, Arabidopsis thaliana
MSTEMEVVSVLKYLDNKSILVVGAAGFLANIFVEKILRVAPNVKKLYLLLRASKGKSATQRFNDEILKKDLFKVLKEKYGPNLNQLTSEKITIVDGDICLEDLGLQDFDLAHEMIHQVDAIVNLAATTKFDERYDVALGINTLGALNVLNFAKRCAKVKILVHVSTAYVCGEKSGLIMETPYRMGETLNGTTGLDINYEKKLVQEKLDQLRVIGAAPETITETMKDLGLRRAKMYGWPNTYVFTKAMGEMMVGTKRENLSLVLLRPSIITSTFKEPFPGWTEGIRTIDSLAVGYGKGKLTCFLCDLDAVSDVMPADMVVNSILVSMAAQAGKQEEIIYHVGSSLRNPMKNSKFPELAYRYFSIKPWTNKEGKVVKVGAIEILSSMRSFHRYMTIRYLIALKGLELVNIILCKLFEKEFQYFNKKINFIFRLVDLYQPYLFFYGIFDDSNTEKLRKMVSKTGVENEMFYFDPKVLDWDDYFLNTHVIGLLKYVF

SEQ ID NO: 1496 - protein, 489 aa, Arabidopsis thaliana
MEVVSVLKYLDNKSILVVGAAGFLANIFVEKILRVAPNVKKLYLLLRASKGKSATQRFNDEILKKDLFKVLKEKYGPNLNQLTSEKITIVDGDICLEDLGLQDFDLAHEMIHQVDAIVNLAATTKFDERYDVALGINTLGALNVLNFAKRCAKVKILVHVSTAYVCGEKSGLIMETPYRMGETLNGTTGLDINYEKKLVQEKLDQLRVIGAAPETITETMKDLGLRRAKMYGWPNTYVFTKAMGEMMVGTKRENLSLVLLRPSIITSTFKEPFPGWTEGIRTIDSLAVGYGKGKLTCFLCDLDAVSDVMPADMVVNSILVSMAAQAGKQEEIIYHVGSSLRNPMKNSKFPELAYRYFSIKPWTNKEGKVVKVGAIEILSSMRSFHRYMTIRYLIALKGLELVNIILCKLFEKEFQYFNKKINFIFRLVDLYQPYLFFYGIFDDSNTEKLRKMVSKTGVENEMFYFDPKVLDWDDYFLNTHVIGLLKYVF

SEQ ID NO: 1497 - protein, 380 aa, Arabidopsis thaliana
MIHQVDAIVNLAATTKFDERYDVALGINTLGALNVLNFAKRCAKVKILVHVSTAYVCGEKSGLIMETPYRMGETLNGTTGLDINYEKKLVQEKLDQLRVIGAAPETITETMKDLGLRRAKMYGWPNTYVFTKAMGEMMVGTKRENLSLVLLRPSIITSTFKEPFPGWTEGIRTIDSLAVGYGKGKLTCFLCDLDAVSDVMPADMVVNSILVSMAAQAGKQEEIIYHVGSSLRNPMKNSKFPELAYRYFSIKPWTNKEGKVVKVGAIEILSSMRSFHRYMTIRYLIALKGLELVNIILCKLFEKEFQYFNKKINFIFRLVDLYQPYLFFYGIFDDSNTEKLRKMVSKTGVENEMFYFDPKVLDWDDYFLNTHVIGLLKYVF

SEQ ID NO: 1498 - DNA, 1595 bp, Arabidopsis thaliana
attatttgatttggaatcacaagaaagtggtggttctcctttatttatgtcaccagccccctccacggatccacaaccaatctccggcgaaaaaaacggcggcgatggtggtaggattccggtagaagagtggctgccgatcacagaatcaagaaaaggaaatgtttatacggcgacgtttcatcttctctgttcgggaattggtctccaagtgattcttcttcctgcagctttcgcagcactcggatgggtatggggaacgataatcttaacggtagggtttgtatggaagctctacacgacgtggcttcttgttcaactccacgaagcggttccgggaattcgtatcagcagatacgtgagactcgcaattgcttcttttggtgtgaagcttgggaaacttctcggaatattccctgtgatgtatctctcaggaggagcttgtacgattctggttataaccggagggaaatcaatacaacaactgttacaaattatgtctgacgacaatacagcgccacttacttcagtgcaatgcttcttggtttttagttgcattgcgatgatcatgtctcagtttccgaatctaaattctctctttggagtctcgttgatcggtgcttttatgggaattgcgtattgcaccgtgatatggattttacctgtagctagtgactcacaaaggactcaagtcagtgtctcgtacgctacaatggataaaagtttcgttcacattttcaacgctattggattgatagctctagtatatcgcgggaacaatctcgtccttgagatacagggtactcttccttccgattcaaagaacccttcatgtaagacaatgtggagagcagtgatgatctctcatgctctcgtcgcgatttgtatgtttccattaacgtttgctgtatattgggcatacggagacaagattccggcgacgggaggtcccgtgggcaactatctgaaactttacacacaagagcactcgaagcgagcagcctgtttcatacacctcacgtttatcttctcttgcttatgttcatatccgataaacttaatgccggcgtgtgacaacatagagatggtgtacataaccaagaagaaaaagcctgcatccatcattgtccggatgatgttgcgtgtgtttttgagcttggtttgtttcactatagccgttggattcccgttcttgccttatctagcggttcttattggagcaatagccttgcttgtgacgtttacgtatccatgtttcatgtggatctctatcaaaaagccccaaaggaaaagcccaatgtggttgtttaacgttttggtgggttgcctaggtgcttctctcagcgttttgcttctggttgcctcggctatgcgtttggctcaaaagggtttgcatgctaacttcttcagaccctaaagcatccttgcaatcgttagaatgtaattagaatttgtggcacacgtggtaaacttgggactactaacatgttcagttgaaatatttaaattttgtaattatgatattttaatgtatacttctctcaaaaaagagaaaatcgtcagttgatgacaacactattcaacttgttaattcc

SEQ ID NO: 1499 - protein, 471 aa, Arabidopsis thaliana
LFDLESQESGGSPLFMSPAPSTDPQPISGEKNGGDGGRIPVEEWLPITESRKGNVYTATFHLLCSGIGLQVILLPAAFAALGWVWGTIILTVGFVWKLYTTWLLVQLHEAVPGIRISRYVRLAIASFGVKLGKLLGIFPVMYLSGGACTILVITGGKSIQQLLQIMSDDNTAPLTSVQCFLVFSCIAMIMSQFPNLNSLFGVSLIGAFMGIAYCTVIWILPVASDSQRTQVSVSYATMDKSFVHIFNAIGLIALVYRGNNLVLEIQGTLPSDSKNPSCKTMWRAVMISHALVAICMFPLTFAVYWAYGDKIPATGGPVGNYLKLYTQEHSKRAACFIHLTFIFSCLCSYPINLMPACDNIEMVYITKKKKPASIIVRMMLRVFLSLVCFTIAVGFPFLPYLAVLIGAIALLVTFTYPCFMWISIKKPQRKSPMWLFNVLVGCLGASLSVLLLVASAMRLAQKGLHANFFRP

SEQ ID NO: 1500 - protein, 456 aa, Arabidopsis thaliana
MSPAPSTDPQPISGEKNGGDGGRIPVEEWLPITESRKGNVYTATFHLLCSGIGLQVILLPAAFAALGWVWGTIILTVGFVWKLYTTWLLVQLHEAVPGIRISRYVRLAIASFGVKLGKLLGIFPVMYLSGGACTILVITGGKSIQQLLQIMSDDNTAPLTSVQCFLVFSCIAMIMSQFPNLNSLFGVSLIGAFMGIAYCTVIWILPVASDSQRTQVSVSYATMDKSFVHIFNAIGLIALVYRGNNLVLEIQGTLPSDSKNPSCKTMWRAVMISHALVAICMFPLTFAVYWAYGDKIPATGGPVGNYLKLYTQEHSKRAACFIHLTFIFSCLCSYPINLMPACDNIEMVYITKKKKPASIIVRMMLRVFLSLVCFTIAVGFPFLPYLAVLIGAIALLVTFTYPCFMWISIKKPQRKSPMWLFNVLVGCLGASLSVLLLVASAMRLAQKGLHANFFRP

SEQ ID NO: 1501 - protein, 331 aa, Arabidopsis thaliana
MYLSGGACTILVITGGKSIQQLLQIMSDDNTAPLTSVQCFLVFSCIAMIMSQFPNLNSLFGVSLIGAFMGIAYCTVIWILPVASDSQRTQVSVSYATMDKSFVHIFNAIGLIALVYRGNNLVLEIQGTLPSDSKNPSCKTMWRAVMISHALVAICMFPLTFAVYWAYGDKIPATGGPVGNYLKLYTQEHSKRAACFIHLTFIFSCLCSYPINLMPACDNIEMVYITKKKKPASIIVRMMLRVFLSLVCFTIAVGFPFLPYLAVLIGAIALLVTFTYPCFMWISIKKPQRKSPMWLFNVLVGCLGASLSVLLLVASAMRLAQKGLHANFFRP

SEQ ID NO: 1502 - DNA, 1053 bp, Arabidopsis thaliana
atccaactatccatccatcatcggtcagtccccaaagtcggcggaagaagatggtgtcgccgaaaatagcaccgtcgatgctgtcatcggacttcgcaaatctagcggcggaggccaatcggatgatcgatttgggcgccaactggcttcacatggatattatggacgggcattttgtccctaatcttacgattggtgctcctgtcatcgagagtttgcgaaagcacactaatgcatatcttgattgccaccttatggtgacgaaccccatggattacgttgcacagatggctaaagctggggcttctggtttcacattccacgtcgaggtggcccaagataattggcaacaacttgtcgagaagattaagtctactggaatgagaccaggcgtggctctaaagcctggaacacctgttgaacaagtctatcctctggttgaagggacaactccggttgaaatggttcttgtgatgactgtagaacctggatttggaggccagaagtttatgcctgacatgatggacaaggtccgggcattgaggcaaaaatacccaacacttgatattcaggtggatggcggcttaggcccttcaacgatcgacacagcggctgcagcaggcgccaactgtattgttgctggaagttcagtgtttggagctccggagccaggagatgtcatctcccttctgaggaccagtgttgagaaagcccaacccaccacttgaaagctgcacgtggtggcggtggtgctgagacggcgttgtattctcatcggaagatggtacctcttcgtttctctcaaggttaaaaagctggtcctttatgttttaaaatcatctcgtgaatcgtgatacttagtcttggttccaagaactgtataacgtcattttgagttattaattccctcaccacacagattatttcataggagttgggtaccaagagtagtgtgcaatgtataattagtaatttaataaacgtattaggttcagtcattttggaatggttataattatgaatacaagtatacaacatgaacattccagtgtt

SEQ ID NO: 1503 - protein, 241 aa, Arabidopsis thaliana
PTIHPSSVSPQSRRKKMVSPKIAPSMLSSDFANLAAEANRMIDLGANWLHMDIMDGHFVPNLTIGAPVIESLRKHTNAYLDCHLMVTNPMDYVAQMAKAGASGFTFHVEVAQDNWQQLVEKIKSTGMRPGVALKPGTPVEQVYPLVEGTTPVEMVLVMTVEPGFGGQKFMPDMMDKVRALRQKYPTLDIQVDGGLGPSTIDTAAAAGANCIVAGSSVFGAPEPGDVISLLRTSVEKAQPTT

SEQ ID NO: 1504 - protein, 225 aa, Arabidopsis thaliana
MVSPKIAPSMLSSDFANLAAEANRMIDLGANWLHMDIMDGHFVPNLTIGAPVIESLRKHTNAYLDCHLMVTNPMDYVAQMAKAGASGFTFHVEVAQDNWQQLVEKIKSTGMRPGVALKPGTPVEQVYPLVEGTTPVEMVLVMTVEPGFGGQKFMPDMMDKVRALRQKYPTLDIQVDGGLGPSTIDTAAAAGANCIVAGSSVFGAPEPGDVISLLRTSVEKAQPTT

SEQ ID NO: 1505 - protein, 216 aa, Arabidopsis thaliana
MLSSDFANLAAEANRMIDLGANWLHMDIMDGHFVPNLTIGAPVIESLRKHTNAYLDCHLMVTNPMDYVAQMAKAGASGFTFHVEVAQDNWQQLVEKIKSTGMRPGVALKPGTPVEQVYPLVEGTTPVEMVLVMTVEPGFGGQKFMPDMMDKVRALRQKYPTLDIQVDGGLGPSTIDTAAAAGANCIVAGSSVFGAPEPGDVISLLRTSVEKAQPTT

SEQ ID NO: 1506 - DNA, 1018 bp, Arabidopsis thaliana
aggagactcttgctttttcacaaaaaaaaaagaaagagatagagcagcaaccccagcagcatcgaagatcatcgatcggtttctctctttcattaatcagatctaattgatacccaaccttcttcatcggaggccgtatctcacgaggaaacatgggcggtagatttggagtcctcctagtcctcttcctcttgagctggtcttgtcatgctacaaacccgattcttctcgaaccattcgaatcagctcatgatgacaaccaagtctgtgaactatgtgacaagtatgtcacgctagtcattgattaccttcaagactacgacaaccagaatgaactcgttgaggcccttcatatcagctgctctcagattcctcctctcaaaaaacagtgtctttcaatggtagatcattacacccaacttttcttcacacaagtctctactatcaaatcagaccaaatctgcaaacggcttaacctctgtcaagctgtgacaccggcctttgcccctcaagtccatcaaggaaactgcgaggcttgccgcgagactgtctctgaggtcgtcaccaaactcaaggatcctgagactaagctgaagataattcggttacttctcaaggaatgcaagtcgcttaacaattaccaggacaagtgcaagaagatggtattcgagtacgggcctctgatgcttacggatttgcagaagtttctggagaagaaagacgtgtgcactatcctccacgtctgtccaggtccagccacccaccgtgactacgttcctgcggtggagtcattggcagattcgtaaattcggccaccttggtttcgtcgtcattcacactaataccatgccatgatcgtgatgctaatttaatttggtaacccggtggtcatgtaaatactgattgatatattaaaaacataactacacgattgatgattcttgtgtgatttgaaaagaacgctgtctaaaggcccattgtccatcgatgggcctttttgctaatttctacattgctc

SEQ ID NO: 1507 - protein, 217 aa, Arabidopsis thaliana
MGGRFGVLLVLFLLSWSCHATNPILLEPFESAHDDNQVCELCDKYVTLVIDYLQDYDNQNELVEALHISCSQIPPLKKQCLSMVDHYTQLFFTQVSTIKSDQICKRLNLCQAVTPAFAPQVHQGNCEACRETVSEVVTKLKDPETKLKIIRLLLKECKSLNNYQDKCKKMVFEYGPLMLTDLQKFLEKKDVCTILHVCPGPATHRDYVPAVESLADS

SEQ ID NO: 1508 - protein, 135 aa, Arabidopsis thaliana
MVDHYTQLFFTQVSTIKSDQICKRLNLCQAVTPAFAPQVHQGNCEACRETVSEVVTKLKDPETKLKIIRLLLKECKSLNNYQDKCKKMVFEYGPLMLTDLQKFLEKKDVCTILHVCPGPATHRDYVPAVESLADS

SEQ ID NO: 1509 - DNA, 1253 bp, Arabidopsis thaliana
agagagagaggctttcgattaattttactttgtggccgccgtgacctttttcttagcgtcgctctctgtcaccttcaagttcactatctccgacttatcttctgtcaagtactgaacaagaatcatggaggagatcaccaaaccggtccttgttggaatagttaagaaagaagctccacagctagcatccgtgttgagagaaatgaagaatgttctagatgtggttaggagcaaagtggaagctctgactgcattggtaaaagcaaacagttttccgacagcgggtgggataagttatcttgaggccaagcatctgttacttctaagttattgccaggatcttgtatattatattctaaggaaagcaaaaggactctctattgatggtcatcctcttgtaaggagccttgtagagatacgtatgtttctggaaaagattcgtcccatagacaaaaaacttcagtaccagattcagaagctcaccacagccggtgggcctgtgacagagctagctcattccgagggaaaggggtcgtgtgaagcccaaaaatctgaagatctttcaaattataagcctaaacctgacttacttgctgacaaagaggatgaccaagaggatgatggtgtttatcgacccccgaaatttgcccctatgtctatggaagataagacttcaaaacaagaaagagatgctgccagaaaagagaaacacttttttagacaagccactgaaaatacatacatgaaagatgtgttggacgatctggaggacaggcctgaagagattagagactattatggggttgagagcaatgagcagaagaggtttatggcacagtatgaaaggcaacaaaaggcagaagaagagctctttacccgggcacctcgcactaaagaggataagaagagagagaagcgcttgaaatcaagcagcgggttgcatgaactaaccgagaacttttacgatgatatcaagttcttggataaggatggtgaaaagccaagaagcttcggccgtaataaaaggggagggccattcaagaaaagaaagacaaggcactgatatggatacaccagtggttcctttagctgcttcagtgcaccaattttgttgccatgaaaaagatacaaattttcgatttgcttttatgattaaatgttgaaagtggtgaatgtgagaacttgttatcagttttagtattggttcatggtcatgctcttgcagtaaaattaggaagagaccttttctcttt

SEQ ID NO: 1510 - protein, 312 aa, Arabidopsis thaliana
MEEITKPVLVGIVKKEAPQLASVLREMKNVLDVVRSKVEALTALVKANSFPTAGGISYLEAKHLLLLSYCQDLVYYILRKAKGLSIDGHPLVRSLVEIRMFLEKIRPIDKKLQYQIQKLTTAGGPVTELAHSEGKGSCEAQKSEDLSNYKPKPDLLADKEDDQEDDGVYRPPKFAPMSMEDKTSKQERDAARKEKHFFRQATENTYMKDVLDDLEDRPEEIRDYYGVESNEQKRFMAQYERQQKAEEELFTRAPRTKEDKKREKRLKSSSGLHELTENFYDDIKFLDKDGEKPRSFGRNKRGGPFKKRKTRH

SEQ ID NO: 1511 - protein, 286 aa, Arabidopsis thaliana
MKNVLDVVRSKVEALTALVKANSFPTAGGISYLEAKHLLLLSYCQDLVYYILRKAKGLSIDGHPLVRSLVEIRMFLEKIRPIDKKLQYQIQKLTTAGGPVTELAHSEGKGSCEAQKSEDLSNYKPKPDLLADKEDDQEDDGVYRPPKFAPMSMEDKTSKQERDAARKEKHFFRQATENTYMKDVLDDLEDRPEEIRDYYGVESNEQKRFMAQYERQQKAEEELFTRAPRTKEDKKREKRLKSSSGLHELTENFYDDIKFLDKDGEKPRSFGRNKRGGPFKKRKTRH

SEQ ID NO: 1512 - protein, 213 aa, Arabidopsis thaliana
MFLEKIRPIDKKLQYQIQKLTTAGGPVTELAHSEGKGSCEAQKSEDLSNYKPKPDLLADKEDDQEDDGVYRPPKFAPMSMEDKTSKQERDAARKEKHFFRQATENTYMKDVLDDLEDRPEEIRDYYGVESNEQKRFMAQYERQQKAEEELFTRAPRTKEDKKREKRLKSSSGLHELTENFYDDIKFLDKDGEKPRSFGRNKRGGPFKKRKTRH

SEQ ID NO: 1513 - DNA, 978 bp, Arabidopsis thaliana
gatttcattttatttcttctccaaccattctcaatcctctctctccaatggcttccttatccttcgtttcctcttctcaccttacgctacgcactccttctattgccctacgcagcactggctcttctcctcgaacctccgtttcattctccgtcaaggctcaatccgtcgcgctttcacaggacgatttgaagaagctcgcggcggagaaagctgtggaggcaattaaacctgggatggttctagggctcggaaccggatccaccgcagctttcgctgttgatcagatcgggaaactactctcttccggtgaactctacgatattgtcggtatcccaacgtcgaaacgaacggaggaacaagcacggtcgttagggattcctcttgttgggttagatacacatccgagaatcgatctcgctattgacggagcagacgaggtagatccgaatcttgatttagtcaaaggtcgtggaggtgctcttctccgtgagaaaatggtggaagctgtggctgacaagtttattgttgtggctgatgataccaaactcgttacaggactcggtggaagtggattagctatgccggtggaagttgttcaattctgctggaactttaatttgattagattgcaagacctcttcaaggaatttggatgtgaatcaaagcttagagttgatggtgatggcaagccttatgtgactgataacagtaattacattattgatttgtattttaagactcctttgaaggatggattcgctgcggctaaagagattgggaagtttcaaggagtggtggagcatggtctgtttctcggaatggctacttctgtcattatcgctggaaagaatggcgttgaagttatgaccaagtgaggttaaaagttcaatctttctcttcttctttgattgacaaatttttctcctttgtaaaattatcaattgagtttttatgtgagatcatttcaatttcgtg

SEQ ID NO: 1514 - protein, 291 aa, Arabidopsis thaliana
FHFISSPTILNPLSPMASLSFVSSSHLTLRTPSIALRSTGSSPRTSVSFSVKAQSVALSQDDLKKLAAEKAVEAIKPGMVLGLGTGSTAAFAVDQIGKLLSSGELYDIVGIPTSKRTEEQARSLGIPLVGLDTHPRIDLAIDGADEVDPNLDLVKGRGGALLREKMVEAVADKFIVVADDTKLVTGLGGSGLAMPVEVVQFCWNFNLIRLQDLFKEFGCESKLRVDGDGKPYVTDNSNYIIDLYFKTPLKDGFAAAKEIGKFQGVVEHGLFLGMATSVIIAGKNGVEVMTK

SEQ ID NO: 1515 - protein, 276 aa, Arabidopsis thaliana
MASLSFVSSSHLTLRTPSIALRSTGSSPRTSVSFSVKAQSVALSQDDLKKLAAEKAVEAIKPGMVLGLGTGSTAAFAVDQIGKLLSSGELYDIVGIPTSKRTEEQARSLGIPLVGLDTHPRIDLAIDGADEVDPNLDLVKGRGGALLREKMVEAVADKFIVVADDTKLVTGLGGSGLAMPVEVVQFCWNFNLIRLQDLFKEFGCESKLRVDGDGKPYVTDNSNYIIDLYFKTPLKDGFAAAKEIGKFQGVVEHGLFLGMATSVIIAGKNGVEVMTK

SEQ ID NO: 1516 - protein, 213 aa, Arabidopsis thaliana
MVLGLGTGSTAAFAVDQIGKLLSSGELYDIVGIPTSKRTEEQARSLGIPLVGLDTHPRIDLAIDGADEVDPNLDLVKGRGGALLREKMVEAVADKFIVVADDTKLVTGLGGSGLAMPVEVVQFCWNFNLIRLQDLFKEFGCESKLRVDGDGKPYVTDNSNYIIDLYFKTPLKDGFAAAKEIGKFQGVVEHGLFLGMATSVIIAGKNGVEVMTK

SEQ ID NO: 1517 - DNA, 1067 bp, Arabidopsis thaliana
ggactataagtttccatgagaaagaagaagtaatcacacacttgttcttcgattcgtttctgggaactgagaatatttaagaacacgatggctatggccgctttaaatcagctttttgttgtcctagcctcaaaacccgagcaggagaagatcacgcctgaagagtctagagctattgtctcttgccatttcaaagctttgtggacagctggttttgcgtctggtgtagggggaggtttaacttggcaagtgacaaagaagttgaaaaagccgaaaggacttgagagggttgctcttgcagctggagttgctgcttcgacttttgttgttgcttggaattggtcaagttccaaatatgcagtttcatcccttgatcatatccttagtcaagatgctacacgaatgcagaaagagcttgtgaatgtcttagtcaggtccaacagaggtgaagcttggagatggcaacttatgtccaagcatttctaccctgaatctgtttacggtgatgaaggagacaaacctcaaatgcgttggcgtagacgaaccactttcactgaaattgcctcttcttatgatgatgtcaatgcaaccaaatctcagagaaaccccaatggcttaccaaacccttctcatcgaagaatttccggtggatctgatgcttcaaagactaaacagacgctccaaaatagctctggaaactcggatggcgaaatggcggaagaagatgttcttgacattgtatttggttgttcagaagcaacagagagcattcctgcgccagttatttcaaaacttgctagcaaaacgcaaactcgcaaacagaaaagagctcaacggagacagaggcttaaaaaccgtgaagcttccacaaatactcctcagtatgaacttgcatagagaaaacaaaacaattatgcttcttctgctttatgtttatcacacatgtatttgtctctttatcgattgcttaagttcttattccaatttatcattttgaatctcattttatgaaggatgattatgtaagaatattgttattgaagatgataagatcttttcattttacc

SEQ ID NO: 1518 - protein, 269 aa, Arabidopsis thaliana
MAMAALNQLFVVLASKPEQEKITPEESRAIVSCHFKALWTAGFASGVGGGLTWQVTKKLKKPKGLERVALAAGVAASTFVVAWNWSSSKYAVSSLDHILSQDATRMQKELVNVLVRSNRGEAWRWQLMSKHFYPESVYGDEGDKPQMRWRRRTTFTEIASSYDDVNATKSQRNPNGLPNPSHRRISGGSDASKTKQTLQNSSGNSDGEMAEEDVLDIVFGCSEATESIPAPVISKLASKTQTRKQKRAQRRQRLKNREASTNTPQYELA

SEQ ID NO: 1519 - protein, 267 aa, Arabidopsis thaliana
MAALNQLFVVLASKPEQEKITPEESRAIVSCHFKALWTAGFASGVGGGLTWQVTKKLKKPKGLERVALAAGVAASTFVVAWNWSSSKYAVSSLDHILSQDATRMQKELVNVLVRSNRGEAWRWQLMSKHFYPESVYGDEGDKPQMRWRRRTTFTEIASSYDDVNATKSQRNPNGLPNPSHRRISGGSDASKTKQTLQNSSGNSDGEMAEEDVLDIVFGCSEATESIPAPVISKLASKTQTRKQKRAQRRQRLKNREASTNTPQYELA

SEQ ID NO: 1520 - protein, 164 aa, Arabidopsis thaliana
MQKELVNVLVRSNRGEAWRWQLMSKHFYPESVYGDEGDKPQMRWRRRTTFTEIASSYDDVNATKSQRNPNGLPNPSHRRISGGSDASKTKQTLQNSSGNSDGEMAEEDVLDIVFGCSEATESIPAPVISKLASKTQTRKQKRAQRRQRLKNREASTNTPQYELA

SEQ ID NO: 1521 - DNA, 1762 bp, Arabidopsis thaliana
atctccactcttctttcttcttaccaaattactcaatccatctccctctcttcttctccttctccaaacaacaaaccaaagcttctctcttttcttgcttcagagagacctagaagagttatcaacatgagtcttcttctacatctctttgctctgtctctgctcatctctgtttcaggagcaaagttctccggccggccaggaatcaactatggccagctcggaaacaacctcccgtcaccgtccgactcagtcaacctcatcaagtccctaaacgcgaaacgcgtcaaactctacgacgctaacccaaaaatcctcgccgcgttaaacggcaccgacattaccgtctccgtcatggtcccaaacgagctcctcgtcaacatctccaaatccgcatcactctccgacgactggatccgatccaacatcctcccgttttacccaaccaccaagatccgttacctcctcgtcggcaacgagatcctctctttaccagactctgagctcaaatcttcactcgttcccgcaatgcgcaagatccaacgctccttaaagtctctcggcgttaaaaaagtcaaagtcggtactacactcgccaccgacgttctccaatcttcgtttcctccgtctagcggcgagtttcgggaggatatctccggtttaattatgaaaccgatgctccaattcttaaaccggaccaaatctttcctattcgttgatgtttacccgtatttcgcgtgggcacaagatccgacccatgtggatctcgattacgcgattttcgaatctaccaacgtcaccgtcacggatccggtttcgaatctgacataccacaacctattcgatcagatgattgacgctttcgtcttcgccatgaaacgagtcgggtatccggatattcggatctgggtcgcggaaacgggttggcccaataacggtgactacgaccaaattggagcgaatatttacaacgccgctacttacaatcgcaatgttgtcaagaaactcgccgctgacccgcccgtaggtacgcccgcccgacccggaaaggttctaccggcgtttgtattcgcactttacaacgaaaatcagaaaacgggtccgggtacggagcggcatttcggacttttacatccgaatgggactcaggtttacgggattgatttgtcggggaagacggagtacaaggaatcattgccggcgccggagaataacgacctgtacaaagggaagatttggtgcgtggtggctaaaggagcgaattggactcagctaggtgatgctctatcgtacgcttgctcacaggggaataatacctgtgacccgattcaacgcggaggcccatgtcagaaacctgatttgaccgttttgcacgccagttacgcctttagctcttattgggcccaatttcgtaagatcgggggaacttgctccttcaacggcttagctacacaaaccatcaaagatccaagttacggacgatgtgagtttccgagcgtgacattgtgaagacttacgagttacgaaaatgcatggtcgagaagagacgcacgagggaaaaccgcacgatgttacggctttcattaatggaaacagcacgtgactctctgtacgatgttacgtagcttgattatttagaaacggcacgtgattagtgtttaacttgctgtttatttattttatttttcttttcccgcgaataatgaaaactcatgaaataattaattcgttttcgggtaatgcaatcgccaatcggtctctt

SEQ ID NO: 1522 - protein, 502 aa, Arabidopsis thaliana
ISTLLSSYQITQSISLSSSPSPNNKPKLLSFLASERPRRVINMSLLLHLFALSLLISVSGAKFSGRPGINYGQLGNNLPSPSDSVNLIKSLNAKRVKLYDANPKILAALNGTDITVSVMVPNELLVNISKSASLSDDWIRSNILPFYPTTKIRYLLVGNEILSLPDSELKSSLVPAMRKIQRSLKSLGVKKVKVGTTLATDVLQSSFPPSSGEFREDISGLIMKPMLQFLNRTKSFLFVDVYPYFAWAQDPTHVDLDYAIFESTNVTVTDPVSNLTYHNLFDQMIDAFVFAMKRVGYPDIRIWVAETGWPNNGDYDQIGANIYNAATYNRNVVKKLAADPPVGTPARPGKVLPAFVFALYNENQKTGPGTERHFGLLHPNGTQVYGIDLSGKTEYKESLPAPENNDLYKGKIWCVVAKGANWTQLGDALSYACSQGNNTCDPIQRGGPCQKPDLTVLHASYAFSSYWAQFRKIGGTCSFNGLATQTIKDPSYGRCEFPSVTL

SEQ ID NO: 1523 - protein, 460 aa, Arabidopsis thaliana
MSLLLHLFALSLLISVSGAKFSGRPGINYGQLGNNLPSPSDSVNLIKSLNAKRVKLYDANPKILAALNGTDITVSVMVPNELLVNISKSASLSDDWIRSNILPFYPTTKIRYLLVGNEILSLPDSELKSSLVPAMRKIQRSLKSLGVKKVKVGTTLATDVLQSSFPPSSGEFREDISGLIMKPMLQFLNRTKSFLFVDVYPYFAWAQDPTHVDLDYAIFESTNVTVTDPVSNLTYHNLFDQMIDAFVFAMKRVGYPDIRIWVAETGWPNNGDYDQIGANIYNAATYNRNVVKKLAADPPVGTPARPGKVLPAFVFALYNENQKTGPGTERHFGLLHPNGTQVYGIDLSGKTEYKESLPAPENNDLYKGKIWCVVAKGANWTQLGDALSYACSQGNNTCDPIQRGGPCQKPDLTVLHASYAFSSYWAQFRKIGGTCSFNGLATQTIKDPSYGRCEFPSVTL

SEQ ID NO: 1524 - protein, 384 aa, Arabidopsis thaliana
MVPNELLVNISKSASLSDDWIRSNILPFYPTTKIRYLLVGNEILSLPDSELKSSLVPAMRKIQRSLKSLGVKKVKVGTTLATDVLQSSFPPSSGEFREDISGLIMKPMLQFLNRTKSFLFVDVYPYFAWAQDPTHVDLDYAIFESTNVTVTDPVSNLTYHNLFDQMIDAFVFAMKRVGYPDIRIWVAETGWPNNGDYDQIGANIYNAATYNRNVVKKLAADPPVGTPARPGKVLPAFVFALYNENQKTGPGTERHFGLLHPNGTQVYGIDLSGKTEYKESLPAPENNDLYKGKIWCVVAKGANWTQLGDALSYACSQGNNTCDPIQRGGPCQKPDLTVLHASYAFSSYWAQFRKIGGTCSFNGLATQTIKDPSYGRCEFPSVTL

SEQ ID NO: 1525 - DNA, 1079 bp, Arabidopsis thaliana
gtagaagaagaagaaccctaactaaacccaacgccggcctctctttctctctctccccgcttctctcgtcgatcgctgaccatggccaaggacaaactcaagcctcttctctcctctgatgctgcaggtgatatcgctgatactcctctccgagagaagaagcataagaagaagagcaagaagcgagctgaacctgaacctgatataccctctacacgagattccggtcttgatgaagatagagatggagtattggtagatgatactctaaatgagccaacgataggtgataaacttgagagtcttgacttattaaatggcgaaaaggttaacagtgaggagagtaatagagattctgctcctggcgatgataagcctcctactgctgcttctgttaacgttcttctgagacaagcattgcatgccgatgatcgttctcttctactcgactgcttgtacaaccgagatgagcaggtgattgctaattcggttgctaagttgaattcagccgaagtactcaagcttctaaatgcccttctaccaatactacaatcaaggggtgctattttggcttgtacaattccatggataaagagtctgttacttactcattctagtggaattatgtcccaagagtcatcattactcgctttaaacaccatgtatcagctcatcgaatcacgggtttcaactattcatactgccgtagaggtttcaagtggcttggacttgattgtggacgacttggatgaagaagaagatgaaggtcccgtgatctatgaggacaaggacagtgatgaagacgaagaagaaggaatagaggaagcaatggagacagatgaagaggcagacgactcagcagatgaagctgctgatggtgtgaatgattttgaaggatttgacgacatgagtgattgataaagctcctgaaaatggcaaaagttttgatttgtgtgaggctgatgttagatgttaagaatatggctaaaaggttcaatctttcgtcaagaagtctgtaatacgtaatggttatatcgatatgaacgagactttgtgctaaggaagagttaatttttaag

SEQ ID NO: 1526 - protein, 278 aa, Arabidopsis thaliana
MAKDKLKPLLSSDAAGDIADTPLREKKHKKKSKKRAEPEPDIPSTRDSGLDEDRDGVLVDDTLNEPTIGDKLESLDLLNGEKVNSEESNRDSAPGDDKPPTAASVNVLLRQALHADDRSLLLDCLYNRDEQVIANSVAKLNSAEVLKLLNALLPILQSRGAILACTIPWIKSLLLTHSSGIMSQESSLLALNTMYQLIESRVSTIHTAVEVSSGLDLIVDDLDEEEDEGPVIYEDKDSDEDEEEGIEEAMETDEEADDSADEAADGVNDFEGFDDMSD

SEQ ID NO: 1527 - DNA, 1349 bp, Arabidopsis thaliana
gtgaattctactatccatccaccaagcactctgtgtgcctctgcaaattaacaatttcctcagaacaattacatttcgattcgattcgattctcttatcttcttgatctctgtttgttcatctgtggtggatctccagatgttggttttgagaattttgtcgcgagtaacccgcaacgcgggcatacgctcatctctatccgccgtcactcttccggcgaggaatcagactcctgttttctcgagccggtttcactccctagctcacgatttctcgcataagcttgttccagctcagatgtctatgatggattcgtttgcactgcaaaggttcaatttttcttcctctacctcgcctgaatcagatgagaagaagacccacactgaggcctcaaagacaagtgaagagaaacctacagctgaggcaaaccaaccaggtcttgactctgaatctaaagattctgtgacagattctgcaaaaagaaagcggaaaggtgctaaaggagctgcatcttcatcttctgaatcagattctgagagtgatgatgatgaattgtcagccgatgatttggtgaagctcgtagctgagaaggaagagctactgtctgagaaggaagaagagattaagcagttgaaagacaaagttcttcgcacttatgctgagatggagaatgtcatggacagaacaagacgtgatgctgaaaacaccaaaaagtatgccgtacagaattttgcaaagagcctattggatgtggcggataatcttggaagagcttcttcggttgtcaaagaaagcttctcaaagcttgacacctcagaagattctgctggagcagctccactattaaagacccttttagaaggagtggagatgactgagaaacagcttgctgaggtatttaagaaatttggtatggagaagtatgatcctataaacgagccatttgatccaaacagacataacgcagtgttccaagtccctgatgcttctaagccagaaggcacagttgctcatgtcttgaagtctggatacacgctgtatgaccgagttataagaccagctgaggttggtgttacccagggaggagagaaccaagaagaaaagaaagagtctgatgcttaagaagaagtcagctggttttcataaattttgttacggttctatgtttccattaacatcttctcgagtcttcgagtcatagttttcttttgtggtttggttattcattagatgaacaagatctcccataagttgctggacatggcatttgcaggggaaatcctgcttctgtgtctgttttctctatctccatgctataattgaacgaggaaaatatcattttacatccc

SEQ ID NO: 1528 - protein, 327 aa, Arabidopsis thaliana
MLVLRILSRVTRNAGIRSSLSAVTLPARNQTPVFSSRFHSLAHDFSHKLVPAQMSMMDSFALQRFNFSSSTSPESDEKKTHTEASKTSEEKPTAEANQPGLDSESKDSVTDSAKRKRKGAKGAASSSSESDSESDDDELSADDLVKLVAEKEELLSEKEEEIKQLKDKVLRTYAEMENVMDRTRRDAENTKKYAVQNFAKSLLDVADNLGRASSVVKESFSKLDTSEDSAGAAPLLKTLLEGVEMTEKQLAEVFKKFGMEKYDPINEPFDPNRHNAVFQVPDASKPEGTVAHVLKSGYTLYDRVIRPAEVGVTQGGENQEEKKESDA

SEQ ID NO: 1529 - protein, 274 aa, Arabidopsis thaliana
MSMMDSFALQRFNFSSSTSPESDEKKTHTEASKTSEEKPTAEANQPGLDSESKDSVTDSAKRKRKGAKGAASSSSESDSESDDDELSADDLVKLVAEKEELLSEKEEEIKQLKDKVLRTYAEMENVMDRTRRDAENTKKYAVQNFAKSLLDVADNLGRASSVVKESFSKLDTSEDSAGAAPLLKTLLEGVEMTEKQLAEVFKKFGMEKYDPINEPFDPNRHNAVFQVPDASKPEGTVAHVLKSGYTLYDRVIRPAEVGVTQGGENQEEKKESDA

SEQ ID NO: 1530 - protein, 272 aa, Arabidopsis thaliana
MMDSFALQRFNFSSSTSPESDEKKTHTEASKTSEEKPTAEANQPGLDSESKDSVTDSAKRKRKGAKGAASSSSESDSESDDDELSADDLVKLVAEKEELLSEKEEEIKQLKDKVLRTYAEMENVMDRTRRDAENTKKYAVQNFAKSLLDVADNLGRASSVVKESFSKLDTSEDSAGAAPLLKTLLEGVEMTEKQLAEVFKKFGMEKYDPINEPFDPNRHNAVFQVPDASKPEGTVAHVLKSGYTLYDRVIRPAEVGVTQGGENQEEKKESDA

SEQ ID NO: 1531 - DNA, 1384 bp, Arabidopsis thaliana
agtccatgaaatttcactacttttataactctctctccctccttcttcttcttccataaaactcttcactaaacctaaagatctcttaagcttaattttgcaagatcatggaccaaagcaattctcttcttagctggacttacttctctcatggaaagacaacggaagagctaagacagactctcgtgtacacaacaatggagttagaacaaacaaagcttgtggctcacgaggagctaaggaagagagatgaacaactgatccacctagaagatgttttaaccaaaaccctcaaagaaagagacgaagctctagagaaatataatcatctcctcttaaataatctcttacttcaacagaagcagcaacagaatcagaatcagaaacaagaacttgtcactcctcctttatcaggagcttcaagtattattgaagacgagcaagttcagccacagcagccgcagcttaactcaaacaagagcttttcgtcttcagacactgaagaaagcatcatgtcaccatcagtgattgatccagtgacgatgaaccaacagattgaagtctcaggagatgagatgttggctacattgttgcctgacaaaccactgcctgaaaagggaaaactcttacaagctgttatcaaggcaggtcctttgcttcagacacttctcttagctggtcctctgcctcaatggcgccacccaccgcctccacttgagacctctgagatccctcctgtcaccattccactacctcagtttcagaacaatggctgtgggaactccaacaagaaaagggcattctcaatctcagatgaaacttattcagagactaagtatcagaaagttcttctccattaaccggctactgatctttttatccttactcaacaaaatactaatatatagtctttctaatataccaatatacagatcacttttcagtattaatctcacttagggtactagtgagagtgatctttttagtcagtttgttgtagatagagcttgatttgaatttgtggagagtgaatctgatccatttagggtttagatctagagagtgatgggaatgaaactcccctggtttaactcatactcgaacatgagtgttttttttaccaagtgagagagttttgctatttgcttttcttttgttgtgcttattgatttcttgttttgtttcctaaacccaattttacattcatgttttggctccatgaatgtaaacttattggggtgttttgtgttttttttcttcctttgtaatccaatttcaccttggtgtaaaatactaaaaatctaaaggaaatgtgatgtttctgttttcaggaaatgtaatgtatagtatgtaaagactttgattatatatatataatatatat

SEQ ID NO: 1532 - protein, 250 aa, Arabidopsis thaliana
MDQSNSLLSWTYFSHGKTTEELRQTLVYTTMELEQTKLVAHEELRKRDEQLIHLEDVLTKTLKERDEALEKYNHLLLNNLLLQQKQQQNQNQKQELVTPPLSGASSIIEDEQVQPQQPQLNSNKSFSSSDTEESIMSPSVIDPVTMNQQIEVSGDEMLATLLPDKPLPEKGKLLQAVIKAGPLLQTLLLAGPLPQWRHPPPPLETSEIPPVTIPLPQFQNNGCGNSNKKRAFSISDETYSETKYQKVLLH

SEQ ID NO: 1533 - protein, 220 aa, Arabidopsis thaliana
MELEQTKLVAHEELRKRDEQLIHLEDVLTKTLKERDEALEKYNHLLLNNLLLQQKQQQNQNQKQELVTPPLSGASSIIEDEQVQPQQPQLNSNKSFSSSDTEESIMSPSVIDPVTMNQQIEVSGDEMLATLLPDKPLPEKGKLLQAVIKAGPLLQTLLLAGPLPQWRHPPPPLETSEIPPVTIPLPQFQNNGCGNSNKKRAFSISDETYSETKYQKVLLH

SEQ ID NO: 1534 - DNA, 1977 bp, Arabidopsis thaliana
attgtcactcgtaaactcgccgccgtggagagagaagggagaatggaggatatcgaggatttgttggccggaggagtcggtggtgcaccaccgggattccgattacccttgaatgcagtcggaattaatccgaagacgaataagagcaaacgtattagctcgaaaccggatcaaattactgcttcgaatcgtgactcgcttgctccaccatcgatgaagattccaggaactcagacgatatacatcaagacgtttggatgttctcataatcagagtgatagtgagtatatggctggtcagctttctgcatttggctatgcgttgacagaagtcccggaggaagctgatttatggctcattaacacctgtactgtgaagtcccctagccagtctgcgatgtctactttgataacgaggggtagaagtgggaaaaagcctcttgtgattgcgggatgtgttcctcagggcagtcgtgatcttaaagaactggaaggcgttagtgtagttggagtccaacagattgatcgtgttgttgagattgttgaagaaactcttaagggtcatgaagtacggttgctgactcggaagactttgcctgcgcttgatctcccaaaggtgcggaggaacaattttatcgaaattctccccattaatgttggctgtttgggtgcctgtacttactgcaagaccaagcatgcccgtggtcatttaggaagttacacagttgatagtcttgtggagcgggtgagaactgtaatctctgaaggagtcaaggagatttggttaagcagcgaggacactggagcatatggtcgtgacataggagttaatcttccaatactgcttaatgctatcgttaaggaacttccttctgatcaaagcacaatgctaaggattgggatgactaatcctccctttattttagagcatttgaaagaaatagcggcagtgttacgtcacccatgtgtctacacctttcttcatgtccctgtgcaatctggtagcgattctgtgttgacggccatgaacagggaatatacagcaagtgagttcaggactgtggtagacaccttaacagagcttgtgccaggaatgcaaattgctactgatataatatgcggttttcctggtgaaaccgatgaagatttttctcagacagttgaactcatcaaggattacaagtttcctcaagttcatatttctcagttttaccccaggccagggaccccagcagcaaagatgaagaaggtacaaagtaaaatagtgaagcaacgaagccgtgaattgacttctgtctttgaggcttttgcgccttacaccggaatggagtgcagagaagagaggatatggataactgaagtagctactgatggaattcatttggttggacatacgaagggatatgtacaggtcttagttactggaccagaaagtatgcttgggacttcagctatggcgaggataacatctgtggggagatggtcagtatttggggaagtgattgagacatttagctctgcaaatagagaaacaaaatcccgagaggaaacaaagctgccttgttcgtcgaatgttagcacttgtgagacttgcacttgctctgctgagagctgtggagaagagagatcaggagaggcgtgtaacatttctggaaatatctcaggacaagatgataacaagggaaagtcaaagaaagaagagaaggaggtacaagaggtcgtcgtaccgggaagcagcgtagcaaattggggtttcattgataaggcacttgtctgtggagtgttcgtaagctctgtcaccattcttgttttgttgattagcattgcatgtagagttttgctgcggtaatgaatcagtgtgtccgactaatgtagtctttcgaataattttcgtcttttacttgtctaagaaatattccgtgatgtactcactaaatcaaaccttgatggaaaccaatcaaccatgtagaatactagt

SEQ ID NO: 1535 - protein, 615 aa, Arabidopsis thaliana
IVTRKLAAVEREGRMEDIEDLLAGGVGGAPPGFRLPLNAVGINPKTNKSKRISSKPDQITASNRDSLAPPSMKIPGTQTIYIKTFGCSHNQSDSEYMAGQLSAFGYALTEVPEEADLWLINTCTVKSPSQSAMSTLITRGRSGKKPLVIAGCVPQGSRDLKELEGVSVVGVQQIDRVVEIVEETLKGHEVRLLTRKTLPALDLPKVRRNNFIEILPINVGCLGACTYCKTKHARGHLGSYTVDSLVERVRTVISEGVKEIWLSSEDTGAYGRDIGVNLPILLNAIVKELPSDQSTMLRIGMTNPPFILEHLKEIAAVLRHPCVYTFLHVPVQSGSDSVLTAMNREYTASEFRTVVDTLTELVPGMQIATDIICGFPGETDEDFSQTVELIKDYKFPQVHISQFYPRPGTPAAKMKKVQSKIVKQRSRELTSVFEAFAPYTGMECREERIWITEVATDGIHLVGHTKGYVQVLVTGPESMLGTSAMARITSVGRWSVFGEVIETFSSANRETKSREETKLPCSSNVSTCETCTCSAESCGEERSGEACNISGNISGQDDNKGKSKKEEKEVQEVVVPGSSVANWGFIDKALVCGVFVSSVTILVLLISIACRVLLR

SEQ ID NO: 1536 - protein, 601 aa, Arabidopsis thaliana
MEDIEDLLAGGVGGAPPGFRLPLNAVGINPKTNKSKRISSKPDQITASNRDSLAPPSMKIPGTQTIYIKTFGCSHNQSDSEYMAGQLSAFGYALTEVPEEADLWLINTCTVKSPSQSAMSTLITRGRSGKKPLVIAGCVPQGSRDLKELEGVSVVGVQQIDRVVEIVEETLKGHEVRLLTRKTLPALDLPKVRRNNFIEILPINVGCLGACTYCKTKHARGHLGSYTVDSLVERVRTVISEGVKEIWLSSEDTGAYGRDIGVNLPILLNAIVKELPSDQSTMLRIGMTNPPFILEHLKEIAAVLRHPCVYTFLHVPVQSGSDSVLTAMNREYTASEFRTVVDTLTELVPGMQIATDIICGFPGETDEDFSQTVELIKDYKFPQVHISQFYPRPGTPAAKMKKVQSKIVKQRSRELTSVFEAFAPYTGMECREERIWITEVATDGIHLVGHTKGYVQVLVTGPESMLGTSAMARITSVGRWSVFGEVIETFSSANRETKSREETKLPCSSNVSTCETCTCSAESCGEERSGEACNISGNISGQDDNKGKSKKEEKEVQEVVVPGSSVANWGFIDKALVCGVFVSSVTILVLLISIACRVLLR

SEQ ID NO: 1537 - protein, 544 aa, Arabidopsis thaliana
MKIPGTQTIYIKTFGCSHNQSDSEYMAGQLSAFGYALTEVPEEADLWLINTCTVKSPSQSAMSTLITRGRSGKKPLVIAGCVPQGSRDLKELEGVSVVGVQQIDRVVEIVEETLKGHEVRLLTRKTLPALDLPKVRRNNFIEILPINVGCLGACTYCKTKHARGHLGSYTVDSLVERVRTVISEGVKEIWLSSEDTGAYGRDIGVNLPILLNAIVKELPSDQSTMLRIGMTNPPFILEHLKEIAAVLRHPCVYTFLHVPVQSGSDSVLTAMNREYTASEFRTVVDTLTELVPGMQIATDIICGFPGETDEDFSQTVELIKDYKFPQVHISQFYPRPGTPAAKMKKVQSKIVKQRSRELTSVFEAFAPYTGMECREERIWITEVATDGIHLVGHTKGYVQVLVTGPESMLGTSAMARITSVGRWSVFGEVIETFSSANRETKSREETKLPCSSNVSTCETCTCSAESCGEERSGEACNISGNISGQDDNKGKSKKEEKEVQEVVVPGSSVANWGFIDKALVCGVFVSSVTILVLLISIACRVLLR

SEQ ID NO: 1538 - DNA, 1339 bp, Arabidopsis thaliana
acatatgaacataacccaatctgaagatcaatcataaccttaaaccatctctcataattttagtatttctattctcaccaccaaaactcgttgatacatcacaccccaactgttgttactcatgtcctacagatcgatttaccgcactcttcgaccggtactatcatcttcggtacaatcctccggtttaggaattggaggattcaggggacatctcattagccacttgcccaatgttcggctattgagctctgacacgtcatctccggtaagtgggaataaccagccagaaaatcctatccgaacggccgatggtaaagttatatccacttattggggtatacctcctactaagatcactaaaccggacggttcagcttggaagtggaattgttttcagccatgggattcatacaaaccggatgtgtccattgatgtaactaaacatcataaaccctccaatttcactgacaaattcgcatattggaccgttcaaactctgaaaataccggttcaactattttttcagaggaagcacatgtgccatgcgatgttgctagagacggtggctgcggtgccgggaatggtcggggggatgcttttgcacttgaaatctctccggaggttcgaacatagcgggggatggatcaaagctttgctcgaagaggctgagaacgagcgtatgcatctcatgactttcatcgaactttcacaacccaaatggtacgaacgagcgattgtgttcacggtccaaggcgttttcttcaacgcatatttcctggcttatgtaatttcacccaaacttgctcatcgtatcactggatacttagaagaagaggctgtaaattcttacactgaatttctcaaagacattgatgccggaaaattcgaaaattcgccagctccagccatcgcaatggattactggcggttccctaaagatgcaacgcttagggatgtggtttatgttatccgagctgaggaagctcccccccgtgatattaaccactatgcttcggatatacaattcaaaggacatgaactcaaggaagctccggctcctattggatatcattaaagattatgtgacaaagtcacaaagctgtgtatacatctatgaacatatgttgttgtggatctccatgatatttttattttatgttttcgatttatttaaaactgttattcgtttttattagctcaatatggatatttaaaccatattattttgttacgatttatgaacatagtactactcatgtgtgtgtaaaagatcatactgcctggacacgaagcggatatccggaaaaattataatatttgttttttgattcgtttc

SEQ ID NO: 1539 - protein, 318 aa, Arabidopsis thaliana
MSYRSIYRTLRPVLSSSVQSSGLGIGGFRGHLISHLPNVRLLSSDTSSPVSGNNQPENPIRTADGKVISTYWGIPPTKITKPDGSAWKWNCFQPWDSYKPDVSIDVTKHHKPSNFTDKFAYWTVQTLKIPVQLFFQRKHMCHAMLLETVAAVPGMVGGMLLHLKSLRRFEHSGGWIKALLEEAENERMHLMTFIELSQPKWYERAIVFTVQGVFFNAYFLAYVISPKLAHRITGYLEEEAVNSYTEFLKDIDAGKFENSPAPAIAMDYWRFPKDATLRDVVYVIRAEEAPPRDINHYASDIQFKGHELKEAPAPIGYH

SEQ ID NO: 1540 - protein, 179 aa, Arabidopsis thaliana
MCHAMLLETVAAVPGMVGGMLLHLKSLRRFEHSGGWIKALLEEAENERMHLMTFIELSQPKWYERAIVFTVQGVFFNAYFLAYVISPKLAHRITGYLEEEAVNSYTEFLKDIDAGKFENSPAPAIAMDYWRFPKDATLRDVVYVIRAEEAPPRDINHYASDIQFKGHELKEAPAPIGYH

SEQ ID NO: 1541 - protein, 175 aa, Arabidopsis thaliana
MLLETVAAVPGMVGGMLLHLKSLRRFEHSGGWIKALLEEAENERMHLMTFIELSQPKWYERAIVFTVQGVFFNAYFLAYVISPKLAHRITGYLEEEAVNSYTEFLKDIDAGKFENSPAPAIAMDYWRFPKDATLRDVVYVIRAEEAPPRDINHYASDIQFKGHELKEAPAPIGYH

SEQ ID NO: 1542 - DNA, 1520 bp, Arabidopsis thaliana
agatgaaaaaaatattattatttgttggagaagaaagagagattcttcttcttcgattccagcgaaggaaaagcgtattcctcgtgagcactaacttctcactcctctcttcttcttcttcatcagtctacgttcacacaatctttcacccacctattcaaagctctctccggaagtttcgaggggttggttgttggttttcccgatgacttcggatggagctacgtcgacatcagcagctgcagctgcggcggcggcagcagcggcgaggaggaagccgtcgtggagagaaagggagaataatcggaggagagaaagacggagaagagctgtagctgcgaagatatacactgggcttagagctcaaggtgattataatttgcctaaacattgtgataataatgaagtccttaaagctctttgtgttgaagctggttgggttgttgaagaagatggtactacttatcgcaagggatgcaagcctttacctggtgagatagctgggacttcatctcgagtaactccatattcatcacagaaccagagccctctttcatcagcctttcaaagtcccatcccatcttaccaagttagcccgtcttcttcatcattcccgagtccttctcgcggtgaaccaaataacaacatgtcctctacattcttccctttcctcagaaatggtggcattccttcttctcttccttccctcagaatctcaaacagttgtccagttaccccaccgctctcatcgccgacttctaagaacccgaaaccgttgcctaactgggaatctatcgctaagcaatccatggccattgctaaacaatcaatggcgtcttttaattatcctttctatgcggtttctgcacctgctagtccgacacatcgccaccagtttcataccccggctactatacctgaatgtgatgagtctgactcttccactgttgattctggtcattggataagctttcagaagtttgcacaacaacagccattctctgcctctatggtgccaacctctcctaccttcaatcttgtgaaacctgcgcctcagcagatgtctccaaatactgctgccttccaagagattggtcaaagctctgagtttaaatttgagaatagccaagttaaaccctgggaaggagagaggatacatgatgtgggtatggaggatcttgagcttacacttggaaatgggaaggctcgtggttgacataaacaactaggcaaacccaaatggcatgtcattggaatatgagaaactaatcctcttgagtattttcttcttcgtccaggtatttggatctttatggaatctcatatgttcttcacttattatccaaatatgctgcccaaagccttctccatggaagcattggagtgttagagtggttattcaattcatgaatttggtttcaaaagcattatttgtagataaaaaaatcttaagatgtatgattctgtttccttacatttgttacattaattagtggcttgaaactgtcttgtgtcttgtc

SEQ ID NO: 1543 - protein, 336 aa, Arabidopsis thaliana
MTSDGATSTSAAAAAAAAAAARRKPSWRERENNRRRERRRRAVAAKIYTGLRAQGDYNLPKHCDNNEVLKALCVEAGWVVEEDGTTYRKGCKPLPGEIAGTSSRVTPYSSQNQSPLSSAFQSPIPSYQVSPSSSSFPSPSRGEPNNNMSSTFFPFLRNGGIPSSLPSLRISNSCPVTPPLSSPTSKNPKPLPNWESIAKQSMAIAKQSMASFNYPFYAVSAPASPTHRHQFHTPATIPECDESDSSTVDSGHWISFQKFAQQQPFSASMVPTSPTFNLVKPAPQQMSPNTAAFQEIGQSSEFKFENSQVKPWEGERIHDVGMEDLELTLGNGKARG

SEQ ID NO: 1544 - protein, 189 aa, Arabidopsis thaliana
MSSTFFPFLRNGGIPSSLPSLRISNSCPVTPPLSSPTSKNPKPLPNWESIAKQSMAIAKQSMASFNYPFYAVSAPASPTHRHQFHTPATIPECDESDSSTVDSGHWISFQKFAQQQPFSASMVPTSPTFNLVKPAPQQMSPNTAAFQEIGQSSEFKFENSQVKPWEGERIHDVGMEDLELTLGNGKARG

SEQ ID NO: 1545 - DNA, 1013 bp, Arabidopsis thaliana
gcgatcacagagtgtcaaagcaatctgctttttctcctctcagattcaaaggttctctttgaagcttcgtaggtggttatactttgatggcggattatcatttcgtgtataaggacattgaaggagcgtcaactcaatgggatgatatccagcggaaattggggaatctaccggagaaggctccggctttcaaacctccggcgtatactccggcggaagacgagtcttcagctcctaaggatcaggcatggtttgataagaagacagaggaggagcttgaggatcttgaggacgacaaagatctcgacgatgatcgctttctcgaagaatacaggaagaagaggttgtctgagctaagagaggctgctaaagttaaaagatatggaacagtgactcccatctcgggctctgatttcgtgagggaggttacgcaagcttctgctgaagattgggttgttgtatgtctctataaagatggtgttgcagaatgtagtttgctattgggttgtctagacgaattgggtagtagatacccagcaacaaagttcgttaagataatatctactgattgtattccgaactaccctgattgcaatcttcctaccttgctggtgtaccaccatggcgccatcaaaggaactcatgtaggcttaaagagctttggccgtaggtgcaccccagagagtgtagccttacttctgtgtcaatcagagccagttcttaacgatggcaaaggaggagacgatgactcctcgagggaagctgtgatggctggagttcgaagacagttcatagaacgagtggtgaaggaccacgaagataaggataacgatgatggtggttacaatagtgattagaacttcaaagcttctctgtttatctctgttggttattgcttgttgagttggtgactggtaaacaaaagtgctgacttcttgtgtgatgtaatgttttttaaacattttgtaacttttgttcttttgaaagagacaggaacttcatgttgttttttg

SEQ ID NO: 1546 - protein, 256 aa, Arabidopsis thaliana
MADYHFVYKDIEGASTQWDDIQRKLGNLPEKAPAFKPPAYTPAEDESSAPKDQAWFDKKTEEELEDLEDDKDLDDDRFLEEYRKKRLSELREAAKVKRYGTVTPISGSDFVREVTQASAEDWVVVCLYKDGVAECSLLLGCLDELGSRYPATKFVKIISTDCIPNYPDCNLPTLLVYHHGAIKGTHVGLKSFGRRCTPESVALLLCQSEPVLNDGKGGDDDSSREAVMAGVRRQFIERVVKDHEDKDNDDGGYNSD

SEQ ID NO: 1547 - DNA, 621 bp, Arabidopsis thaliana
acacaacacatcaaaagcttgataaagagagagtttttagggttttcttgtacctattataagaaatactctaactgaaactttacttcttcatcaatggcttattctaaggttgcccttctcctcgtcttcaatgtcatcttcttcactttcgtcagctcgacttcggtcccttgtccaccaccaccgcccaagagctaccacaagaagcccgcaacgccatctcttaaacccacttgtaaagacgctcttaaacttaaggtatgtgctaacgtgttggatgtggttaaggtttctctaccaccaacgtccaactgttgcgctcttatcaaaggtctagttgatcttgaagccgcggtctgtctttgcactgccctaaaggctaatgttcttggtatcaaccttaatgttcccatttctttgaacgttgtcctaaaccattgtggtaagaaggttccatctggtttcaaatgtgcctagagattacacattttaaattgaggttctatataccatatttcattcttgtttttcaaattccgcgtttgatgatatctttatctattgttgtaatttgttatatgtttcatatatcaatgaaataaagtgtttcctttttcg

SEQ ID NO: 1548 - protein, 127 aa, Arabidopsis thaliana
MAYSKVALLLVFNVIFFTFVSSTSVPCPPPPPKSYHKKPATPSLKPTCKDALKLKVCANVLDVVKVSLPPTSNCCALIKGLVDLEAAVCLCTALKANVLGINLNVPISLNVVLNHCGKKVPSGFKCA

SEQ ID NO: 1549 - protein, 68 aa, Arabidopsis thaliana
MSSSSLSSARLRSLVHHHRPRATTRSPQRHLLNPLVKTLLNLRYVLTCWMWLRFLYHQRPTVALLSKV

SEQ ID NO: 1550 - DNA, 786 bp, Arabidopsis thaliana
atgggtctaatcgccggtaaagtgcgtgtgtttgttttggtgtttgctttggtcacagattttactatgggagaagcagagtttggtgatgagaagcccttgtttcctcaccctcaccctcatcctctcctccacaagaagggctttaaaaaagaattcggcgacttaggtggtggtggtggtatcagcggtggaggcggctttggagcaggtggcggttggattggaggcagtgttggaggctttggtggaggaataggcggtggatttggtggaggaggattcggaggtggagccggtaaaggagttgacggtggcttcggaaaaggagttgacggtggagccggtaaaggagttgacggtggagccgggaaaggatttgatggaggagttggcaaaggagttgacggtggagccggaaaaggatttgatggaggagtcggcaaaggatttgagggaggaatcggaaaaggaattgagggaggagtcggaaaaggatttgacggtggagcaggtaaaggagttgacggtggagccattggaggaatcggcggaggagccggtaaagaaattggtggaggaattggcggcggaggtcactgagaatttgtttaaccgtaatgtgcattgatgaggagctaaaatccaatgcatgtcatttaagaaaactaattcgttatatatgtaacaataactgaaatgtatgtcgtttctctttagtttgttttactctttgaatatgattgtatcttgcttcttcgtgcaagtcaagtgaataaaacgatt

SEQ ID NO: 1551 - protein, 200 aa, Arabidopsis thaliana
MGLIAGKVRVFVLVFALVTDFTMGEAEFGDEKPLFPHPHPHPLLHKKGFKKEFGDLGGGGGISGGGGFGAGGGWIGGSVGGFGGGIGGGFGGGGFGGGAGKGVDGGFGKGVDGGAGKGVDGGAGKGFDGGVGKGVDGGAGKGFDGGVGKGFEGGIGKGIEGGVGKGFDGGAGKGVDGGAIGGIGGGAGKEIGGGIGGGGH

SEQ ID NO: 1552 - protein, 178 aa, Arabidopsis thaliana
MGEAEFGDEKPLFPHPHPHPLLHKKGFKKEFGDLGGGGGISGGGGFGAGGGWIGGSVGGFGGGIGGGFGGGGFGGGAGKGVDGGFGKGVDGGAGKGVDGGAGKGFDGGVGKGVDGGAGKGFDGGVGKGFEGGIGKGIEGGVGKGFDGGAGKGVDGGAIGGIGGGAGKEIGGGIGGGGH

SEQ ID NO: 1553 - DNA, 460 bp, Arabidopsis thaliana
aaactgcaattggataaccacaaccagaatcgattttgaatcatcatttctataaatatatacgactcatacatacatatacatacctcttaaacaaaactgagatgagttttggaactcgtcttcttttgtttctcatactaacacttccacttgtaacatcttcatccccaaacactcttcatgtttcaggaattgtgaagacagggactacaagtagattcttgatgatgaccatcgaggattatgacgatccatctgcaaacaccagacacgatcccagcgttccgaccaatgcaaaggctgacacaacaccttaaaactcttctgagtttacttgtttagtctatgttgaataaataaatatatatataataatctctctcttttgactgagctgaattctccatttcctatactctgtatattattcatctgagtatcaaagcaaaaccttaag

SEQ ID NO: 1554 - protein, 71 aa, Arabidopsis thaliana
MSFGTRLLLFLILTLPLVTSSSPNTLHVSGIVKTGTTSRFLMMTIEDYDDPSANTRHDPSVPTNAKADTTP

SEQ ID NO: 1555 - DNA, 1391 bp, Arabidopsis thaliana
gcactctatatcaaacatttcttttaaaaatgagaaagttgttggcatcgccgtttagttcattactcgccgtcgttttcatttccgtcatctccgtcgtcagatgctgctctcctaaagatcagacggctctcaatgctttcaagtcgtcactgagcgaaccaaacctcggtatcttcaacacttggtctgaaaacactgattgttgcaaggaatggtacggtatcagctgcgatcctgattcgggtcgggtcactgatatttctctccggggagaatctgaagacgccattttccaaaaggcaggccggtccggttatatgtccggttcgattgatccagcagtttgtgacttaaccgcactcacttccctcgttctcgccgactggaaaggaatcaccggagagattcctccgtgcattacttccctagcttcgctccgtatcctcgatctcgccggcaacaagatcaccggggagattcccgcggaaatcggcaaactctcgaaactcgctgttttaaacctcgccgagaatcaaatgtccggcgagattccggcgtcactgacgtcactcatcgagttgaagcatcttgaattgacggaaaatggaatcaccggcgtgatcccggccgatttcggatcgttgaagatgttgagcagagttttactgggccgtaacgaactaaccgggtcaattccagagtcgatctcgggtatggaacggttagcggatctggatctatccaaaaaccatatcgaaggtccgatacccgaatggatgggtaacatgaaggtactctcacttttgaatctcgattgcaattcgttaaccggtccaatccccggttcgcttcttagcaattccggtttagatgttgccaatttgagccgaaatgcgttggaaggaactatacccgacgttttcgggtcaaaaacgtatttagtttcgcttgatctgtcacacaatagtctatcgggtcggatcccggattcgttgtcgtcagctaagtttgtgggacatttggatattagccataacaagctttgtgggcgtattccaacgggttttccttttgatcaccttgaagctacgtcgtttagtgacaaccaatgtctctgcggtggccctttgacgacgtcatgttaataacaaggatatggtttctggttttactgaaccgggttattctttttgctgttgctcttgttcgttgtatcaaacttgtgatattttgcttttcatttcttcgtctttcagattttagtttctaaagctaagatatgttactggcaacggacaggtacaccgatccaatatggtttgcggtctatgtacaatgaatccggatgtaaaatcaaaagcaatgttatagaatttaatttcaagatc

SEQ ID NO: 1556 - protein, 381 aa, Arabidopsis thaliana
TLYQTFLLKMRKLLASPFSSLLAVVFISVISVVRCCSPKDQTALNAFKSSLSEPNLGIFNTWSENTDCCKEWYGISCDPDSGRVTDISLRGESEDAIFQKAGRSGYMSGSIDPAVCDLTALTSLVLADWKGITGEIPPCITSLASLRILDLAGNKITGEIPAEIGKLSKLAVLNLAENQMSGEIPASLTSLIELKHLELTENGITGVIPADFGSLKMLSRVLLGRNELTGSIPESISGMERLADLDLSKNHIEGPIPEWMGNMKVLSLLNLDCNSLTGPIPGSLLSNSGLDVANLSRNALEGTIPDVFGSKTYLVSLDLSHNSLSGRIPDSLSSAKFVGHLDISHNKLCGRIPTGFPFDHLEATSFSDNQCLCGGPLTTSC

SEQ ID NO: 1557 - protein, 372 aa, Arabidopsis thaliana
MRKLLASPFSSLLAVVFISVISVVRCCSPKDQTALNAFKSSLSEPNLGIFNTWSENTDCCKEWYGISCDPDSGRVTDISLRGESEDAIFQKAGRSGYMSGSIDPAVCDLTALTSLVLADWKGITGEIPPCITSLASLRILDLAGNKITGEIPAEIGKLSKLAVLNLAENQMSGEIPASLTSLIELKHLELTENGITGVIPADFGSLKMLSRVLLGRNELTGSIPESISGMERLADLDLSKNHIEGPIPEWMGNMKVLSLLNLDCNSLTGPIPGSLLSNSGLDVANLSRNALEGTIPDVFGSKTYLVSLDLSHNSLSGRIPDSLSSAKFVGHLDISHNKLCGRIPTGFPFDHLEATSFSDNQCLCGGPLTTSC

SEQ ID NO: 1558 - protein, 275 aa, Arabidopsis thaliana
MSGSIDPAVCDLTALTSLVLADWKGITGEIPPCITSLASLRILDLAGNKITGEIPAEIGKLSKLAVLNLAENQMSGEIPASLTSLIELKHLELTENGITGVIPADFGSLKMLSRVLLGRNELTGSIPESISGMERLADLDLSKNHIEGPIPEWMGNMKVLSLLNLDCNSLTGPIPGSLLSNSGLDVANLSRNALEGTIPDVFGSKTYLVSLDLSHNSLSGRIPDSLSSAKFVGHLDISHNKLCGRIPTGFPFDHLEATSFSDNQCLCGGPLTTSC

SEQ ID NO: 1559 - DNA, 789 bp, Arabidopsis thaliana
ccgattttacgattcctctctctctctcatggtgcgatttctccagcagtaaaaatcaatggcgagaaccaagcatcgcgttaccaggtcacaacctcggaatcaaactgatgccgctgctgcttcatcttctcaggcggcaggtccaactacgaccccgacaaggagaggcggtgaaggtggagataatactcaacaaacaaatcctacaacttcaccagctactggtacaaggagaggggctaagagatccagacaggctatgccacgaggctcacagaagaagtcttatcgatacaggccaggaaccgttgctctaaaagagattcgccatttccagaagcagacaaaccttcttattccggctgccagtttcataagagaagtgagaagtataacccatatgttggcccctccccaaatcaatcgttggacagctgaagctcttgttgctcttcaagaggcggcagaagattacttggttggtttgttctcagattcaatgctctgtgctatccatgcaagacgtgttactctaatgagaaaagactttgaacttgcacgccggcttggaggaaaaggcagaccatggtgatagaaaactcactcactattcacatctcttacattgtaagtgaggatcgaatagttcacaacaagtgtgtcgtaggttgtataaggttattctctccttgtctcttggtgatgcatgtccttttattttactaaatgatctgaccaaaaccttcttttgaaacatacctggaaacccgaatttggtttgattcc

SEQ ID NO: 1560 - protein, 178 aa, Arabidopsis thaliana
MARTKHRVTRSQPRNQTDAAAASSSQAAGPTTTPTRRGGEGGDNTQQTNPTTSPATGTRRGAKRSRQAMPRGSQKKSYRYRPGTVALKEIRHFQKQTNLLIPAASFIREVRSITHMLAPPQINRWTAEALVALQEAAEDYLVGLFSDSMLCAIHARRVTLMRKDFELARRLGGKGRPW

SEQ ID NO: 1561 - protein, 110 aa, Arabidopsis thaliana
MPRGSQKKSYRYRPGTVALKEIRHFQKQTNLLIPAASFIREVRSITHMLAPPQINRWTAEALVALQEAAEDYLVGLFSDSMLCAIHARRVTLMRKDFELARRLGGKGRPW

SEQ ID NO: 1562 - protein, 105 aa, Arabidopsis thaliana
DFTIPLSLSWCDFSSSKNQWREPSIALPGHNLGIKLMPLLLHLLRRQVQLRPRQGEAVKVEIILNKQILQLHQLLVQGEGLRDPDRLCHEAHRRSLIDTGQEPLL

SEQ ID NO: 1563 - DNA, 683 bp, Arabidopsis thaliana
atgtcgtcgattcatcgtcgtcgacggcgagtacttgtgacctccacacccagattaatcttctataactgattttatcgcttagacgatcacgatctcatcgattaactgacaaatgaagcatatagtaaagatcttgagcctgttggtggctatctctgccttctggattggtcttttgcaggctgcaattattcctcgaagccatacatggttgctaccgatctactttgttgtatccctcggatgctatggcctattaatggttggagtcgggctcatgcagtttcctacttgcccccaagaagcagttctgctgcagaaggatattgcagaggctaaggacttcttcaagcacaaaggggtagatgttggatcgaattgacacaaaggcttttatcagaccattcatcagagatatttttcgttattgacaaaagacttaactgtactgtttggaatttttgaatttaacagtgtcactgaggtaaaacgcaaaagcttcgtatgcatccaaaagtaatcgcaaaagtataacaaatattccaaattgcagaaacttattagtaacaatagaagcatttacattttcttgtggtgaattaccataaagctttggcctttgtgtctagtaagttctctaggtatgcaaaagagatcgcatcaacagattgaatcaggcc

SEQ ID NO: 1564 - protein, 89 aa, Arabidopsis thaliana
MKHIVKILSLLVAISAFWIGLLQAAIIPRSHTWLLPIYFVVSLGCYGLLMVGVGLMQFPTCPQEAVLLQKDIAEAKDFFKHKGVDVGSN

SEQ ID NO: 1565 - DNA, 624 bp, Arabidopsis thaliana
aaaagatcaatatatatcagaagaacataactttcacattcaaagatcaatatatatcagaagaacataactttcacattcaaagaattttaagcgacacctcaagtttcaatggaaacaacatcacaacaatttatgtctcagagttaccttaacgctcaagaaaccgccacaagggcaacgaaaaattacctaacttcgctccattcgacacgtaaacaaccttcaaagcccttgaagaggcctgcaatatcatcatcatcacctttgaatccaatgcatcctcatgtctaccgagtcgagccagtaaacttcaaagagttggttcagaggctaaccggtgcacctgagcacgagactgtgcaggctaaaccgctcaagacttcggatgatgcagcaaagcagagttcttcatcatttgcgtttgatccatcatcttcttggggagatttctcattccaaaatcctgcaaatatttccagatggtagcttctactcttgcaaaatgcttcttttgattgaaatgcttaacattcttgtatttaattttagtttttttaataaaccagaaagatgtaatcaaatatttttcagactcgcattctagaattaatttgttatgtc

SEQ ID NO: 1566 - protein, 125 aa, Arabidopsis thaliana
METTSQQFMSQSYLNAQETATRATKNYLTSLHSTRKQPSKPLKRPAISSSSPLNPMHPHVYRVEPVNFKELVQRLTGAPEHETVQAKPLKTSDDAAKQSSSSFAFDPSSSWGDFSFQNPANISRW

SEQ ID NO: 1567 - protein, 117 aa, Arabidopsis thaliana
MSQSYLNAQETATRATKNYLTSLHSTRKQPSKPLKRPAISSSSPLNPMHPHVYRVEPVNFKELVQRLTGAPEHETVQAKPLKTSDDAAKQSSSSFAFDPSSSWGDFSFQNPANISRW

SEQ ID NO: 1568 - protein, 72 aa, Arabidopsis thaliana
MMQQSRVLHHLRLIHHLLGEISHSKILQIFPDGSFYSCKMLLLIEMLNILVFNFSFFNKPERCNQIFFRLAF

SEQ ID NO: 1569 - DNA, 769 bp, Arabidopsis thaliana
cttccgcctccgtcatagaacgcagaactgggtggatcaccgtggtcgtcaaattcctagctcctcgactccaaaaaaaaatcataaacgtattaccgtctcttgttttcctcgtaaggtattatatcggtcgaagtctccaatcatcggtctgagtaatctctgacaatggctgcaagagttttggcaagtgtgattgtgatgggctctggaatcatagccagggcttgtactcaggcatatcgtcaggcgcttgcaaatgcatcaaaaaccggggttgcgcatgaagcgacacagactattaagagagggttgactataggtgaagcagaagctagacagattcttggtgtaactgagaaatcatcttgggacgagattcttaagaaatacgacacgttgttcgaacgcaatgcgcagaatggaagcttctatctccaatctaaggtccatagagctaaggaatgcttagagactgcataccagaagagtacaacaacaagcgcatgaacaagcaataaaacaataggagcaaatcaggaacatatcttttgatacaagttatagttttaggacagaagtttgaaattgagtggagatagccgcaaaagttgaaattgagacaaggtcggtgatggccggaatgctgccagtaaccgactcaccggcgttgttaaaagtcttgttattttgtttaataatattgacttttctagttcttaggtaaactagttgaattctagcatgtctattgaattatctgagtttg

SEQ ID NO: 1570 - protein, 113 aa, Arabidopsis thaliana
MAARVLASVIVMGSGIIARACTQAYRQALANASKTGVAHEATQTIKRGLTIGEAEARQILGVTEKSSWDEILKKYDTLFERNAQNGSFYLQSKVHRAKECLETAYQKSTTTSA

SEQ ID NO: 1571 - protein, 102 aa, Arabidopsis thaliana
MGSGIIARACTQAYRQALANASKTGVAHEATQTIKRGLTIGEAEARQILGVTEKSSWDEILKKYDTLFERNAQNGSFYLQSKVHRAKECLETAYQKSTTTSA

SEQ ID NO: 1572 - DNA, 1697 bp, Arabidopsis thaliana
aaaaagacagagagacgagagacgagagctcgtcgaaccagatctctttctctttcttctctctaattttgatttttttgaattttcttctgcaaagcaaaatcgcagaagtcgtcgtgtgtccgcgttgcatcgaaccacttgttcgattctctttcgtcatcctctcttatatcatcagcaacaacaacccttgtttcaaatttcttcattttcgccggatttataatcgcagattgattctgatcgatagagatagggttattcaaggagagacctcgattgacttcaattgtcttcctgattcgatagataagatttagggttagcttgacgttgacgttgatataggggaatggagacggacaatgggaaggggttgatactagctgtagcgtcaagtgttttcattggttccagcttcattcttaagaagaaaggtcttaagcgagctggtgctattggcacccgagcaggatatggaggctatacttatttattagagccgctttggtgggcagggatggttactatgattgttggagaagctgcaaactttgtggcttacatttatgcaccagctgtactcgttactcctctcggtgcattaagtataatcatcagtgctgttttggcacatttcttattgaaggaaaaacttaagaaaatgggggttctcggatgtgtgtcttgcattgttgggtctgttgttattgttatacacgcacctaaggaacagactcctaattccgttgaggaaatatggaatctggctactcagccagcttttctaatctacgtagccataaccatgtcgattgtccttgctttaattctgcattttgaacccctgtgcggccaaacaaacattctggtttatattggaatctgttcgttaatgggtgctctcactgttatgagcataaaagctattggaattgcgataaaattaacaatggagggagtaagccagatcgggtatccacagacatggctttttgtcatggttgcagtaacttgtgtcgttacacaattgatttacctaaataaggctttggacacattcaacgcagccattgtttctccagtatactatgtaatgttcacaaccctcacaattgttgctagtgcaataatgttcaaggactggtctgggcaagacgcagccagcgtagcctctgagttatgtggattcatcactgtgctcacagggacaatgatactccatggcacaagagaagaggaacaacaacaagcttcttcagaacatgtaagatggtacgactcgagaaagagcatgaacgaagaacatttggtaagcctgtacagtcctgaatactaggaagaagaagatgcaatatctctaggctctcaatagattgagtgaaatttgccaaaaacaagcctcatgagtcttaaaactggatcaatcaacaaatctgcggtcgggttcatttttgtattgttttatggtcactgtacagacaaaaaagtttgtctagttaaaaaaacttcacattctttagttttgatctttgtgtctctcttcttagtacagtacaggtcttcttcttatctggactcttttgtccaaatttacactgttatatatttatatatgtatctacatttttctaggatgaaatattccttcattgtatctcacttgaatgaaataataaggtaaaagtttgatc

SEQ ID NO: 1573 - protein, 328 aa, Arabidopsis thaliana
METDNGKGLILAVASSVFIGSSFILKKKGLKRAGAIGTRAGYGGYTYLLEPLWWAGMVTMIVGEAANFVAYIYAPAVLVTPLGALSIIISAVLAHFLLKEKLKKMGVLGCVSCIVGSVVIVIHAPKEQTPNSVEEIWNLATQPAFLIYVAITMSIVLALILHFEPLCGQTNILVYIGICSLMGALTVMSIKAIGIAIKLTMEGVSQIGYPQTWLFVMVAVTCVVTQLIYLNKALDTFNAAIVSPVYYVMFTTLTIVASAIMFKDWSGQDAASVASELCGFITVLTGTMILHGTREEEQQQASSEHVRWYDSRKSMNEEHLVSLYSPEY

SEQ ID NO: 1574 - protein, 272 aa, Arabidopsis thaliana
MVTMIVGEAANFVAYIYAPAVLVTPLGALSIIISAVLAHFLLKEKLKKMGVLGCVSCIVGSVVIVIHAPKEQTPNSVEEIWNLATQPAFLIYVAITMSIVLALILHFEPLCGQTNILVYIGICSLMGALTVMSIKAIGIAIKLTMEGVSQIGYPQTWLFVMVAVTCVVTQLIYLNKALDTFNAAIVSPVYYVMFTTLTIVASAIMFKDWSGQDAASVASELCGFITVLTGTMILHGTREEEQQQASSEHVRWYDSRKSMNEEHLVSLYSPEY

SEQ ID NO: 1575 - protein, 269 aa, Arabidopsis thaliana
MIVGEAANFVAYIYAPAVLVTPLGALSIIISAVLAHFLLKEKLKKMGVLGCVSCIVGSVVIVIHAPKEQTPNSVEEIWNLATQPAFLIYVAITMSIVLALILHFEPLCGQTNILVYIGICSLMGALTVMSIKAIGIAIKLTMEGVSQIGYPQTWLFVMVAVTCVVTQLIYLNKALDTFNAAIVSPVYYVMFTTLTIVASAIMFKDWSGQDAASVASELCGFITVLTGTMILHGTREEEQQQASSEHVRWYDSRKSMNEEHLVSLYSPEY

SEQ ID NO: 1576 - DNA, 736 bp, Arabidopsis thaliana
ctcttgctctacgccgtcttctccaaagcaaaatcaaaagcttcttcgatcttattctcgtctggttataatttccgattctgcattcccaatagggaataatggctacagctacgtatccgcctcctccaccatattacagactctacaaggattactcagaaaaccctaattctgctcctgaacctcctcctccgattgaaggcacctacgtctgttttggaggcaactatactactgaagatgttcttccaagcttagaagaacaaggagtgcctcaactttatcccaaagattctaatcttgattacaagaatgaactcaggtcactgaatagagaactacagttacatatattggagcttgctgatgttcttgttgacagaccttctcaatatgcgaagaggattggtgaaatttcttctatcttcaagaatttgcatcaccttctcaattccttgaggcctcaccaagcgagagcaacgcttattcacattatggaacttcaaattcaacagaggaaacaagctgtggaagacattaaaagaagaagagaagaagcacagcgacttctaaaggatgcttacctcactttagatggtcaatagagtctttttttgtgtgtgtaaattagcaattaataatctgtctgttattgttattgaccttcgaagcttattataatttgttaacactaaaacaaagttaatttgacaatcaactaagactgaatagt

SEQ ID NO: 1577 - protein, 168 aa, Arabidopsis thaliana
MATATYPPPPPYYRLYKDYSENPNSAPEPPPPIEGTYVCFGGNYTTEDVLPSLEEQGVPQLYPKDSNLDYKNELRSLNRELQLHILELADVLVDRPSQYAKRIGEISSIFKNLHHLLNSLRPHQARATLIHIMELQIQQRKQAVEDIKRRREEAQRLLKDAYLTLDGQ

SEQ ID NO: 1578 - DNA, 702 bp, Arabidopsis thaliana
attttgttttgcgtttctgaatttgtggccattatcttctcacactctcttctcttagctcacagaggaaagaaaaatggcgaattccatttcatcaatatctctgcctcgatgtttcatcttcaacaatggtagtcacaaatcaaggccatggccaagctcaagcagtttctttctcaacaaatcatcaaagcatcatcctcatccactactctctctttcttcttcgccgtcttccgtcgtagaaactgataatgacgacgacaacgacctcactttcagtggttgcagagcgtgtgggaaagaagagaaagagagtgggtgtaatggtgacggacggattcaaggtggcattgcaactgtccccggtttcggttggtggccaattaaggcttacaggccttgtcccgcgtttgttgaggccggaggtagataccgccgcatagggcagagcatggacgaggttgcatttggtcgtggtgactctaaatcctccacttctgtagacaccagtgattcactactacgccagacaaagccaacaagttctagcaaaagttcaaacaagtgatatatagcccagtttttcaagtccaagaagaactttttttggaaatgtgtaatgatgattgggcctaaacatattatcggcccatttataattttacggctcaatagttaagaaaccctaaagaaggtttt

SEQ ID NO: 1579 - protein, 164 aa, Arabidopsis thaliana
MANSISSISLPRCFIFNNGSHKSRPWPSSSSFFLNKSSKHHPHPLLSLSSSPSSVVETDNDDDNDLTFSGCRACGKEEKESGCNGDGRIQGGIATVPGFGWWPIKAYRPCPAFVEAGGRYRRIGQSMDEVAFGRGDSKSSTSVDTSDSLLRQTKPTSSSKSSNK

SEQ ID NO: 1580 - DNA, 693 bp, Arabidopsis thaliana
ggtggattcgccagaagcaaagaggcagaatcggagaaaatggctgcaattggcatcgcctctaggtctgctacattcatgagatccatcaatagaacagctactgcacgaaatttgatctcatccagagctagaccttctgtaccaaaccctaatttcacttccccgcgcttcaacacttcttctcgaatcgaaggttctgttcccaggttgctgcggcgagaattaagcacacaacaaccatttcacagcaccattgctgcagcttgcctcgtttcgaaacttccttctgatgtcacttctcctgaaggtagatttgcaaactatctcagtcctatctagtaccagaacctgaagtagatgggtggcttatcatcccagagatcgttttgtgctaagtttgatgttttcaaggaaattctcaggttttgaagttatatctgtcaactgtctttgcaatctctcagcttagattgaacttctcatacattttttttggcagatgttactagttccatttgatattattttttggtttgtatctttttaatcaaatgatgattccaccatagttattttcagaatgtaagatatgttgtcccggattcatctactctttcttaactagaaaataagatcgtttgcacgggatgagacctttacgtttgtaccaattgaattatgttccatggc

SEQ ID NO: 1581 - protein, 113 aa, Arabidopsis thaliana
GGFARSKEAESEKMAAIGIASRSATFMRSINRTATARNLISSRARPSVPNPNFTSPRFNTSSRIEGSVPRLLRRELSTQQPFHSTIAAACLVSKLPSDVTSPEGRFANYLSPI

SEQ ID NO: 1582 - protein, 100 aa, Arabidopsis thaliana
MAAIGIASRSATFMRSINRTATARNLISSRARPSVPNPNFTSPRFNTSSRIEGSVPRLLRRELSTQQPFHSTIAAACLVSKLPSDVTSPEGRFANYLSPI

SEQ ID NO: 1583 - protein, 87 aa, Arabidopsis thaliana
MRSINRTATARNLISSRARPSVPNPNFTSPRFNTSSRIEGSVPRLLRRELSTQQPFHSTIAAACLVSKLPSDVTSPEGRFANYLSPI

SEQ ID NO: 1584 - DNA, 958 bp, Arabidopsis thaliana
agaaccaccacacacgcataactaaacgaagaagaagaaaaaaaaaaaaaaaacgaacaacgaagaagacgaagacgaagaaacaaagataaaggctttagatttagctgcaggggaggtggcggaacaaaaccctaatcctaattttccccgaatatgccatttttgaggattgtgagacttctcttacctggaatcagggttttgattagaagatctctaatttggttgttgtagatgcatctccgtgaaatcattccctcttggatctaccagttatttggttgcatgggtacagaggttgttttggatgctgcaataaaccaccgcttatagttgcagtggatgagccgtctaaagggttaaggattcaaggtcgtttagtgaagaagccaagcgtatcagaggacttctggagcacaagcacctgcgagatggataatagtacacttcagtcacagagaagcatgtcttctattagcttcactaacaatacttctacttctgcaagtacaagcaaccccacagaatttgtaaaccacggattgaacctctggaaccaaactaggcaacagtggcttgcaaatggaacttctcaaaaaaaggccaaagttcgagaacctacaataagctggaatgcaacatatgagagcttgttgggtatgaacaagcggttttctcgtccaataccactccctgaaatggtggattttttggtggatgtgtgggagcaagaaggcttgtatgattgatttgcaactctttaaacttaatttagtttcatcttttcttttatgtgtgtaatcaaaagaagaacttggatttttagacttggcttcctgaaagtaaaaaaacgatttagacctttttttttggtctttgtgtaataatcattttgttacacacggaattgtattattatgacaaagtggttcagctattttctaagtgatttctc

SEQ ID NO: 1585 - protein, 105 aa, Arabidopsis thaliana
MDNSTLQSQRSMSSISFTNNTSTSASTSNPTEFVNHGLNLWNQTRQQWLANGTSQKKAKVREPTISWNATYESLLGMNKRFSRPIPLPEMVDFLVDVWEQEGLYD

SEQ ID NO: 1586 - protein, 94 aa, Arabidopsis thaliana
MSSISFTNNTSTSASTSNPTEFVNHGLNLWNQTRQQWLANGTSQKKAKVREPTISWNATYESLLGMNKRFSRPIPLPEMVDFLVDVWEQEGLYD

SEQ ID NO: 1587 - DNA, 2124 bp, Arabidopsis thaliana
atcaaaccctaattttctgttaatttcaattagcttagttcgtcgttactccagagaagtcgaaatgatgggctcagagaatgccgatggattcgaagaaactaatctcaatgcgcaaagggatgatatggagaatctcgacctaggagtagatggtggtgaccatcctctgaagataagcgatgtcaacggtgatacatcgaactctggttaccgtagcgccatgtcaacactctccaacgtccgtgacccgctctcgccgccaccgaccgttatgattccagctgattctgatccactccttgcgccatcctcctacgaagatttccgcagcagcttcagctctaagccgatcagcagcgataactcctacatcgagcctccgtcgtatgcagatgttatcttcagtccctttgatgagaactcagatagcgagattaacggtaccgaggataatagccttcatagtcaattctcagattcactatcgagatctccttcttcttcaagctctgattacatcaagatcactgtatctaaccctcagaaagagcaggagatttcaaattccattgttggaggaaacacttacatcacctaccaaattacgaccagaacgaatctccctgactttggcggcccatcggagtttagcgtgcgaagaagattcagagatgttgtcacattggctgatcgattggctgagacgtatagagggttctgcataccaccacggccagataagagcgtcgtagagagccaagtaatgcagaaacaagagttcgtggagcagagaagagttgcattggagaaatacttgcgcaggctaagtgcacaccctgttattaggaacagtgacgagttgaaagtgtttcttcaggtgcaagggaagttgccactaccaatgagtactgatgtggcctctcggatgttggatggggcggtgaagctcccaaaacagttgttcggtgaaggcggagcctctgcagtgccggtgactgaggtgggtcagcctgcaagaggaggtagggatctgctgagattattcaaggagctgaggcagtcagtttctaatgactggggtggatcaaaacctcccgttgttgaagaagataaagagttcttggaaaagaaggagaagatgcatgatcttgagcagcaaattatcaatgcctcacagcaggcggaatcccttgtgaaagcacagcaagacatgggtgaaaccatgggtgaactgggattagcattcattaagctgactaagttcgagaacgaggaagctgtctgcaacccccaaagaactcgtgctaatgatatgaagaatttagccactgctgctgtaaaagcaagcagattttatagggagttgaattcccaaactgtcaaacacttggacacactccatgagtaccttggcatgatgatggctgtccaaggcgcatttgcagatagatctagtgctttactgacagttcagacgcttctatcagagcttccttctctgcaaactagagttgagaagctagaggctgcatcatcgaaggtatttggtggtgacaaatcaaggatccgaaaaatagaagagttaaaagaaacaatcaaggtcactgaggatgcaaaaaatgttgccatcaaagggtatgagcgaatcaaggaaaacaaccgatctgaggttgagaggttggacagagaaaggcgtgcagacttcatgaacatgatgaagggttttgttgttaaccaggttggatacgcagagaaaatgggaaacgtctgggcaaaggttgcagaagagaccagccaatacgatagagagaagcagagcagctaacaaacacagaaaaaaagagagtgaacgatgttcattttggcataaccataccaaatccatgtatggcacagaatcacattgcgtaataatggtttgtcaaaaagtgtagtttcctttttcatatgttgtatctatcttgatagagattggtaaacgttcttgtttgttttctttagttgctgtaaattagttttctagaagcatctctgactacagctgcattgactcatacccattgttttctggtatatgccgccaaagatatatctgatagtttggtaaacgttctttgtttt

SEQ ID NO: 1588 - protein, 608 aa, Arabidopsis thaliana
SNPNFLLISISLVRRYSREVEMMGSENADGFEETNLNAQRDDMENLDLGVDGGDHPLKISDVNGDTSNSGYRSAMSTLSNVRDPLSPPPTVMIPADSDPLLAPSSYEDFRSSFSSKPISSDNSYIEPPSYADVIFSPFDENSDSEINGTEDNSLHSQFSDSLSRSPSSSSSDYIKITVSNPQKEQEISNSIVGGNTYITYQITTRTNLPDFGGPSEFSVRRRFRDVVTLADRLAETYRGFCIPPRPDKSVVESQVMQKQEFVEQRRVALEKYLRRLSAHPVIRNSDELKVFLQVQGKLPLPMSTDVASRMLDGAVKLPKQLFGEGGASAVPVTEVGQPARGGRDLLRLFKELRQSVSNDWGGSKPPVVEEDKEFLEKKEKMHDLEQQIINASQQAESLVKAQQDMGETMGELGLAFIKLTKFENEEAVCNPQRTRANDMKNLATAAVKASRFYRELNSQTVKHLDTLHEYLGMMMAVQGAFADRSSALLTVQTLLSELPSLQTRVEKLEAASSKVFGGDKSRIRKIEELKETIKVTEDAKNVAIKGYERIKENNRSEVERLDRERRADFMNMMKGFVVNQVGYAEKMGNVWAKVAEETSQYDREKQSS

SEQ ID NO: 1589 - protein, 587 aa, Arabidopsis thaliana
MMGSENADGFEETNLNAQRDDMENLDLGVDGGDHPLKISDVNGDTSNSGYRSAMSTLSNVRDPLSPPPTVMIPADSDPLLAPSSYEDFRSSFSSKPISSDNSYIEPPSYADVIFSPFDENSDSEINGTEDNSLHSQFSDSLSRSPSSSSSDYIKITVSNPQKEQEISNSIVGGNTYITYQITTRTNLPDFGGPSEFSVRRRFRDVVTLADRLAETYRGFCIPPRPDKSVVESQVMQKQEFVEQRRVALEKYLRRLSAHPVIRNSDELKVFLQVQGKLPLPMSTDVASRMLDGAVKLPKQLFGEGGASAVPVTEVGQPARGGRDLLRLFKELRQSVSNDWGGSKPPVVEEDKEFLEKKEKMHDLEQQIINASQQAESLVKAQQDMGETMGELGLAFIKLTKFENEEAVCNPQRTRANDMKNLATAAVKASRFYRELNSQTVKHLDTLHEYLGMMMAVQGAFADRSSALLTVQTLLSELPSLQTRVEKLEAASSKVFGGDKSRIRKIEELKETIKVTEDAKNVAIKGYERIKENNRSEVERLDRERRADFMNMMKGFVVNQVGYAEKMGNVWAKVAEETSQYDREKQSS

SEQ ID NO: 1590 - protein, 586 aa, Arabidopsis thaliana
MGSENADGFEETNLNAQRDDMENLDLGVDGGDHPLKISDVNGDTSNSGYRSAMSTLSNVRDPLSPPPTVMIPADSDPLLAPSSYEDFRSSFSSKPISSDNSYIEPPSYADVIFSPFDENSDSEINGTEDNSLHSQFSDSLSRSPSSSSSDYIKITVSNPQKEQEISNSIVGGNTYITYQITTRTNLPDFGGPSEFSVRRRFRDVVTLADRLAETYRGFCIPPRPDKSVVESQVMQKQEFVEQRRVALEKYLRRLSAHPVIRNSDELKVFLQVQGKLPLPMSTDVASRMLDGAVKLPKQLFGEGGASAVPVTEVGQPARGGRDLLRLFKELRQSVSNDWGGSKPPVVEEDKEFLEKKEKMHDLEQQIINASQQAESLVKAQQDMGETMGELGLAFIKLTKFENEEAVCNPQRTRANDMKNLATAAVKASRFYRELNSQTVKHLDTLHEYLGMMMAVQGAFADRSSALLTVQTLLSELPSLQTRVEKLEAASSKVFGGDKSRIRKIEELKETIKVTEDAKNVAIKGYERIKENNRSEVERLDRERRADFMNMMKGFVVNQVGYAEKMGNVWAKVAEETSQYDREKQSS

SEQ ID NO: 1591 - DNA, 1524 bp, Arabidopsis thaliana
acttttatttctctgctttaactgcccaaaagattctctcccagctagctttctcaattcatttttctttcttcatcttcttcttgtgtgatctctctttccaaataagcttatcattcttacaaaaatatttctgggtttctgatattgttcttgttctcttgaatctttattacttgaaaaacatataaagtgatggcggttgtggttgaagaaggtgtggtgttgaatcatggaggtgaagagcttgtggatttgccacctggtttcaggtttcatccaacagacgaagagatcataacatgttaccttaaggagaaggttttaaacagccgattcacggctgtggccatgggagaagctgatctcaacaagtgtgagccttgggatttgccaaagagggcaaagatgggggagaaagagttctacttcttctgtcaaagggacaggaagtatccgactgggatgaggacgaaccgtgcgacggagtcaggatactggaaagccaccgggaaggataaggagatcttcaaaggcaaaggttgtctcgttgggatgaagaaaacacttgtgttttatagaggaagagctccaaaaggtgaaaagactaattgggtcatgcatgaatatcgtcttgaaggcaaatattcgtattacaatctcccaaaatctgcaagggacgaatgggtcgtgtgtagggtttttcacaagaacaatccttctaccacaacccaaccaatgacgagaatacccgttgaagatttcacaaggatggattctctagagaacattgatcatctcctagacttctcatctcttcctcctctcatagacccgagtttcatgagtcaaaccgaacaaccaaacttcaaacccatcaaccctccaacttacgatatctcatcaccaatccaaccccatcatttcaattcttaccaatcaatctttaaccaccaggtttttggttctgcttcgggctctacgtacaacaacaacaacgagatgatcaagatggagcaatcacttgttagtgtatctcaagaaacatgcctaagctcagatgtgaacgcgaacatgactacaaccacggaggtatcttcgggtcctgtaatgaaacaagaaatggggatgatgggaatggtgaatggtagcaagtcgtatgaagatctatgtgacttgaggggggacttgtgggacttctaattaatcatttgacttggtgaaagagtatatttgttgggatttaaatcatgttagttaatacatatacatataggatttactagaggcttaatcctagttaactattttcacttcattgatattatttaattagttgattgtttaattagtttatactttatagtgtggttaaaaaagaaaagaaaggattgtgataatttgggattttagtgcataagttatatctcaatgtaaactgtatttgtatacatataattagtcttctcatagagttttaattattaagatttacgatatatatatatatattctaacgttgtt

SEQ ID NO: 1592 - protein, 335 aa, Arabidopsis thaliana
MAVVVEEGVVLNHGGEELVDLPPGFRFHPTDEEIITCYLKEKVLNSRFTAVAMGEADLNKCEPWDLPKRAKMGEKEFYFFCQRDRKYPTGMRTNRATESGYWKATGKDKEIFKGKGCLVGMKKTLVFYRGRAPKGEKTNWVMHEYRLEGKYSYYNLPKSARDEWVVCRVFHKNNPSTTTQPMTRIPVEDFTRMDSLENIDHLLDFSSLPPLIDPSFMSQTEQPNFKPINPPTYDISSPIQPHHFNSYQSIFNHQVFGSASGSTYNNNNEMIKMEQSLVSVSQETCLSSDVNANMTTTTEVSSGPVMKQEMGMMGMVNGSKSYEDLCDLRGDLWDF

SEQ ID NO: 1593 - protein, 283 aa, Arabidopsis thaliana
MGEADLNKCEPWDLPKRAKMGEKEFYFFCQRDRKYPTGMRTNRATESGYWKATGKDKEIFKGKGCLVGMKKTLVFYRGRAPKGEKTNWVMHEYRLEGKYSYYNLPKSARDEWVVCRVFHKNNPSTTTQPMTRIPVEDFTRMDSLENIDHLLDFSSLPPLIDPSFMSQTEQPNFKPINPPTYDISSPIQPHHFNSYQSIFNHQVFGSASGSTYNNNNEMIKMEQSLVSVSQETCLSSDVNANMTTTTEVSSGPVMKQEMGMMGMVNGSKSYEDLCDLRGDLWDF

SEQ ID NO: 1594 - protein, 264 aa, Arabidopsis thaliana
MGEKEFYFFCQRDRKYPTGMRTNRATESGYWKATGKDKEIFKGKGCLVGMKKTLVFYRGRAPKGEKTNWVMHEYRLEGKYSYYNLPKSARDEWVVCRVFHKNNPSTTTQPMTRIPVEDFTRMDSLENIDHLLDFSSLPPLIDPSFMSQTEQPNFKPINPPTYDISSPIQPHHFNSYQSIFNHQVFGSASGSTYNNNNEMIKMEQSLVSVSQETCLSSDVNANMTTTTEVSSGPVMKQEMGMMGMVNGSKSYEDLCDLRGDLWDF

SEQ ID NO: 1595 - DNA, 1880 bp, Arabidopsis thaliana
gtcaagtaaaaatatctaaatcctttttatctgagtgccttttacaaaattttggatgattatctaatgagcatccataaataagctcaaattttagttagctacttgaccatggttaactctaacaaggatgataaattgataatgatataacggttcggttcggttgcttttggaagaggacgaaccataaagaaagaagctcaaagcccacccattttcgtgattacaggctttttagcaaaaggaagcagcacgtgttctcaaattaaccatagttaactcttcaatataaccatggttaacatttaacctcttcttcttcttattaacttcatcactctctttgtcttctcactttctcttctccacagttcaactcaaccttccaaattccaatggcgacatcacgagctttcactctcttcgctttcacattatctctcctcaccgtagcttctaccgtctccggccataacattactcaaatcctctctgatacgccggaatattcctcattcaacaactacctttctcaaacaaaactcgccgacgaaatcaacagccgcactacaatcaccgtccttgttctcaacaatggcgcaatgtcttccctcgccggaaaacacccactctccgtcgtcaaaaatgctctcagcctcctcgtcctcctcgactactacgatcctttaaaactccatcagctctctaaaggcacaactctcaccaccacgctttaccaaaccaccggacacgctctcgggaacctaggattcgttaacgtcaccgatctcaaaggaggcaaagtcggctttggctccgccgctcctggctccaagctcgattcctcttacaccaaatccgttaaacaaatcccttacaacatctccgttctcgaaatcaacgctccgatcatcgctcccggaatcttaaccgcacctgctccttcttccgccggagttagcaacatcaccggacttctcgagaaagccggttgcaaaaccttcgcgaatttgctcgtatcgagcggtgttattaaaacattcgaatccaccgttgaaaaaggcttgacggtttttgcaccgtccgatgaagcttttaaagctagaggtgtaccagatctgacgaatctcacacaagctgaggtggtctcgctcctagagtatcacgccctcgctgaatacaaacccaaaggatcgttaaagactaacaaagacgctatctccactttagccactaacggcgccggtaaatacgatttaacgacgtcaacttccggtgacgaggttattctccataccggcgttggtccgtcgagactcgccgacacggtggtcgatgagacacctgttgttatattcactgtggataatgtgctccttcccgctgagcttttcggaaaatcttcatcgccggcgccggcaccggagccagtgagtgcaccgacaccgaccccggctaagtcaccgtctcctgtggaagcaccttctccaaccgcagcttctccgccagcaccaccggtggatgaatcttcaccggaaggagctccgtcagactcgccgacaagttcagagaacagtaatgcgaaaaacgcggcgtttcacgttaacgctcctgcgttgttcaccgcattggtcactattgccgccacatctctcttgttataaacaaaaccttaattacgaagactgccattgtcttccttcgacgagtttttatttctttgtgatgctgtttgttaaaaactgggaattagagtgttacggtttacgtttaatcttattagttaatttagaattggatgattgttattgttttgttttggtgtgttagtttgtagtagtgtcgaaatattgagatcttctaattgactagtttcc

SEQ ID NO: 1596 - protein, 422 aa, Arabidopsis thaliana
MATSRAFTLFAFTLSLLTVASTVSGHNITQILSDTPEYSSFNNYLSQTKLADEINSRTTITVLVLNNGAMSSLAGKHPLSVVKNALSLLVLLDYYDPLKLHQLSKGTTLTTTLYQTTGHALGNLGFVNVTDLKGGKVGFGSAAPGSKLDSSYTKSVKQIPYNISVLEINAPIIAPGILTAPAPSSAGVSNITGLLEKAGCKTFANLLVSSGVIKTFESTVEKGLTVFAPSDEAFKARGVPDLTNLTQAEVVSLLEYHALAEYKPKGSLKTNKDAISTLATNGAGKYDLTTSTSGDEVILHTGVGPSRLADTVVDETPVVIFTVDNVLLPAELFGKSSSPAPAPEPVSAPTPTPAKSPSPVEAPSPTAASPPAPPVDESSPEGAPSDSPTSSENSNAKNAAFHVNAPALFTALVTIAATSLLL

SEQ ID NO: 1597 - protein, 353 aa, Arabidopsis thaliana
MSSLAGKHPLSVVKNALSLLVLLDYYDPLKLHQLSKGTTLTTTLYQTTGHALGNLGFVNVTDLKGGKVGFGSAAPGSKLDSSYTKSVKQIPYNISVLEINAPIIAPGILTAPAPSSAGVSNITGLLEKAGCKTFANLLVSSGVIKTFESTVEKGLTVFAPSDEAFKARGVPDLTNLTQAEVVSLLEYHALAEYKPKGSLKTNKDAISTLATNGAGKYDLTTSTSGDEVILHTGVGPSRLADTVVDETPVVIFTVDNVLLPAELFGKSSSPAPAPEPVSAPTPTPAKSPSPVEAPSPTAASPPAPPVDESSPEGAPSDSPTSSENSNAKNAAFHVNAPALFTALVTIAATSLLL

SEQ ID NO: 1598 - DNA, 715 bp, Arabidopsis thaliana
atcaagcaatccaaagcgattaaacctactcaatctcagatctcgttaaacctagaaacctcgagaaaaaccgtatcaatggcgccgaaagcagagaagaagcccgctgagaagaaaccagcttccgagaagccggtggaggagaaatcaaaagccgagaaagctccggcggagaagaaaccaaaggccggaaagaagctcccgaaggaagctggtgccggaggcgacaagaagaaaaagatgaagaagaagagtgtcgagacttacaagatctacatcttcaaggtgcttaagcaagttcatcccgatatcggaatctccagcaaagcgatggggatcatgaacagtttcattaacgatatcttcgagaagcttgctcaagaggcgtcgaagcttgcgaggtacaataagaaacctacgatcacttctcgggagattcagactgctgtgagattggtgcttcctggagagttggcgaagcatgccgtttctgaggggactaaagccgtcacgaaattcaccagctcttgaataattgagttagggttcttatcatatggatgttgctctgctttagggttaatggaatttggaagatctgagttagggttttagaatgtcctttaagtatctctgtttcgtttggaatttctacgttttgtaagtactgctgctattgataatgtttggagtctatatttgctctttgtgtccc

SEQ ID NO: 1599 - protein, 176 aa, Arabidopsis thaliana
IKQSKAIKPTQSQISLNLETSRKTVSMAPKAEKKPAEKKPASEKPVEEKSKAEKAPAEKKPKAGKKLPKEAGAGGDKKKKMKKKSVETYKIYIFKVLKQVHPDIGISSKAMGIMNSFINDIFEKLAQEASKLARYNKKPTITSREIQTAVRLVLPGELAKHAVSEGTKAVTKFTSS

SEQ ID NO: 1600 - protein, 150 aa, Arabidopsis thaliana
MAPKAEKKPAEKKPASEKPVEEKSKAEKAPAEKKPKAGKKLPKEAGAGGDKKKKMKKKSVETYKIYIFKVLKQVHPDIGISSKAMGIMNSFINDIFEKLAQEASKLARYNKKPTITSREIQTAVRLVLPGELAKHAVSEGTKAVTKFTSS

SEQ ID NO: 1601 - protein, 96 aa, Arabidopsis thaliana
MKKKSVETYKIYIFKVLKQVHPDIGISSKAMGIMNSFINDIFEKLAQEASKLARYNKKPTITSREIQTAVRLVLPGELAKHAVSEGTKAVTKFTSS

SEQ ID NO: 1602 - DNA, 677 bp, Arabidopsis thaliana
atactatcaaatcgaagaagaggaagatccaattggaaagggttatcctaattcccagtcattgatcggagaagatgagtgctgttgcgattaaccacttttttggcttaccggaggcgatcgagaagctaattctcccgatttctcgttccggcgaaagtaataacgagagtcgtggaagaggaagtagcaataatatcccaatagacattttggaatctcccaaagaatacatattttatctcgatatccccggaatttcaaaatcagatatccaggttacagtggaggaagagaggactttagtgataaagagtaatgggaagaggaagagagatgatgatgagagtgaagaagggtctaagtatattagactcgagaggagacttgctcagaatttggttaagaagttccggttaccagaagatgctgatatggcttctgtaacggctaaatatcaagaaggtgttttgacagttgttatcaagaagctaccgccacagccgccgaaacctaagactgttcaaatcgctgtttcttgagtagtttctgtgttttgtttttgtgtgtgtttgttttctagtttgtaatttttctgtgtttggataaaaagactctgtttcttttatgtgttctcttgtcgaaattttgaaattgaagaaataaataggtttagc

SEQ ID NO: 1603 - protein, 155 aa, Arabidopsis thaliana
MSAVAINHFFGLPEAIEKLILPISRSGESNNESRGRGSSNNIPIDILESPKEYIFYLDIPGISKSDIQVTVEEERTLVIKSNGKRKRDDDESEEGSKYIRLERRLAQNLVKKFRLPEDADMASVTAKYQEGVLTVVIKKLPPQPPKPKTVQIAVS

SEQ ID NO: 1604 - DNA, 2399 bp, Arabidopsis thaliana
aggagattagcgaaaactcaaaacaggaacaaagttaaaagagtgagagagaaagaaagagagaagatgaaggtacaggagggtttgttcgtggtggctgttttctaccttgcttatacgcagctagtcaaggggcaacctcgcaaggagtgccaaactagatgtggcaatgtcgcagttgagtacccttttggtacttctccaggttgttactatcccggagatgaaagtttcaatcttacttgcaacgagcaagagaagctcttctttggcaacatgccagtcatcaacatgtctctcagcggccagcttcgtgttcggctagttagatccagagtttgctacgatagtcaaggaaaacagactgactacattgcccggcggaccaccctgggtaatttcactctctctgaacttaacagatttactgtagtaggttgtaacagttacgcatttctccgcacatctggagttgaaaaatactcaactggatgcatatcaatatgtgattctgccacaacgaaaaacggatcatgttctggtgaaggttgctgccagatccctgtccctagaggatactcttttgtcagagtaaaaccacatagctttcacaaccatcctactgtgcatctgtttaatccttgcacctacgcctttctcgttgaagatggtatgtttgacttccatgctttggaagatctcaacaatctgcgaaatgttactacgttccctgtagtactagattggtctatcggagacaagacttgcaaacaagtagaatacaggggcgtgtgtggtggtaacagcacatgtttcgattctactggtggaaccgggtataactgcaaatgtttagaaggttttgaggggaatccataccttccaaacggttgtcaagacatcaatgaatgtattagtagtagacataactgttcggagcatagtacctgtgaaaacacgaaggggagcttcaactgtaactgcccatctggttaccgcaaagattcccttaatagctgtactcgtaaagtcaggcctgaatactttagatggactcaaatttttcttggaaccaccatcggcttctcggttatcatgcttgggattagctgtctacaacagaaaattaagcaccggaagaacacagagctccgacaaaaattcttcgagcaaaatggtggaggcatgttgatacagcgagtctcgggagcagggccatcaaatgttgatgtcaaaatcttcactgagaaaggaatgaaggaagcaactaatggttaccatgagagcagaatcctgggtcagggaggccaaggaacagtgtacaaagggatattgccggacaactccatagttgctataaagaaagctcggcttggaaaccgtagccaagtagagcagttcatcaacgaagtgctagtgctttcacaaatcaaccataggaacgtggtcaaggtcttggggtgttgtttagagacagaagtccccttgttggtctatgagttcattaacagtggtacccttttcgatcacttgcacggttccttgtatgattcttcacttacatgggagcaccgtctgaggatagcaacagaagtagcaggaagtcttgcatatcttcactcttctgcttctattccaatcatccaccgagatatcaagactgctaatattctcctggataaaaacttaactgcaaaagcagctgactttggtgcatcaagattgataccgatggataaagagcagctcacaacaatagtgcaaggcactctaggttacctagacccagaatattacaacacagggttgttaaacgaaaagagcgatgtttatagttttggggtcgtcctaatggaactgctctcaggtcaaaaggcattgtgtttcgaaagaccacattgcccaaaaaatctagtgagttgttttgcttctgccacaaagaataataggttccatgaaattattgatgggcaagtgatgaatgaggataaccagagagagatccaggaagctgcaagaattgctgcagagtgtacaaggctaatgggagaggaaaggccaaggatgaaagaagtagctgcagagttagaggccttgagagttaaaacaactaaatataagtggtcggatcagtatcgtgagacaggggagattgaacacttgctcggcgttcaaatcttgtcagcacaaggcgaaaccagtagcagcattggctatgacagcatcagaaatgtaacaacattggacattgaagctggccgttgatattaatgctctgacaaaatcacatgtatatcttttgtttgtaaaaaaagaaagtcatttccttgttgcttcatcaataatgctttgacagatttgtttgtacatcatcaataatcatgttcatattttccttt

SEQ ID NO: 1605 - protein, 754 aa, Arabidopsis thaliana
RRLAKTQNRNKVKRVREKEREKMKVQEGLFVVAVFYLAYTQLVKGQPRKECQTRCGNVAVEYPFGTSPGCYYPGDESFNLTCNEQEKLFFGNMPVINMSLSGQLRVRLVRSRVCYDSQGKQTDYIARRTTLGNFTLSELNRFTVVGCNSYAFLRTSGVEKYSTGCISICDSATTKNGSCSGEGCCQIPVPRGYSFVRVKPHSFHNHPTVHLFNPCTYAFLVEDGMFDFHALEDLNNLRNVTTFPVVLDWSIGDKTCKQVEYRGVCGGNSTCFDSTGGTGYNCKCLEGFEGNPYLPNGCQDINECISSRHNCSEHSTCENTKGSFNCNCPSGYRKDSLNSCTRKVRPEYFRWTQIFLGTTIGFSVIMLGISCLQQKIKHRKNTELRQKFFEQNGGGMLIQRVSGAGPSNVDVKIFTEKGMKEATNGYHESRILGQGGQGTVYKGILPDNSIVAIKKARLGNRSQVEQFINEVLVLSQINHRNVVKVLGCCLETEVPLLVYEFINSGTLFDHLHGSLYDSSLTWEHRLRIATEVAGSLAYLHSSASIPIIHRDIKTANILLDKNLTAKAADFGASRLIPMDKEQLTTIVQGTLGYLDPEYYNTGLLNEKSDVYSFGVVLMELLSGQKALCFERPHCPKNLVSCFASATKNNRFHEIIDGQVMNEDNQREIQEAARIAAECTRLMGEERPRMKEVAAELEALRVKTTKYKWSDQYRETGEIEHLLGVQILSAQGETSSSIGYDSIRNVTTLDIEAGR

SEQ ID NO: 1606 - protein, 732 aa, Arabidopsis thaliana
MKVQEGLFVVAVFYLAYTQLVKGQPRKECQTRCGNVAVEYPFGTSPGCYYPGDESFNLTCNEQEKLFFGNMPVINMSLSGQLRVRLVRSRVCYDSQGKQTDYIARRTTLGNFTLSELNRFTVVGCNSYAFLRTSGVEKYSTGCISICDSATTKNGSCSGEGCCQIPVPRGYSFVRVKPHSFHNHPTVHLFNPCTYAFLVEDGMFDFHALEDLNNLRNVTTFPVVLDWSIGDKTCKQVEYRGVCGGNSTCFDSTGGTGYNCKCLEGFEGNPYLPNGCQDINECISSRHNCSEHSTCENTKGSFNCNCPSGYRKDSLNSCTRKVRPEYFRWTQIFLGTTIGFSVIMLGISCLQQKIKHRKNTELRQKFFEQNGGGMLIQRVSGAGPSNVDVKIFTEKGMKEATNGYHESRILGQGGQGTVYKGILPDNSIVAIKKARLGNRSQVEQFINEVLVLSQINHRNVVKVLGCCLETEVPLLVYEFINSGTLFDHLHGSLYDSSLTWEHRLRIATEVAGSLAYLHSSASIPIIHRDIKTANILLDKNLTAKAADFGASRLIPMDKEQLTTIVQGTLGYLDPEYYNTGLLNEKSDVYSFGVVLMELLSGQKALCFERPHCPKNLVSCFASATKNNRFHEIIDGQVMNEDNQREIQEAARIAAECTRLMGEERPRMKEVAAELEALRVKTTKYKWSDQYRETGEIEHLLGVQILSAQGETSSSIGYDSIRNVTTLDIEAGR

SEQ ID NO: 1607 - protein, 662 aa, Arabidopsis thaliana
MPVINMSLSGQLRVRLVRSRVCYDSQGKQTDYIARRTTLGNFTLSELNRFTVVGCNSYAFLRTSGVEKYSTGCISICDSATTKNGSCSGEGCCQIPVPRGYSFVRVKPHSFHNHPTVHLFNPCTYAFLVEDGMFDFHALEDLNNLRNVTTFPVVLDWSIGDKTCKQVEYRGVCGGNSTCFDSTGGTGYNCKCLEGFEGNPYLPNGCQDINECISSRHNCSEHSTCENTKGSFNCNCPSGYRKDSLNSCTRKVRPEYFRWTQIFLGTTIGFSVIMLGISCLQQKIKHRKNTELRQKFFEQNGGGMLIQRVSGAGPSNVDVKIFTEKGMKEATNGYHESRILGQGGQGTVYKGILPDNSIVAIKKARLGNRSQVEQFINEVLVLSQINHRNVVKVLGCCLETEVPLLVYEFINSGTLFDHLHGSLYDSSLTWEHRLRIATEVAGSLAYLHSSASIPIIHRDIKTANILLDKNLTAKAADFGASRLIPMDKEQLTTIVQGTLGYLDPEYYNTGLLNEKSDVYSFGVVLMELLSGQKALCFERPHCPKNLVSCFASATKNNRFHEIIDGQVMNEDNQREIQEAARIAAECTRLMGEERPRMKEVAAELEALRVKTTKYKWSDQYRETGEIEHLLGVQILSAQGETSSSIGYDSIRNVTTLDIEAGR

SEQ ID NO: 1608 - DNA, 907 bp, Arabidopsis thaliana
cctctttaagagtcacttgactttaatatttctctttttgtttctttctccttttctctgttttttcttttcttttctctttgcgattcgctgagagcatgcctgaatgtcaagagaaagggagagatttgaagagatagggaagaagatcaaaagagaagcagatgcttggcctcatcaaatggctggaattagaagaccaatgtcgggtcctcccggaaccctcaataccattacgccttgtgctgcctgcaagcttttgcgccgtagatgtgctcaagaatgtcccttttcgccatatttctccccacacgagcctcataagttcgcttccgtccacaaagtctttggagctagtaacgtctccaagatgctaatggaagtacctgagagccagagagcagatgccgcgaatagccttgtgtatgaagcaaacgtgaggctaagagatccggtgtacggatgcatgggagccatctcagctctacaacaacaagtccaagctttacaagccgagctcacggccgtaagatccgagattcttaagtacaagcaacgagaagctgtcgccactttgatcgtaccttccaactcccaagttgccggatttcacaactccggcggtgtttccgtgattgcaccaccaccacaaagaccaacaactccaccacaacctacaacggctcatcctccttctccatcttcttgtgttttctctcaaccaaccacaagagacttagaatacggcaacattgaaagtgagaacaactacttcggttaaatttttattgtatcattctacaaacacatacaaatacatataattaatttatttcgataatttgtgatccggtgactaataaattaaattaaattaaattaatataagtgaacaaggttggtcttg

SEQ ID NO: 1609 - protein, 224 aa, Arabidopsis thaliana
MSRERERFEEIGKKIKREADAWPHQMAGIRRPMSGPPGTLNTITPCAACKLLRRRCAQECPFSPYFSPHEPHKFASVHKVFGASNVSKMLMEVPESQRADAANSLVYEANVRLRDPVYGCMGAISALQQQVQALQAELTAVRSEILKYKQREAVATLIVPSNSQVAGFHNSGGVSVIAPPPQRPTTPPQPTTAHPPSPSSCVFSQPTTRDLEYGNIESENNYFG

SEQ ID NO: 1610 - protein, 199 aa, Arabidopsis thaliana
MAGIRRPMSGPPGTLNTITPCAACKLLRRRCAQECPFSPYFSPHEPHKFASVHKVFGASNVSKMLMEVPESQRADAANSLVYEANVRLRDPVYGCMGAISALQQQVQALQAELTAVRSEILKYKQREAVATLIVPSNSQVAGFHNSGGVSVIAPPPQRPTTPPQPTTAHPPSPSSCVFSQPTTRDLEYGNIESENNYFG

SEQ ID NO: 1611 - protein, 192 aa, Arabidopsis thaliana
MSGPPGTLNTITPCAACKLLRRRCAQECPFSPYFSPHEPHKFASVHKVFGASNVSKMLMEVPESQRADAANSLVYEANVRLRDPVYGCMGAISALQQQVQALQAELTAVRSEILKYKQREAVATLIVPSNSQVAGFHNSGGVSVIAPPPQRPTTPPQPTTAHPPSPSSCVFSQPTTRDLEYGNIESENNYFG

SEQ ID NO: 1612 - DNA, 910 bp, Arabidopsis thaliana
aacagtcaattggcggcgaagatgacgactcagtcgcagttcttagtgaacctctcttacggaggcctcgcctcccaaagtaatctcagagcgaataatcgtgtttcaccttcttcttgtcaaattacacgaacaaatcgctcatgggcattaccagtttcctttaaagttgagaaatttcaactccaacgaggaaggaggagaagaggatcaccatgttttggggagagcgaagggttggtcaaaaatgggattggtgatgctgatgggattataattgttgatcacggttctcgtcgccgtgaatccaatcttatgcttgaggagtttgtgaaaatgttcaaagaaaaaactggttacccaattgtagagcctgctcatatggaattggctgagccatctataaaagatgcattcagtttgtgtgtacaacaaggggcgaaacgtgtagttgtgagcccgttttttctatttcctggaagacattggcatacggacattccctcgttgacggctgatgctgcaaaggagttctctggcatctcatacctcataactgcacctctcggcccccataatctcctcctggacgttgtaaatgacagaatccaacattgcttgagccatgttgaaggtgatgctgacgagtgtcttgtttgtgctggaacaaataagtgcaagctctacaatagttcttaggtgtacatgtaagaacgtttttgtatatctgctcatcttctctaaccttcggatgcgggaaaaaaaggaggcatagtatattgttcatactcatcatttagtacgcgtcctatgtttcaacaagggagttttgagatttatgttcttttcttcttattgcagaccaatttgaaagactacgataatataataaaagctgtctgttaaatgc

SEQ ID NO: 1613 - protein, 232 aa, Arabidopsis thaliana
NSQLAAKMTTQSQFLVNLSYGGLASQSNLRANNRVSPSSCQITRTNRSWALPVSFKVEKFQLQRGRRRRGSPCFGESEGLVKNGIGDADGIIIVDHGSRRRESNLMLEEFVKMFKEKTGYPIVEPAHMELAEPSIKDAFSLCVQQGAKRVVVSPFFLFPGRHWHTDIPSLTADAAKEFSGISYLITAPLGPHNLLLDVVNDRIQHCLSHVEGDADECLVCAGTNKCKLYNSS

SEQ ID NO: 1614 - protein, 225 aa, Arabidopsis thaliana
MTTQSQFLVNLSYGGLASQSNLRANNRVSPSSCQITRTNRSWALPVSFKVEKFQLQRGRRRRGSPCFGESEGLVKNGIGDADGIIIVDHGSRRRESNLMLEEFVKMFKEKTGYPIVEPAHMELAEPSIKDAFSLCVQQGAKRVVVSPFFLFPGRHWHTDIPSLTADAAKEFSGISYLITAPLGPHNLLLDVVNDRIQHCLSHVEGDADECLVCAGTNKCKLYNSS

SEQ ID NO: 1615 - protein, 127 aa, Arabidopsis thaliana
MLEEFVKMFKEKTGYPIVEPAHMELAEPSIKDAFSLCVQQGAKRVVVSPFFLFPGRHWHTDIPSLTADAAKEFSGISYLITAPLGPHNLLLDVVNDRIQHCLSHVEGDADECLVCAGTNKCKLYNSS

SEQ ID NO: 1616 - DNA, 969 bp, Arabidopsis thaliana
gatcggaaacacttggggatttttttgagagaaacattctctcggttcctctactaccacctctcaaatctcaattcgccgattagtaactccgtccaagaccattttccgccgtgacaccgtccacggtctctctcagtccggaagaagataccatagttagaagctggtgatcattttcaataaacctcgaacatgtttaagaagttttgtttggaggagatttcatcacaaaaccaagtgaaggcatctgttcaacgtaggatccgccagagtatccaagatgagtacccgggacttgaatcagtgatggaggatctacttcccaaaaagattcctcttatcgtagtgaagtgcccaaaccatctgaccctagttgttgtcaacaatgtccccctcttcttctgtatccgtgacgggccatacatgccaacactgcggcttcttcatcaatacccaaatataatgaagaggtttcaagttgatagaggtgccataaagtttgttctgtctggtgcaaacataatgtgtcctggtcttacatccccgggaggcgttctggatcaagaagtcgaggctgaaaggccagtggccatatatgcagaaggaaagcaacatgccttagcaataggcttcaccaaaatgtcagcaaaggacataaagagcattaacaaaggaataggagttgacaacatgcattacctcaacgacggtctctggaagatggaacgactagactgaggacaatgtcaaatgtgaatcagtgtcggagagatatattggtctccttttatgttctctctaaacttatggagcttttgtccggatcaaccttagctttggtttgatttgttttcaaacatttgatacttattttatgagggaacgtcaaccttagctaaggttacagtttctaattccgtataatcaaacaagtaagattaaaaagctgttcaaatttatttcggt

SEQ ID NO: 1617 - protein, 181 aa, Arabidopsis thaliana
MFKKFCLEEISSQNQVKASVQRRIRQSIQDEYPGLESVMEDLLPKKIPLIVVKCPNHLTLVVVNNVPLFFCIRDGPYMPTLRLLHQYPNIMKRFQVDRGAIKFVLSGANIMCPGLTSPGGVLDQEVEAERPVAIYAEGKQHALAIGFTKMSAKDIKSINKGIGVDNMHYLNDGLWKMERLD

SEQ ID NO: 1618 - protein, 143 aa, Arabidopsis thaliana
MEDLLPKKIPLIVVKCPNHLTLVVVNNVPLFFCIRDGPYMPTLRLLHQYPNIMKRFQVDRGAIKFVLSGANIMCPGLTSPGGVLDQEVEAERPVAIYAEGKQHALAIGFTKMSAKDIKSINKGIGVDNMHYLNDGLWKMERLD

SEQ ID NO: 1619 - protein, 104 aa, Arabidopsis thaliana
MPTLRLLHQYPNIMKRFQVDRGAIKFVLSGANIMCPGLTSPGGVLDQEVEAERPVAIYAEGKQHALAIGFTKMSAKDIKSINKGIGVDNMHYLNDGLWKMERLD

SEQ ID NO: 1620 - DNA, 672 bp, Arabidopsis thaliana
agaactattaactttcattttccgatagaagaacttttttcacggcggcgataacaaatcaccggctaataaaggaaggaaaagaagaagaagagaagctatgacaacaatcagtcttcgcaagagtaacaccagactcccaccggaggtgaatcgcgtgctctacgttcgtaaccttccctttaacataacgagcgaagagatgtacgatatcttcggcaagtacggcgcaattcgccagattcgaatcggttgcgacaaggcgacgaaaggtactgccttcgtcgtttacgaggatatctacgatgccaagaacgccgtcgaccatctctctggcttcaacgtcgcgaatcggtacctaatcgtgttatactaccagcacgcgaagatgagcaagaagtttgaccagaagaagagtgaagatgagatcaccaagttgcaggagaagtatggagtctctaccaaagataagtaattgtccttgaattcgatcttcttatggtcgttctgttactgctgcaatttagggttttgaaattctgggagatgtgaaactttcttttatctgtatgaatttagtggagttctttatgtaaggtttgctcttttgtcatttacatcgaccaagcaatgaaaaatacatcttttaatcccaaattagctattgctgtg

SEQ ID NO: 1621 - protein, 124 aa, Arabidopsis thaliana
MTTISLRKSNTRLPPEVNRVLYVRNLPFNITSEEMYDIFGKYGAIRQIRIGCDKATKGTAFVVYEDIYDAKNAVDHLSGFNVANRYLIVLYYQHAKMSKKFDQKKSEDEITKLQEKYGVSTKDK

SEQ ID NO: 1622 - protein, 90 aa, Arabidopsis thaliana
MYDIFGKYGAIRQIRIGCDKATKGTAFVVYEDIYDAKNAVDHLSGFNVANRYLIVLYYQHAKMSKKFDQKKSEDEITKLQEKYGVSTKDK

SEQ ID NO: 1623 - DNA, 716 bp, Arabidopsis thaliana
ccgcccaattttaaaataaatataagattatccaccattcatctcatttcaccacatatccatatcttctctaaaagttttagatctgtttcttagagcgacatcgacgatgacaatggcaccgaaacgatgttttaaaacgaacgaatctaccaaatcggtcagagtggcttgcagatctttaaggagtccttccgtgagacggttaagcgaacttccggtagagaagcagaccaaatacatgatggaccagaaggatctcatgaacaagatgatccaagacgcagagaagaagttggagaaggagaagatgcatactcgtgcgatgaaacttgggttaatggctgggtctaatgatctaatcaccgatactgattgttcggaggaactggccagagcagctgatgtggttgataagaagctcaaagccatcagagagagaatcaaggctgttgaagcaggagcaccaatcatcaagagagactaggatgatgttttcaaataacttcttatcatttttatttcatggtttttaattattttcagattaagatggtttcgattgatggtgtttaaagttctgttcaatgatttgcttttgcactctaggaaggattaggagaatgatatgaatctctttggcctttgtatggtgtaatatgatcttttcagtttatgaccagatttgttttatattttaggaagattttctccct

SEQ ID NO: 1624 - protein, 125 aa, Arabidopsis thaliana
MTMAPKRCFKTNESTKSVRVACRSLRSPSVRRLSELPVEKQTKYMMDQKDLMNKMIQDAEKKLEKEKMHTRAMKLGLMAGSNDLITDTDCSEELARAADVVDKKLKAIRERIKAVEAGAPIIKRD

SEQ ID NO: 1625 - protein, 123 aa, Arabidopsis thaliana
MAPKRCFKTNESTKSVRVACRSLRSPSVRRLSELPVEKQTKYMMDQKDLMNKMIQDAEKKLEKEKMHTRAMKLGLMAGSNDLITDTDCSEELARAADVVDKKLKAIRERIKAVEAGAPIIKRD

SEQ ID NO: 1626 - protein, 81 aa, Arabidopsis thaliana
MMDQKDLMNKMIQDAEKKLEKEKMHTRAMKLGLMAGSNDLITDTDCSEELARAADVVDKKLKAIRERIKAVEAGAPIIKRD

SEQ ID NO: 1627 - DNA, 2051 bp, Arabidopsis thaliana
tggagatacttttcacaaatctttttcttcattgcttcgtcgagaagagaatgaacaatgaagtgaactaataaaacttccatttgcaatttcacgacctccattttcgtgctgagattctctaagctcgatggatctaacgacgacgcgtcagaggcgtccacttatatctgactcttcttcttcgtcttctacgaaatcttactcgaagaccgataaacctggccgatctaatggcggtgatgcggaggatggtggtctccgatggttcttgccgtttatagcgctttgttatcttcgttacatgagcgcgacttctaatatcattcatgactgcgatgaagtgttcaattactgggagcctcttcattatattctctacaagtccggatttcagacctgggaatacagttccaactttgctcttcggtcgtacttatacattctattccatgaattggctggacggcctgcttcttggtggtttggtgatgacaaggttagagttttctatgcagtgagactctttctcggactggtttctgcagtttcagatactgtcctggttgttgcgctctccagaaagtatgggaaacgtatcgctacctatgcagttgcgatgctctgcttaaccagtggctgcttctttgctagtaccagtttcctccccagttcattttctatgtacgccataagcctctcatctggtttattacttttcgagaagtatgccatggctgttgcagtttcggttgtcggggtgattcttggctggccattttctatcttggcctttttacctgtcgttatttactctctggttaagagattcaagcaagcatttatcgctggtgcagtcaccactatatttctccttggagtctcactacttgtggattactattattacaagagatggacatcatcagttttgaatctcttgatatacaatgtgttagggggtggagagagccatctctatgggactgaaggagcgttattttatataagaaatggatttaacaacttcaacttctgtttcattttggcaatgttgtttgtcgcaatatatcctgttatcagaaggaagtatgaccgtgccctgctggttgtgatttccccgatgtatatttggctggcgttcatgtcacttcagccccacaaagaagaaaggttcctttatcctatataccctcttatttgtgtctctgcttctgctgttattgagaacatccctgagctgttccgggaaaagtatagctcacgtgaaagtcttctggtgacaataaccaaatacatgcgacctgtgattcttggttgtatcttatgtgcttcacattctcgcacatttgctcttattaatggctattccgctcccttggaggtctacaaactactggagcatcatgatgatgcaggaccaggttctgttctatgtgtgggaagtgaatggcatcgatacccatcatcgttttttgtgccccactacattagcgaagtacggtggatcgatgatggattccgcggtcttcttccattcccatttaacaatacacttggaggcacttcagcatcacctccatacttcaacaacaagaaccaagcatccgaagaacaatatttaaagaacatcgaaacttgtacattcctcattgagttgcagcttagcagaccgtatcagtatcgaggcagcgacttatctacatgggaggctattgcggtgttgccttatttggacagagagctgtcgccagctaagtatagatcgttcttcatcccgcacatgtggcaggagaaaaatgtgtttggcaaatacgtagcactgagaagagtcccaaaatgatcacaaatcgttaaaactccttagacttgtagctttaactcagttcattgggtagttttgggagaatgtaataactaataactgattagtatcggctttaagttcaggtacgttcacggttcgtagttgtgttgttgtgaaagagactagttttaactttgtaagaaatctccaaatggtcagaagaacgtggaagattatgtttatg

SEQ ID NO: 1628 - protein, 570 aa, Arabidopsis thaliana
MDLTTTRQRRPLISDSSSSSSTKSYSKTDKPGRSNGGDAEDGGLRWFLPFIALCYLRYMSATSNIIHDCDEVFNYWEPLHYILYKSGFQTWEYSSNFALRSYLYILFHELAGRPASWWFGDDKVRVFYAVRLFLGLVSAVSDTVLVVALSRKYGKRIATYAVAMLCLTSGCFFASTSFLPSSFSMYAISLSSGLLLFEKYAMAVAVSVVGVILGWPFSILAFLPVVIYSLVKRFKQAFIAGAVTTIFLLGVSLLVDYYYYKRWTSSVLNLLIYNVLGGGESHLYGTEGALFYIRNGFNNFNFCFILAMLFVAIYPVIRRKYDRALLVVISPMYIWLAFMSLQPHKEERFLYPIYPLICVSASAVIENIPELFREKYSSRESLLVTITKYMRPVILGCILCASHSRTFALINGYSAPLEVYKLLEHHDDAGPGSVLCVGSEWHRYPSSFFVPHYISEVRWIDDGFRGLLPFPFNNTLGGTSASPPYFNNKNQASEEQYLKNIETCTFLIELQLSRPYQYRGSDLSTWEAIAVLPYLDRELSPAKYRSFFIPHMWQEKNVFGKYVALRRVPK

SEQ ID NO: 1629 - protein, 512 aa, Arabidopsis thaliana
MSATSNIIHDCDEVFNYWEPLHYILYKSGFQTWEYSSNFALRSYLYILFHELAGRPASWWFGDDKVRVFYAVRLFLGLVSAVSDTVLVVALSRKYGKRIATYAVAMLCLTSGCFFASTSFLPSSFSMYAISLSSGLLLFEKYAMAVAVSVVGVILGWPFSILAFLPVVIYSLVKRFKQAFIAGAVTTIFLLGVSLLVDYYYYKRWTSSVLNLLIYNVLGGGESHLYGTEGALFYIRNGFNNFNFCFILAMLFVAIYPVIRRKYDRALLVVISPMYIWLAFMSLQPHKEERFLYPIYPLICVSASAVIENIPELFREKYSSRESLLVTITKYMRPVILGCILCASHSRTFALINGYSAPLEVYKLLEHHDDAGPGSVLCVGSEWHRYPSSFFVPHYISEVRWIDDGFRGLLPFPFNNTLGGTSASPPYFNNKNQASEEQYLKNIETCTFLIELQLSRPYQYRGSDLSTWEAIAVLPYLDRELSPAKYRSFFIPHMWQEKNVFGKYVALRRVPK

SEQ ID NO: 1630 - protein, 407 aa, Arabidopsis thaliana
MLCLTSGCFFASTSFLPSSFSMYAISLSSGLLLFEKYAMAVAVSVVGVILGWPFSILAFLPVVIYSLVKRFKQAFIAGAVTTIFLLGVSLLVDYYYYKRWTSSVLNLLIYNVLGGGESHLYGTEGALFYIRNGFNNFNFCFILAMLFVAIYPVIRRKYDRALLVVISPMYIWLAFMSLQPHKEERFLYPIYPLICVSASAVIENIPELFREKYSSRESLLVTITKYMRPVILGCILCASHSRTFALINGYSAPLEVYKLLEHHDDAGPGSVLCVGSEWHRYPSSFFVPHYISEVRWIDDGFRGLLPFPFNNTLGGTSASPPYFNNKNQASEEQYLKNIETCTFLIELQLSRPYQYRGSDLSTWEAIAVLPYLDRELSPAKYRSFFIPHMWQEKNVFGKYVALRRVPK

SEQ ID NO: 1631 - DNA, 1297 bp, Arabidopsis thaliana
gagagagcttgtgtgaagtgacgaagaagacgaagaagacgaagaagaagaacattaatggcggctactccgtggtactttgtcgcagtacttctcaccattcttaccagctctcaggggattctaacaactctttctcaaagtgatggaggttataagtatgattatgctactgttccctttcttgctgaagtttttaagctgatcatttctggtttatttctctggagagagatgcggacatcttcctcaacaacttcaaggattactacggattggaagagtgtgcgattatttgttattccgtctcttatttatctgatacataacaatgtgcagtttgctacattgacttatgtggatacgtccacttatcagataatgggtaatttgaagattgtgaccactggcatactgtttaggttatttttgaaaaggaaactatctaaacttcagtggatggcaattggtcttttagctgttggaacaactaccagccaggttaagggttgtggagaagcttcttgtgattctttattcacggcaccaatacaaggttatttgctgggcatcctctcagctggtttgtccgcgctagctggaatctacacagagtttctgatgaagagaaacaatgacaccttatactggcaaaacttgcagttatatacgtttggttcacttttcaacgtagctcgacttatagcagatgatttcagacacgggtttgaaaagggtccttggtggcaacgtatctttgatgggtacagcatcaccacttggctggtagttctgaatctcggatccactggcttactggtctcgtggttaatgaagtatgcagacaacatcgtcaaggtttattctacatcaatggcgatgctacttactatggttgcatccatatacctttttagcttcaaaccgacactgcagcttttcttgggtattgtcatatgcatcatgtcactccatatgtactttgctcctccacacacgctcgtggacttgcccgtgacaaacgaagcacatgccaagaccttaaagcaagttgtcgtagaagaaaagacagattcttgaattaaattggacgaaaaggttagttgaacttatagaaaacaatttgctaagtaaatgaacacaatgatcttcttctagcttcatttctattagagaatgagaaacttggatgtgagttcttttgaagaaatgatctgatagtttgtttattcacgtaccgattctattctttgtaaatgtacatcgaggtgcctagaaatagtaaattcgattgttg

SEQ ID NO: 1632 - protein, 340 aa, Arabidopsis thaliana
MAATPWYFVAVLLTILTSSQGILTTLSQSDGGYKYDYATVPFLAEVFKLIISGLFLWREMRTSSSTTSRITTDWKSVRLFVIPSLIYLIHNNVQFATLTYVDTSTYQIMGNLKIVTTGILFRLFLKRKLSKLQWMAIGLLAVGTTTSQVKGCGEASCDSLFTAPIQGYLLGILSAGLSALAGIYTEFLMKRNNDTLYWQNLQLYTFGSLFNVARLIADDFRHGFEKGPWWQRIFDGYSITTWLVVLNLGSTGLLVSWLMKYADNIVKVYSTSMAMLLTMVASIYLFSFKPTLQLFLGIVICIMSLHMYFAPPHTLVDLPVTNEAHAKTLKQVVVEEKTDS

SEQ ID NO: 1633 - protein, 281 aa, Arabidopsis thaliana
MRTSSSTTSRITTDWKSVRLFVIPSLIYLIHNNVQFATLTYVDTSTYQIMGNLKIVTTGILFRLFLKRKLSKLQWMAIGLLAVGTTTSQVKGCGEASCDSLFTAPIQGYLLGILSAGLSALAGIYTEFLMKRNNDTLYWQNLQLYTFGSLFNVARLIADDFRHGFEKGPWWQRIFDGYSITTWLVVLNLGSTGLLVSWLMKYADNIVKVYSTSMAMLLTMVASIYLFSFKPTLQLFLGIVICIMSLHMYFAPPHTLVDLPVTNEAHAKTLKQVVVEEKTDS

SEQ ID NO: 1634 - protein, 232 aa, Arabidopsis thaliana
MGNLKIVTTGILFRLFLKRKLSKLQWMAIGLLAVGTTTSQVKGCGEASCDSLFTAPIQGYLLGILSAGLSALAGIYTEFLMKRNNDTLYWQNLQLYTFGSLFNVARLIADDFRHGFEKGPWWQRIFDGYSITTWLVVLNLGSTGLLVSWLMKYADNIVKVYSTSMAMLLTMVASIYLFSFKPTLQLFLGIVICIMSLHMYFAPPHTLVDLPVTNEAHAKTLKQVVVEEKTDS

SEQ ID NO: 1635 - DNA, 2216 bp, Arabidopsis thaliana
aactaacacactaaggttttcttacaaccctcgcaactctatttaaacatttatcttgtgacgtttcacataacaagatatatctacaataaccccaagaaatttaacagaatgaaagtaattacttccctaatctcttctattttgcttaaattcatccacaaagacttccatgagatttatgcaagaatgtccctcctcgatcggtttcttcttcttatcgtgcatggagtggataagatggttccatggcataagcttccagtattcttggggttaacctatcttgaagtacgaagacatcttcaccaacaatacaatcttctcaacgtcggtcaaactccgactgggatccggtttgatcctgctaattatccgtaccggactgctgacggaaaattcaatgatccctttaatgaaggcgtcggcagtcaaaatagttttttcgggagaaattgtccccccgtcgatcagaaatcaaagttacggaggccagaccccatggtggtggcgacaaaactattaggaaggaaaaagtttatcgacacgggaaaacaattcaacatgattgcagcttcttggattcagttcatgatccatgattggattgatcatcttgaagacactcaccaaatcgaacttgtcgctccaaaagaagtagcgagcaagtgtcccttaagctcctttaggttcttaaagaccaaggaagtccctaccggtttcttcgaaatcaagactggctcgcaaaatatccgtacaccttggtgggattcgagcgtcatctatggaagcaactcgaaaacattggatagagtaagaacttacaaagacgggaaactaaagatatcggaggagacgggtctccttctccatgacgaagacggtttagctatctccggcgacattcgtaacagttgggctggtgtctccgctttgcaagctctcttcatcaaagagcacaacgccgtatgcgacgccctcaaggatgaggatgatgatttggaagacgaagatttgtaccggtacgctaggctagtgacctcagccgtggtagccaagattcacaccatagattggacagtccagcttctcaaaaccgacactttacttgctgggatgcgagcaaattggtacggactactaggaaagaagtttaaagattctttcggacatgcaggcagttcgatcttgggaggtgtcgtgggaatgaagaaaccgcaaaatcatggggtcccttactctctaactgaagatttcaccagcgtctatcgaatgcattctctcttacctgatcaactccatatacttgacattgatgatgtaccaggaactaataaatcactaccgttgattcaagagatttctatgagagatttgattggtcgcaagggagaagaaaccatgtctcacattggattcactaagctaatggtctcaatgggtcaccaagcaagtggtgcccttgaactgatgaattatccgatgtggttaagagacattgttccccacgaccccaacggccaagctcgtccagaccacgtcgacttagctgctttagagatctacagggacagggagaggagcgtcccacggtacaacgagttcaggagatctatgtttatgattccgataaccaagtgggaagatctaacggaggatgaggaagctattgaagtgttggatgacgtgtacgatggtgatgtggaggagcttgatcttctcgtgggacttatggcagagaagaaaatcaaaggttttgctatcagtgagactgctttttacattttcctcatcatggccacaaggcgattagaagcggataggtttttcacgagtgatttcaatgaaacgatttacacgaagaaggggcttgaatgggtgaatactacagagagtctcaaggatgtgattgatcgtcattatcctgatatgacagacaaatggatgaactctgaaagtgcattttcagtatgggattcacctccacttaccaaaaatccaatccctctctatctccgaattccctcttaatttgatcattttaatgtgatctatggcacttcgaatgattttttttcttccttttttggcatttgttggctgtgagctgtgtttcgacattgtaatgtactatacagataaataaatgggtgatatacatgtgattcaataagttgtttgtaatactcttttgttataattaaaataatgtatat

SEQ ID NO: 1636 - protein, 639 aa, Arabidopsis thaliana
MKVITSLISSILLKFIHKDFHEIYARMSLLDRFLLLIVHGVDKMVPWHKLPVFLGLTYLEVRRHLHQQYNLLNVGQTPTGIRFDPANYPYRTADGKFNDPFNEGVGSQNSFFGRNCPPVDQKSKLRRPDPMVVATKLLGRKKFIDTGKQFNMIAASWIQFMIHDWIDHLEDTHQIELVAPKEVASKCPLSSFRFLKTKEVPTGFFEIKTGSQNIRTPWWDSSVIYGSNSKTLDRVRTYKDGKLKISEETGLLLHDEDGLAISGDIRNSWAGVSALQALFIKEHNAVCDALKDEDDDLEDEDLYRYARLVTSAVVAKIHTIDWTVQLLKTDTLLAGMRANWYGLLGKKFKDSFGHAGSSILGGVVGMKKPQNHGVPYSLTEDFTSVYRMHSLLPDQLHILDIDDVPGTNKSLPLIQEISMRDLIGRKGEETMSHIGFTKLMVSMGHQASGALELMNYPMWLRDIVPHDPNGQARPDHVDLAALEIYRDRERSVPRYNEFRRSMFMIPITKWEDLTEDEEAIEVLDDVYDGDVEELDLLVGLMAEKKIKGFAISETAFYIFLIMATRRLEADRFFTSDFNETIYTKKGLEWVNTTESLKDVIDRHYPDMTDKWMNSESAFSVWDSPPLTKNPIPLYLRIPS

SEQ ID NO: 1637 - protein, 613 aa, Arabidopsis thaliana
MSLLDRFLLLIVHGVDKMVPWHKLPVFLGLTYLEVRRHLHQQYNLLNVGQTPTGIRFDPANYPYRTADGKFNDPFNEGVGSQNSFFGRNCPPVDQKSKLRRPDPMVVATKLLGRKKFIDTGKQFNMIAASWIQFMIHDWIDHLEDTHQIELVAPKEVASKCPLSSFRFLKTKEVPTGFFEIKTGSQNIRTPWWDSSVIYGSNSKTLDRVRTYKDGKLKISEETGLLLHDEDGLAISGDIRNSWAGVSALQALFIKEHNAVCDALKDEDDDLEDEDLYRYARLVTSAVVAKIHTIDWTVQLLKTDTLLAGMRANWYGLLGKKFKDSFGHAGSSILGGVVGMKKPQNHGVPYSLTEDFTSVYRMHSLLPDQLHILDIDDVPGTNKSLPLIQEISMRDLIGRKGEETMSHIGFTKLMVSMGHQASGALELMNYPMWLRDIVPHDPNGQARPDHVDLAALEIYRDRERSVPRYNEFRRSMFMIPITKWEDLTEDEEAIEVLDDVYDGDVEELDLLVGLMAEKKIKGFAISETAFYIFLIMATRRLEADRFFTSDFNETIYTKKGLEWVNTTESLKDVIDRHYPDMTDKWMNSESAFSVWDSPPLTKNPIPLYLRIPS

SEQ ID NO: 1638 - protein, 596 aa, Arabidopsis thaliana
MVPWHKLPVFLGLTYLEVRRHLHQQYNLLNVGQTPTGIRFDPANYPYRTADGKFNDPFNEGVGSQNSFFGRNCPPVDQKSKLRRPDPMVVATKLLGRKKFIDTGKQFNMIAASWIQFMIHDWIDHLEDTHQIELVAPKEVASKCPLSSFRFLKTKEVPTGFFEIKTGSQNIRTPWWDSSVIYGSNSKTLDRVRTYKDGKLKISEETGLLLHDEDGLAISGDIRNSWAGVSALQALFIKEHNAVCDALKDEDDDLEDEDLYRYARLVTSAVVAKIHTIDWTVQLLKTDTLLAGMRANWYGLLGKKFKDSFGHAGSSILGGVVGMKKPQNHGVPYSLTEDFTSVYRMHSLLPDQLHILDIDDVPGTNKSLPLIQEISMRDLIGRKGEETMSHIGFTKLMVSMGHQASGALELMNYPMWLRDIVPHDPNGQARPDHVDLAALEIYRDRERSVPRYNEFRRSMFMIPITKWEDLTEDEEAIEVLDDVYDGDVEELDLLVGLMAEKKIKGFAISETAFYIFLIMATRRLEADRFFTSDFNETIYTKKGLEWVNTTESLKDVIDRHYPDMTDKWMNSESAFSVWDSPPLTKNPIPLYLRIPS

SEQ ID NO: 1639 - DNA, 1165 bp, Arabidopsis thaliana
aagtctttttataaaggaaagaaagaaaaactttcctaattggttcataccaaagtctgagctcttctttatatctctcttgtagtttcttattgggggtctttgttttgtttggttcttttagagtaagaagtttcttaaaaaaggatcaaaaatgggaaggggtagggttcaattgaagaggatagagaacaagatcaatagacaagtgacattctcgaaaagaagagctggtcttttgaagaaagctcatgagatctctgttctctgtgatgctgaagttgctcttgttgtcttctcccataagggaaaactcttcgaatactccactgattcttgtatggagaagatacttgaacgctatgagaggtactcttacgccgaaagacagcttattgcacctgagtccgacgtcaatacaaactggtcgatggagtataacaggcttaaggctaagattgagcttttggagagaaaccagaggcattatcttggggaagacttgcaagcaatgagccctaaagagcttcagaatctggagcagcagcttgacactgctcttaagcacatccgcactagaaaaaaccaacttatgtacgagtccatcaatgagctccaaaaaaaggagaaggccatacaggagcaaaacagcatgctttctaaacagatcaaggagagggaaaaaattcttagggctcaacaggagcagtgggatcagcagaaccaaggccacaatatgcctccccctctgccaccgcagcagcaccaaatccagcatccttacatgctctctcatcagccatctccttttctcaacatgggtggtctgtatcaagaagatgatcctatggcaatgaggaggaatgatctcgaactgactcttgaacccgtttacaactgcaaccttggctgcttcgccgcatgaagcatttccatatatatatttgtaatcgtcaacaataaaaacagtttgccacatacatataaatagtggctaggctcttttcatccaattaatatattttggcaaatgttcgatgttcttatatcatcatatataaattagcaggctcctttcttcttttgtaatttgataagtttatttgcttcaatatggagcaaaattgtaatatatttgaaggtcagagagaatgaacgtgaactt

SEQ ID NO: 1640 - protein, 256 aa, Arabidopsis thaliana
MGRGRVQLKRIENKINRQVTFSKRRAGLLKKAHEISVLCDAEVALVVFSHKGKLFEYSTDSCMEKILERYERYSYAERQLIAPESDVNTNWSMEYNRLKAKIELLERNQRHYLGEDLQAMSPKELQNLEQQLDTALKHIRTRKNQLMYESINELQKKEKAIQEQNSMLSKQIKEREKILRAQQEQWDQQNQGHNMPPPLPPQQHQIQHPYMLSHQPSPFLNMGGLYQEDDPMAMRRNDLELTLEPVYNCNLGCFAA

SEQ ID NO: 1641 - protein, 194 aa, Arabidopsis thaliana
MEKILERYERYSYAERQLIAPESDVNTNWSMEYNRLKAKIELLERNQRHYLGEDLQAMSPKELQNLEQQLDTALKHIRTRKNQLMYESINELQKKEKAIQEQNSMLSKQIKEREKILRAQQEQWDQQNQGHNMPPPLPPQQHQIQHPYMLSHQPSPFLNMGGLYQEDDPMAMRRNDLELTLEPVYNCNLGCFAA

SEQ ID NO: 1642 - protein, 164 aa, Arabidopsis thaliana
MEYNRLKAKIELLERNQRHYLGEDLQAMSPKELQNLEQQLDTALKHIRTRKNQLMYESINELQKKEKAIQEQNSMLSKQIKEREKILRAQQEQWDQQNQGHNMPPPLPPQQHQIQHPYMLSHQPSPFLNMGGLYQEDDPMAMRRNDLELTLEPVYNCNLGCFAA

SEQ ID NO: 1643 - DNA, 1694 bp, Arabidopsis thaliana
attatattgtccttgcaatttataagtaaaaacatttcttttctggtccactcgttttaacttccggcgatcgattttcacggcgagaaatgttgtcggcgcttggctttgctttactcagcatcttcgcgatcctcttgtcgttatcaaccttgtctaatggattacttcaacctcgtaggatttctcatggcttgacggaaagtagcaagtacttgacgagggatgagctctggttcaatcaaaccctagatcattactctccttctgatcatcgcgaattcaaacagcgatactatgaatatctagaccatttacgagttcctgatggacctatctttatgatgatctgtggcgaaggaccttgcaatggaatccccaatgactatataactgtgttagcaaagaagtttgatgcaggcattgtttcacttgagcatcgttattacggaaagagctcaccgtttaagtcattagccactgagaatctcaagtatctttcttctaaacaggctcttttcgatttagctgctttccgccaatattaccaggactctttgaatgttaagtttaatagaagtggcgatgttgagaatccgtggtttttcttcggagcttcttattctggagctttaagtgcttggttccggcttaagttccctcatttgacctgtggaagccttgctagttctgcagttgttcgtgcagtctacgaattccctgaatttgatcaacagataggtgagtcggctggaccggaatgtaaagctgcactacaagagactaataagctcttggaactagggcttaaagtgaataacagggctgtgaaagctctcttcaatgccaccgagcttgacgttgatgctgatttcttatacttgatagcagatgcagaagttatggcgatccaatacggaaacccagataaactatgtgtaccactcgtggaagctcagaagaatcgtgatgatttagtggaagcatatgctaaatatgttagagagttttgtgtgggggttttcgggctaagctctaaaacatatagccggaaacatctgctagacactgcggtcaccccagaaagtgcagataggctttggtggttccaagtttgcactgaagtggcatatttccaagtggcacctgcaaacgatagcatccggtctcatcaaatcaatacagagtatcatttggatctatgcaagagtctgtttgggaaaggtgtttaccctgaagtcgatgcaacaaacctgtattatggaagtgacagaattgctgcgaccaagattatcttcacaaatgggtcacaggatccatggcgtcatgcatccaaacagacctcatctcctgaactgccttcttacattgtgacttgccacaactgtggccatggaagtgatctccgtggatgccctcaatctcccatggtcattggaggtgattccaagaattgcagttcacctgatgcagtgaacaaagtgaggcaacatatagtagatcatatggacttgtggctctctgagtgtcgtggagggattaggagttccatgtaaagagtcacacgaagtcagaaactgcggttatgcaaataaataaaacatcagatgtatgtttcaaacctgtatctgtgtaactgtaacctctgatgtatgtttcgaacttgtctctacggacctaatacagtagtttac

SEQ ID NO: 1644 - protein, 488 aa, Arabidopsis thaliana
MLSALGFALLSIFAILLSLSTLSNGLLQPRRISHGLTESSKYLTRDELWFNQTLDHYSPSDHREFKQRYYEYLDHLRVPDGPIFMMICGEGPCNGIPNDYITVLAKKFDAGIVSLEHRYYGKSSPFKSLATENLKYLSSKQALFDLAAFRQYYQDSLNVKFNRSGDVENPWFFFGASYSGALSAWFRLKFPHLTCGSLASSAVVRAVYEFPEFDQQIGESAGPECKAALQETNKLLELGLKVNNRAVKALFNATELDVDADFLYLIADAEVMAIQYGNPDKLCVPLVEAQKNRDDLVEAYAKYVREFCVGVFGLSSKTYSRKHLLDTAVTPESADRLWWFQVCTEVAYFQVAPANDSIRSHQINTEYHLDLCKSLFGKGVYPEVDATNLYYGSDRIAATKIIFTNGSQDPWRHASKQTSSPELPSYIVTCHNCGHGSDLRGCPQSPMVIGGDSKNCSSPDAVNKVRQHIVDHMDLWLSECRGGIRSSM

SEQ ID NO: 1645 - protein, 404 aa, Arabidopsis thaliana
MMICGEGPCNGIPNDYITVLAKKFDAGIVSLEHRYYGKSSPFKSLATENLKYLSSKQALFDLAAFRQYYQDSLNVKFNRSGDVENPWFFFGASYSGALSAWFRLKFPHLTCGSLASSAVVRAVYEFPEFDQQIGESAGPECKAALQETNKLLELGLKVNNRAVKALFNATELDVDADFLYLIADAEVMAIQYGNPDKLCVPLVEAQKNRDDLVEAYAKYVREFCVGVFGLSSKTYSRKHLLDTAVTPESADRLWWFQVCTEVAYFQVAPANDSIRSHQINTEYHLDLCKSLFGKGVYPEVDATNLYYGSDRIAATKIIFTNGSQDPWRHASKQTSSPELPSYIVTCHNCGHGSDLRGCPQSPMVIGGDSKNCSSPDAVNKVRQHIVDHMDLWLSECRGGIRSSM

SEQ ID NO: 1646 - protein, 403 aa, Arabidopsis thaliana
MICGEGPCNGIPNDYITVLAKKFDAGIVSLEHRYYGKSSPFKSLATENLKYLSSKQALFDLAAFRQYYQDSLNVKFNRSGDVENPWFFFGASYSGALSAWFRLKFPHLTCGSLASSAVVRAVYEFPEFDQQIGESAGPECKAALQETNKLLELGLKVNNRAVKALFNATELDVDADFLYLIADAEVMAIQYGNPDKLCVPLVEAQKNRDDLVEAYAKYVREFCVGVFGLSSKTYSRKHLLDTAVTPESADRLWWFQVCTEVAYFQVAPANDSIRSHQINTEYHLDLCKSLFGKGVYPEVDATNLYYGSDRIAATKIIFTNGSQDPWRHASKQTSSPELPSYIVTCHNCGHGSDLRGCPQSPMVIGGDSKNCSSPDAVNKVRQHIVDHMDLWLSECRGGIRSSM

SEQ ID NO: 1647 - DNA, 2006 bp, Arabidopsis thaliana
aagtcgccgggaaaagtaaaataaaaagccgtcacgtctccgataaataatagagtatcgttagataggtagcttcaacgtaaggaatctaaattggttcagctcaaaaaacgaaaacgatgggttccatcgaagaagaagcaagacctctcatcgaagaaggtttaattttacaggaagtgaaattgtatgctgaagatggttcagtggactttaatggaaacccaccattgaaggagaaaacaggaaactggaaagcttgtccttttattcttggtaatgaatgttgtgagaggctagcttactatggtattgctgggaatttaatcacttacctcaccactaagcttcaccaaggaaatgtttctgctgctacaaacgttaccacatggcaagggacttgttatctcactcctctcattggagctgttctggctgatgcttactggggacgttactggaccatcgcttgtttctccgggatttatttcatcgggatgtctgcgttaactctttcagcttcagttccggcattgaagccagcggaatgtattggtgacttttgtccatctgcaacgccagctcagtatgcgatgttctttggtgggctttacctgatcgctcttggaactggaggtatcaaaccgtgtgtctcatccttcggtgccgatcagtttgatgacacggactctcgggaacgagttagaaaagcttcgttctttaactggttttacttctccatcaatattggagcacttgtgtcatctagtcttctagtttggattcaagagaatcgcgggtggggtttagggtttgggataccaacagtgttcatgggactagccattgcaagtttcttctttggcacacctctttataggtttcagaaacctggaggaagccctataactcggatttcccaagtcgtggttgcttcgttccggaaatcgtctgtcaaagtccctgaagacgccacacttctgtatgaaactcaagacaagaactctgctattgctggaagtagaaaaatcgagcataccgatgattgccagtatcttgacaaagccgctgttatctcagaagaagaatcgaaatccggagattattccaactcgtggagactatgcacggttacgcaagtcgaagaactcaagattctgatccgaatgttcccaatctgggcttctggtatcattttctcagctgtatacgcacaaatgtccacaatgtttgttcaacaaggccgagccatgaactgcaaaattggatcattccagcttcctcctgcagcactcgggacattcgacacagcaagcgtcatcatctgggtgccgctctacgaccggttcatcgttcccttagcaagaaagttcacaggagtagacaaaggattcactgagatacaaagaatgggaattggtctgtttgtctctgttctctgtatggcagctgcagctatcgtcgaaatcatccgtctccatatggccaacgatcttggattagtcgagtcaggagccccagttcccatatccgtcttgtggcagattccacagtacttcattctcggtgcagccgaagtattctacttcatcggtcagctcgagttcttctacgaccaatctccagatgcaatgagaagcttgtgcagtgccttagctcttttgaccaatgcacttggtaactacttgagctcgttgatcctcacgctcgtgacttattttacaacaagaaatgggcaagaaggttggatttcggataatctcaattcaggtcatctcgattacttcttctggctcttggctggtcttagccttgtgaacatggcggtttacttcttctctgctgctaggtataagcaaaagaaagcttcgtcgtagtaatgctgttatctatctactttcattacatacaaaagtttgtttctttcaactgtaactgtctctgtatcaataacaacattgctgtgtacttttcctttcaatttcaaaagtttaagtcgcatttgc

SEQ ID NO: 1648 - protein, 585 aa, Arabidopsis thaliana
MGSIEEEARPLIEEGLILQEVKLYAEDGSVDFNGNPPLKEKTGNWKACPFILGNECCERLAYYGIAGNLITYLTTKLHQGNVSAATNVTTWQGTCYLTPLIGAVLADAYWGRYWTIACFSGIYFIGMSALTLSASVPALKPAECIGDFCPSATPAQYAMFFGGLYLIALGTGGIKPCVSSFGADQFDDTDSRERVRKASFFNWFYFSINIGALVSSSLLVWIQENRGWGLGFGIPTVFMGLAIASFFFGTPLYRFQKPGGSPITRISQVVVASFRKSSVKVPEDATLLYETQDKNSAIAGSRKIEHTDDCQYLDKAAVISEEESKSGDYSNSWRLCTVTQVEELKILIRMFPIWASGIIFSAVYAQMSTMFVQQGRAMNCKIGSFQLPPAALGTFDTASVIIWVPLYDRFIVPLARKFTGVDKGFTEIQRMGIGLFVSVLCMAAAAIVEIIRLHMANDLGLVESGAPVPISVLWQIPQYFILGAAEVFYFIGQLEFFYDQSPDAMRSLCSALALLTNALGNYLSSLILTLVTYFTTRNGQEGWISDNLNSGHLDYFFWLLAGLSLVNMAVYFFSAARYKQKKASS

SEQ ID NO: 1649 - protein, 459 aa, Arabidopsis thaliana
MSALTLSASVPALKPAECIGDFCPSATPAQYAMFFGGLYLIALGTGGIKPCVSSFGADQFDDTDSRERVRKASFFNWFYFSINIGALVSSSLLVWIQENRGWGLGFGIPTVFMGLAIASFFFGTPLYRFQKPGGSPITRISQVVVASFRKSSVKVPEDATLLYETQDKNSAIAGSRKIEHTDDCQYLDKAAVISEEESKSGDYSNSWRLCTVTQVEELKILIRMFPIWASGIIFSAVYAQMSTMFVQQGRAMNCKIGSFQLPPAALGTFDTASVIIWVPLYDRFIVPLARKFTGVDKGFTEIQRMGIGLFVSVLCMAAAAIVEIIRLHMANDLGLVESGAPVPISVLWQIPQYFILGAAEVFYFIGQLEFFYDQSPDAMRSLCSALALLTNALGNYLSSLILTLVTYFTTRNGQEGWISDNLNSGHLDYFFWLLAGLSLVNMAVYFFSAARYKQKKASS

SEQ ID NO: 1650 - protein, 427 aa, Arabidopsis thaliana
MFFGGLYLIALGTGGIKPCVSSFGADQFDDTDSRERVRKASFFNWFYFSINIGALVSSSLLVWIQENRGWGLGFGIPTVFMGLAIASFFFGTPLYRFQKPGGSPITRISQVVVASFRKSSVKVPEDATLLYETQDKNSAIAGSRKIEHTDDCQYLDKAAVISEEESKSGDYSNSWRLCTVTQVEELKILIRMFPIWASGIIFSAVYAQMSTMFVQQGRAMNCKIGSFQLPPAALGTFDTASVIIWVPLYDRFIVPLARKFTGVDKGFTEIQRMGIGLFVSVLCMAAAAIVEIIRLHMANDLGLVESGAPVPISVLWQIPQYFILGAAEVFYFIGQLEFFYDQSPDAMRSLCSALALLTNALGNYLSSLILTLVTYFTTRNGQEGWISDNLNSGHLDYFFWLLAGLSLVNMAVYFFSAARYKQKKASS

SEQ ID NO: 1651 - DNA, 2118 bp, Arabidopsis thaliana
aaaaaaaagaaaaatcaaaatccaattcaacactctcacacttcgatatctccgccttcattcttctcagagccaattgtcctgagatttcgatttctccaatctctcttcctccgtcgccggcgaaactatgtctcagtctattcaattctccactccttcacacactcctcaccttctccatctccctcactcacaattcaaccgtcctctctcctctatctccttccgtcgcttccctctaacaaccatcaaatacacttccatcagagcctcctcgtcatcatctccttcaccggatctcgattcatcgtcctcatcatcatcctcgcaagtacttctctcacctaacggtactggtgctgtgaagtctgatgagagatccgttgtcgctacggcggttacgactgatacgtctgggattgaggttgatactgtgacggaagctgagcttaaggagaatggatttagaagtacgaggaggacgaagctgatctgtacgatcggaccggcgacttgtggatttgagcagcttgaggcgcttgctgtgggaggtatgaatgtggcaaggcttaatatgtgtcacggtacgcgtgattggcaccgcggtgtgattcgtagtgttcggaggcttaatgaggagaaaggctttgcggttgctattatgatggatactgaaggtagtgagattcatatgggagatcttggtggtgaagcttcagctaaagcagaggatggtgaggtttggactttcactgttagagcttttgattcttctcgtcctgaacgtaccattagtgttagctacgatggtttcgctgaagatgtaagagttggggatgaacttttggttgatggtgggatggtgagatttgaagtgattgagaagattggtcctgatgttaagtgtctatgtaccgatcctggattgttgcttcctcgagctaacttgacgttttggagagatggaagtcttgtacgagagcgtaatgccatgcttccaacaatttcttccaaggactggttggatattgattttggaattgctgaaggtgtggatttcattgctgtatcgtttgtcaagtcggctgaagtcattaatcaccttaaaagttatcttgctgctcgttcccgtggaggggaaattggagtgattgcaaagatcgagagtatcgattcactgaccaatttggaagaaattattctagcatcagatggggccatggttgcaagaggagatctgggagctcagatacctcttgagcaagttccagcagctcaacagagaatcgtccaagtatgcagagctcttaacaaacccgtcattgtcgcttcacagctattggagtccatgattgagtacccaactccaaccagagcagaagttgccgacgtgtctgaagcagtaagacaaagatcagatgcattgatgctctctggagaatcagctatgggacaattcccagacaaggcgctcacggttctaaggactgtcagtttaagaatcgagagatggtggagggaagagaaacgccatgagtctgtaccgcttcaagccataggctcttcattttcagacaaaatctcagaagagatctgtaactcagctgctaaaatggctaacaatcttggagtggacgcggttttcgtttacacaacgagcggacacatggcatcactggtctcccgatgtcgcccggactgcccgatctttgctttcacaaccacaacctcagtgagaagacgcttaaacctacaatggggacttatcccattccgtctcagcttctcagacgacatggaaagcaacttgaacaaaacattctcgttactgaaatcaagaggtatgatcaaatctggtgacctcgtgatcgcagtctcggacatgctgcaatcaatccaggtaatgaacgtcccgtaattctctctctttatacaatttcgcaatcccgcaaaagagtgttttgtttcctacttttgttactgtttttagactactcttacattagattccagaggcatcatcatcttcggtttgttaacaacagtaatgtgtaagctttgtttgtagtgtgtactgtttgtttttggttttcaataatatcagtaatcttattc

SEQ ID NO: 1652 - protein, 596 aa, Arabidopsis thaliana
MSQSIQFSTPSHTPHLLHLPHSQFNRPLSSISFRRFPLTTIKYTSIRASSSSSPSPDLDSSSSSSSSQVLLSPNGTGAVKSDERSVVATAVTTDTSGIEVDTVTEAELKENGFRSTRRTKLICTIGPATCGFEQLEALAVGGMNVARLNMCHGTRDWHRGVIRSVRRLNEEKGFAVAIMMDTEGSEIHMGDLGGEASAKAEDGEVWTFTVRAFDSSRPERTISVSYDGFAEDVRVGDELLVDGGMVRFEVIEKIGPDVKCLCTDPGLLLPRANLTFWRDGSLVRERNAMLPTISSKDWLDIDFGIAEGVDFIAVSFVKSAEVINHLKSYLAARSRGGEIGVIAKIESIDSLTNLEEIILASDGAMVARGDLGAQIPLEQVPAAQQRIVQVCRALNKPVIVASQLLESMIEYPTPTRAEVADVSEAVRQRSDALMLSGESAMGQFPDKALTVLRTVSLRIERWWREEKRHESVPLQAIGSSFSDKISEEICNSAAKMANNLGVDAVFVYTTSGHMASLVSRCRPDCPIFAFTTTTSVRRRLNLQWGLIPFRLSFSDDMESNLNKTFSLLKSRGMIKSGDLVIAVSDMLQSIQVMNVP

SEQ ID NO: 1653 - protein, 454 aa, Arabidopsis thaliana
MNVARLNMCHGTRDWHRGVIRSVRRLNEEKGFAVAIMMDTEGSEIHMGDLGGEASAKAEDGEVWTFTVRAFDSSRPERTISVSYDGFAEDVRVGDELLVDGGMVRFEVIEKIGPDVKCLCTDPGLLLPRANLTFWRDGSLVRERNAMLPTISSKDWLDIDFGIAEGVDFIAVSFVKSAEVINHLKSYLAARSRGGEIGVIAKIESIDSLTNLEEIILASDGAMVARGDLGAQIPLEQVPAAQQRIVQVCRALNKPVIVASQLLESMIEYPTPTRAEVADVSEAVRQRSDALMLSGESAMGQFPDKALTVLRTVSLRIERWWREEKRHESVPLQAIGSSFSDKISEEICNSAAKMANNLGVDAVFVYTTSGHMASLVSRCRPDCPIFAFTTTTSVRRRLNLQWGLIPFRLSFSDDMESNLNKTFSLLKSRGMIKSGDLVIAVSDMLQSIQVMNVP

SEQ ID NO: 1654 - protein, 447 aa, Arabidopsis thaliana
MCHGTRDWHRGVIRSVRRLNEEKGFAVAIMMDTEGSEIHMGDLGGEASAKAEDGEVWTFTVRAFDSSRPERTISVSYDGFAEDVRVGDELLVDGGMVRFEVIEKIGPDVKCLCTDPGLLLPRANLTFWRDGSLVRERNAMLPTISSKDWLDIDFGIAEGVDFIAVSFVKSAEVINHLKSYLAARSRGGEIGVIAKIESIDSLTNLEEIILASDGAMVARGDLGAQIPLEQVPAAQQRIVQVCRALNKPVIVASQLLESMIEYPTPTRAEVADVSEAVRQRSDALMLSGESAMGQFPDKALTVLRTVSLRIERWWREEKRHESVPLQAIGSSFSDKISEEICNSAAKMANNLGVDAVFVYTTSGHMASLVSRCRPDCPIFAFTTTTSVRRRLNLQWGLIPFRLSFSDDMESNLNKTFSLLKSRGMIKSGDLVIAVSDMLQSIQVMNVP

SEQ ID NO: 1655 - DNA, 1840 bp, Arabidopsis thaliana
aaaaaaatcaaaaaaattcatatcatctttttgtctttttttaccagaatttcatccttatttcgtgctaaatcattttccaaacattcataatactttttgttggtttatggccaactaacaaaatatcctctagattttcttctttgtgttagtctatataaagcaataccacagtgatcctcttttttaattcattctgtgtttatgtcaataatcacaatggtttggttaatgaaagtttttgtctttgtgacattactctctttagtgtttgtaataacagaatcagctcctgaatctgctcttatcaccaaacttcctggtttcgaaggcacttttccttcgaaacattactccgggtatgtgacaattgataaggaacatggaaagaatctatggtattactttattgaatcggagaagaatccatcgaaagatccggtggtgctttggctcaatggtggtccaggttgttcaagcatggatggatttgtgtatgagcatggtccattcaatttcgaactaccaaagaaaaacaatagtctcccactcttgcatcttaatccttatagttggtccaaggtctctaacattatataccttgattctcctgttggtgtgggattctcttactcaaacaataagtctgattacataaccggtgatattaaaaccgcggttgactctcacgcgttccttctcaagtggttccaaatgtttcctgagtttcaatcaaatccttttttcatctctggagaatcttacgccggagtttatgtcccaactcttgcttcagaagttgtcatagggaacaaaaatggagtaaagccggctcttaacttcaaggggtatttggttggaaatgtagttgcggatccgaagtttgatggaaatgcttttgtcccgtttgcacatgggatgggactaatctctgatgaactctttgagaacgttacaaaagcttgcaagggaaatttctatgaaatagagggactcgagtgcgaggaacagtatacgaaagttaacgatgatactaaccagttgaatatatacaacattcttgagccatgttaccacggaacatcgctatctgcattcgacattagatcgcttccttcaagtctccttcagctaggcaaaactgaaaaacggttacctataagaaaaagaatgtttggtcgagcgtggccagttcgtgcgcctgttcatccaggcattgtccctagctggtctcaacttcttgccgacgtcactgttccttgcattgatgatagagttgcaacagcgtggttgaacgatccagagattaggaaagctattcatactaaagaggagagcgagattggaaggtgggaactttgcagtgggaaactctcattctatcacgacgcaggaagcatgatcgatttccatagaaaccttacactaagtggatatagagctctcatttacagcggggatcacgatatgtgtgttccgtttactggctcggaagcttggacaaaatctcttggatacaaagttattgatgaatggagggcatggatatcaaatgaccaagtcgcggggtatacgcaaggatatgcaaacaatctcacatttttaaccatcaagggtgcaggacatacggttcctgagtacaaaccgcgggaggctttagacttctatagccgatttctagaaggaagcaagatttaagagagctgtctcatcagtttcatattctgtgctgtatttaaaagtgatcatcttatagcaatatagaatcttgattgatttgaataagaaagatatattcttcaactcattattcaacatagtaaaaatcatttacctt

SEQ ID NO: 1656 - protein, 497 aa, Arabidopsis thaliana
MSIITMVWLMKVFVFVTLLSLVFVITESAPESALITKLPGFEGTFPSKHYSGYVTIDKEHGKNLWYYFIESEKNPSKDPVVLWLNGGPGCSSMDGFVYEHGPFNFELPKKNNSLPLLHLNPYSWSKVSNIIYLDSPVGVGFSYSNNKSDYITGDIKTAVDSHAFLLKWFQMFPEFQSNPFFISGESYAGVYVPTLASEVVIGNKNGVKPALNFKGYLVGNVVADPKFDGNAFVPFAHGMGLISDELFENVTKACKGNFYEIEGLECEEQYTKVNDDTNQLNIYNILEPCYHGTSLSAFDIRSLPSSLLQLGKTEKRLPIRKRMFGRAWPVRAPVHPGIVPSWSQLLADVTVPCIDDRVATAWLNDPEIRKAIHTKEESEIGRWELCSGKLSFYHDAGSMIDFHRNLTLSGYRALIYSGDHDMCVPFTGSEAWTKSLGYKVIDEWRAWISNDQVAGYTQGYANNLTFLTIKGAGHTVPEYKPREALDFYSRFLEGSKI

SEQ ID NO: 1657 - protein, 492 aa, Arabidopsis thaliana
MVWLMKVFVFVTLLSLVFVITESAPESALITKLPGFEGTFPSKHYSGYVTIDKEHGKNLWYYFIESEKNPSKDPVVLWLNGGPGCSSMDGFVYEHGPFNFELPKKNNSLPLLHLNPYSWSKVSNIIYLDSPVGVGFSYSNNKSDYITGDIKTAVDSHAFLLKWFQMFPEFQSNPFFISGESYAGVYVPTLASEVVIGNKNGVKPALNFKGYLVGNVVADPKFDGNAFVPFAHGMGLISDELFENVTKACKGNFYEIEGLECEEQYTKVNDDTNQLNIYNILEPCYHGTSLSAFDIRSLPSSLLQLGKTEKRLPIRKRMFGRAWPVRAPVHPGIVPSWSQLLADVTVPCIDDRVATAWLNDPEIRKAIHTKEESEIGRWELCSGKLSFYHDAGSMIDFHRNLTLSGYRALIYSGDHDMCVPFTGSEAWTKSLGYKVIDEWRAWISNDQVAGYTQGYANNLTFLTIKGAGHTVPEYKPREALDFYSRFLEGSKI

SEQ ID NO: 1658 - protein, 488 aa, Arabidopsis thaliana
MKVFVFVTLLSLVFVITESAPESALITKLPGFEGTFPSKHYSGYVTIDKEHGKNLWYYFIESEKNPSKDPVVLWLNGGPGCSSMDGFVYEHGPFNFELPKKNNSLPLLHLNPYSWSKVSNIIYLDSPVGVGFSYSNNKSDYITGDIKTAVDSHAFLLKWFQMFPEFQSNPFFISGESYAGVYVPTLASEVVIGNKNGVKPALNFKGYLVGNVVADPKFDGNAFVPFAHGMGLISDELFENVTKACKGNFYEIEGLECEEQYTKVNDDTNQLNIYNILEPCYHGTSLSAFDIRSLPSSLLQLGKTEKRLPIRKRMFGRAWPVRAPVHPGIVPSWSQLLADVTVPCIDDRVATAWLNDPEIRKAIHTKEESEIGRWELCSGKLSFYHDAGSMIDFHRNLTLSGYRALIYSGDHDMCVPFTGSEAWTKSLGYKVIDEWRAWISNDQVAGYTQGYANNLTFLTIKGAGHTVPEYKPREALDFYSRFLEGSKI

SEQ ID NO: 1659 - DNA, 2168 bp, Arabidopsis thaliana
actacacccaaaaaagcttctaacaaagagaaagtgtctgtatgttgtgcccactctctacatttatcaatcacttcatgtgtgttaccttgattgcaaaaaagtgagaatatattctcacaacattaaatccaccccgaaatcgaagtgagtatatcacgagtgtagtaatatcttagagatggttttggaggatagaaaggacggttcttctttgccgggacgatccggtagtttctctaaatcgtcaccgtcggagttggatgttgttgatccctacaagcggataagttcgccgggatctatattggatgctgagaaggtagagaaaaagcctggaggatggagagccgtctcgttcattttaggaaatgagacgctggagagactgggatcgataggattgttggcaaacttcatggtttatctaaccaaagtgtttcacttagaacaagtcgacgctgcaaatgtcatcaacatttggtcaggtttcaccaatctcactcctctcgtcggagcgtatatctcagacacttatgttggccgcttcaagaccatcgctttcgcctcattcgccactctcctcggactaataacaattacactcacagcatcgtttcctcaactccacccagcatcatgcaacagccaggacccactcagttgcggcggtccgaataagctccagatcggagttttgctattgggactctgtttcctctccgtagggagtggaggaatacgaccttgtagcatcccttttggggttgatcagtttgaccaacgaactgaggaaggggttaaaggagtggccagtttcttcaactggtattacatgactttcactgtggttctgatcattacacagaccgtagttgtgtatatccaggatcaagtcagttggattatcggttttagtatccctaccggactcatggctcttgcggttgttatgttttttgccggaatgaagcgttatgtctacgttaaaccagaaggaagtatattctctgggatcgctcaagttatcgtggcagctcgtaagaagcgaaagctgaaacttccggcggaagatgacggcactgtcacctattacgacccagccatcaagtctagcgtgttatccaagttacaccgcagtaaccaattcaggtgtcttgacaaagccgcggtggttatagaaggtgacctaacacccgagggacctcccgcagacaagtggcggttatgcagcgtccaagaagtggaagaagtgaagtgtttgatccgaattgttcctatctggtcggccggaataatctcactcgcggccatgacaacacaaggcactttcacggtctctcaagctttgaaaatggatcgaaacttaggtcctaaattcgagattccggctggttcactctccgtcatctctctcctcacaatcggcatctttcttcccttctacgaccgcgtttttgtaccattcatgcggcgaatcaccggccataaatccggaatcacactcctccaaaggataggaacagggatcgttttcgcgatcttttctatgatcgttgcgggcattgtggagcgtatgagacgcatacgctccatcaatgccggagatccaacgggaatgactccaatgtcggtgttttggctttcgccgcagctaattctcatgggactatgtgaagcattcaatatcatcggacaaattgagttcttcaacagtcagtttccagagcacatgagaagtatcgctaactctctcttctctttatcgttcgccggttcgagctaccttagtagtttccttgtgactgtcgttcataaattctccggtgggcatgatcgtccggattggctaaacaagaatctcaacgcgggaaaattggattacttctattatctgattgcggttttgggtgtggttaatctggtttacttttggtattgtgctcggggataccggtacaaggtcggtttaccgattgaagactttgaggaggacaagtcctccgatgatgttgagatgacttcgaagaaatcgatgaaatgatttaatagactatccttagggacaacaagaagattgtcgatgttgtttgaataattactatgacaatgtatgtatcataatatgtaagaactagaatatttaataaaattttacctttcattag

SEQ ID NO: 1660 - protein, 620 aa, Arabidopsis thaliana
MVLEDRKDGSSLPGRSGSFSKSSPSELDVVDPYKRISSPGSILDAEKVEKKPGGWRAVSFILGNETLERLGSIGLLANFMVYLTKVFHLEQVDAANVINIWSGFTNLTPLVGAYISDTYVGRFKTIAFASFATLLGLITITLTASFPQLHPASCNSQDPLSCGGPNKLQIGVLLLGLCFLSVGSGGIRPCSIPFGVDQFDQRTEEGVKGVASFFNWYYMTFTVVLIITQTVVVYIQDQVSWIIGFSIPTGLMALAVVMFFAGMKRYVYVKPEGSIFSGIAQVIVAARKKRKLKLPAEDDGTVTYYDPAIKSSVLSKLHRSNQFRCLDKAAVVIEGDLTPEGPPADKWRLCSVQEVEEVKCLIRIVPIWSAGIISLAAMTTQGTFTVSQALKMDRNLGPKFEIPAGSLSVISLLTIGIFLPFYDRVFVPFMRRITGHKSGITLLQRIGTGIVFAIFSMIVAGIVERMRRIRSINAGDPTGMTPMSVFWLSPQLILMGLCEAFNIIGQIEFFNSQFPEHMRSIANSLFSLSFAGSSYLSSFLVTVVHKFSGGHDRPDWLNKNLNAGKLDYFYYLIAVLGVVNLVYFWYCARGYRYKVGLPIEDFEEDKSSDDVEMTSKKSMK

SEQ ID NO: 1661 - protein, 541 aa, Arabidopsis thaliana
MVYLTKVFHLEQVDAANVINIWSGFTNLTPLVGAYISDTYVGRFKTIAFASFATLLGLITITLTASFPQLHPASCNSQDPLSCGGPNKLQIGVLLLGLCFLSVGSGGIRPCSIPFGVDQFDQRTEEGVKGVASFFNWYYMTFTVVLIITQTVVVYIQDQVSWIIGFSIPTGLMALAVVMFFAGMKRYVYVKPEGSIFSGIAQVIVAARKKRKLKLPAEDDGTVTYYDPAIKSSVLSKLHRSNQFRCLDKAAVVIEGDLTPEGPPADKWRLCSVQEVEEVKCLIRIVPIWSAGIISLAAMTTQGTFTVSQALKMDRNLGPKFEIPAGSLSVISLLTIGIFLPFYDRVFVPFMRRITGHKSGITLLQRIGTGIVFAIFSMIVAGIVERMRRIRSINAGDPTGMTPMSVFWLSPQLILMGLCEAFNIIGQIEFFNSQFPEHMRSIANSLFSLSFAGSSYLSSFLVTVVHKFSGGHDRPDWLNKNLNAGKLDYFYYLIAVLGVVNLVYFWYCARGYRYKVGLPIEDFEEDKSSDDVEMTSKKSMK

SEQ ID NO: 1662 - protein, 402 aa, Arabidopsis thaliana
MTFTVVLIITQTVVVYIQDQVSWIIGFSIPTGLMALAVVMFFAGMKRYVYVKPEGSIFSGIAQVIVAARKKRKLKLPAEDDGTVTYYDPAIKSSVLSKLHRSNQFRCLDKAAVVIEGDLTPEGPPADKWRLCSVQEVEEVKCLIRIVPIWSAGIISLAAMTTQGTFTVSQALKMDRNLGPKFEIPAGSLSVISLLTIGIFLPFYDRVFVPFMRRITGHKSGITLLQRIGTGIVFAIFSMIVAGIVERMRRIRSINAGDPTGMTPMSVFWLSPQLILMGLCEAFNIIGQIEFFNSQFPEHMRSIANSLFSLSFAGSSYLSSFLVTVVHKFSGGHDRPDWLNKNLNAGKLDYFYYLIAVLGVVNLVYFWYCARGYRYKVGLPIEDFEEDKSSDDVEMTSKKSMK

SEQ ID NO: 1663 - DNA, 1244 bp, Arabidopsis thaliana
aaaaaaaaaaaacgagcagctgtttatcttccaacaaagcttcttcgtgcatcttcgctcttctcaactcgtcatcctctccctctgattctcttaagtcgccttgaaaaattaagacaaaacaacaacaaaagaacaagagaagctctaaaatccagcagctatggcgtttcttctccccaatctctctccttctttccttcttccgaccggaaaatcactcaaagagaaacccatttccaaccaagctttatcatcatcatcatcatcgtccaatagctacgagtttgaagaagatagtctctctccactttctctctttagcgtccaggctcctcctcctgttcgaggtgcgcaggttaagaccaaaccaagtgcgcaggataagtaccagcacggcagcaaagatgacttctacatcaatctcggtttagctgtacgtacccttcgcgaagatttgcctctcctcttcaccaaagatctcaattacgacatttacagggatgatataacattagtggatccaatgaacacgttctctgggattgacaactacaaattgatcttctgggcacttagatttcatggcaagattctcttcagggatatctcacttgagatcttcagggtttggcaaccatcagagaacatgattctcatcaggtggaatcttaaaggtgtacctagagtcccatgggaggcaaagggagagtttcagggtacttctcgctataaactcgaccgaaatggcaaaatctatgagcataaggtcgataacttggccttcaacttccctcaccagctcaaacctgccacttctgttttggatatggtcaccgcttgccctgcaagtcccaatccaactttcatgtttggcgccatggattcatactcatcttcttggattgagttctacaaagcagtgcaaaggacactagacaagcaagaagagcaaatgcttgtgcaagaccatttcgtcccatgctcataatgccattaggtcacactcaggtgtatatatatatactgttacattgaagatacaatacatatatctatgtgtgcaggcatatgcatatgagtagatgtggttgacttagatatcaaagagggtagggaaccaagaatactcatgagcttgtacaacttgcctattgaatgtaaacagaattccttacagttgttttgttatgtaaaacacattgatgatttgtctttacgatcaagcgaaattatatcccttg

SEQ ID NO: 1664 - protein, 275 aa, Arabidopsis thaliana
MAFLLPNLSPSFLLPTGKSLKEKPISNQALSSSSSSSNSYEFEEDSLSPLSLFSVQAPPPVRGAQVKTKPSAQDKYQHGSKDDFYINLGLAVRTLREDLPLLFTKDLNYDIYRDDITLVDPMNTFSGIDNYKLIFWALRFHGKILFRDISLEIFRVWQPSENMILIRWNLKGVPRVPWEAKGEFQGTSRYKLDRNGKIYEHKVDNLAFNFPHQLKPATSVLDMVTACPASPNPTFMFGAMDSYSSSWIEFYKAVQRTLDKQEEQMLVQDHFVPCS

SEQ ID NO: 1665 - protein, 154 aa, Arabidopsis thaliana
MNTFSGIDNYKLIFWALRFHGKILFRDISLEIFRVWQPSENMILIRWNLKGVPRVPWEAKGEFQGTSRYKLDRNGKIYEHKVDNLAFNFPHQLKPATSVLDMVTACPASPNPTFMFGAMDSYSSSWIEFYKAVQRTLDKQEEQMLVQDHFVPCS

SEQ ID NO: 1666 - DNA, 1570 bp, Arabidopsis thaliana
atggcggcttctgctacattaatgtctatggcacatgaaagaaaagttgagaatctgagaggttttatggtgaatttggcgaattcaagagacttttcccttcctgagactaaactcttccaacagaaattcttggatctgtgtttatcccgtactcctgatcatcccacttattccgctatgatatttattgctatcatggatttgaataaagaaggtggcgcaagtgaagatgctatatctgagtttataaagtcgaaatacaagaacttgccatttgctcacacgaatttgcttagtcatcatttagctaagcttgtggagaaaagagagatactttgtgactgcaacaacgactgttactctctcccgggtgagaagaagactgttgcttccactgatgttcagagaaagagcgatctgataacagtgagaacaaatgatcagcgtgcggcggatgaggttatgacttgccaaaacaaggaagaaagtgttgaaattttgaagtctggggatcctaaggttgttttgttggaagaacagagtttgactaaatcccgaaccggctccaaacgtaaagcatgttgtgtcattaacgtcattgaagtaatggacacagaagataatggattcaaagcaggtttaagggattcgactgttcaaattcctaggaaagagggagttgttgaagtagtagatgtagaaaatagtgagaatgaagctaggattgaagcaaacagtagaggaggtgaattatatgaagtggctgttctatataagcagaatgatgtgttgatggaagagtcgggtaaagaagcaatggaaacaagctcaatagtgagaaaagcaaaactgcgcagaacatctaacacaacgaaagaaaatgtggaagtcacgagtgaagcatataaaaaactttgggagtgccaaaccgaagcatgcagcaatatcattgctctagagaaaatgctaaaacagtgcaaagagaaagaccagcagaacaaagctgtttcagaaattgatgatgtttctcgtttgcctttatcaatggaaagctgcagagaactgtggaaggctgcccaaaagttacaaagccagctctctgagatcatcgattcatgtgatgaaaccgtggttccatattctgtatctccaggatgtgaactcgaaggtataagcaaaggattatgcaaagaggatcccaaaatgaagactcctcgtgggaataatggatctgaaaaaccctccacacagcttgaacagaaggaaagagagaagtcttccaaaaagaaacctcaggtcaagaaaacgagaatcaaaagtctcagagacataggaataacagctgtgaggaaatcgcctcgattcagctgatgatactcatcaaaaaatgcttccggagagcatgatatctcataaaggttaggttgttatttaatatcagtatctacataagtgcaacatcttgaagaatttgaatataaatttttagttttcatataaacttctcatgaaagaacaagaatgtgcctgctaatgagacattgatgctaaaagctattaacattct

SEQ ID NO: 1667 - protein, 457 aa, Arabidopsis thaliana
MAASATLMSMAHERKVENLRGFMVNLANSRDFSLPETKLFQQKFLDLCLSRTPDHPTYSAMIFIAIMDLNKEGGASEDAISEFIKSKYKNLPFAHTNLLSHHLAKLVEKREILCDCNNDCYSLPGEKKTVASTDVQRKSDLITVRTNDQRAADEVMTCQNKEESVEILKSGDPKVVLLEEQSLTKSRTGSKRKACCVINVIEVMDTEDNGFKAGLRDSTVQIPRKEGVVEVVDVENSENEARIEANSRGGELYEVAVLYKQNDVLMEESGKEAMETSSIVRKAKLRRTSNTTKENVEVTSEAYKKLWECQTEACSNIIALEKMLKQCKEKDQQNKAVSEIDDVSRLPLSMESCRELWKAAQKLQSQLSEIIDSCDETVVPYSVSPGCELEGISKGLCKEDPKMKTPRGNNGSEKPSTQLEQKEREKSSKKKPQVKKTRIKSLRDIGITAVRKSPRFS

SEQ ID NO: 1668 - protein, 450 aa, Arabidopsis thaliana
MSMAHERKVENLRGFMVNLANSRDFSLPETKLFQQKFLDLCLSRTPDHPTYSAMIFIAIMDLNKEGGASEDAISEFIKSKYKNLPFAHTNLLSHHLAKLVEKREILCDCNNDCYSLPGEKKTVASTDVQRKSDLITVRTNDQRAADEVMTCQNKEESVEILKSGDPKVVLLEEQSLTKSRTGSKRKACCVINVIEVMDTEDNGFKAGLRDSTVQIPRKEGVVEVVDVENSENEARIEANSRGGELYEVAVLYKQNDVLMEESGKEAMETSSIVRKAKLRRTSNTTKENVEVTSEAYKKLWECQTEACSNIIALEKMLKQCKEKDQQNKAVSEIDDVSRLPLSMESCRELWKAAQKLQSQLSEIIDSCDETVVPYSVSPGCELEGISKGLCKEDPKMKTPRGNNGSEKPSTQLEQKEREKSSKKKPQVKKTRIKSLRDIGITAVRKSPRFS

SEQ ID NO: 1669 - protein, 448 aa, Arabidopsis thaliana
MAHERKVENLRGFMVNLANSRDFSLPETKLFQQKFLDLCLSRTPDHPTYSAMIFIAIMDLNKEGGASEDAISEFIKSKYKNLPFAHTNLLSHHLAKLVEKREILCDCNNDCYSLPGEKKTVASTDVQRKSDLITVRTNDQRAADEVMTCQNKEESVEILKSGDPKVVLLEEQSLTKSRTGSKRKACCVINVIEVMDTEDNGFKAGLRDSTVQIPRKEGVVEVVDVENSENEARIEANSRGGELYEVAVLYKQNDVLMEESGKEAMETSSIVRKAKLRRTSNTTKENVEVTSEAYKKLWECQTEACSNIIALEKMLKQCKEKDQQNKAVSEIDDVSRLPLSMESCRELWKAAQKLQSQLSEIIDSCDETVVPYSVSPGCELEGISKGLCKEDPKMKTPRGNNGSEKPSTQLEQKEREKSSKKKPQVKKTRIKSLRDIGITAVRKSPRFS

SEQ ID NO: 1670 - DNA, 1188 bp, Arabidopsis thaliana
aaatgatcattttaatttttcatgttactctctccttcttcttcacttgttctctttctcatcgcctcttgattcacgcgaacgagaaagcgacgatcgtaaccaccggcgctgaccaaaaagtaatcgattctcttcccgagctgatctctcagcttcaggtgtcttgaatctgaatctgtggctatatttggtgctcggtggtgagcaggaagggagggggatattgtcagggttttaatgtacgtcagatgaatagagcaactaatgttactggcagtagaaggagggggtttattctcagcgtccgcgtctgggtatagtaagggattgacccttcttttctctggtgataaagacgtagataggcccatgagagttgtcccgtggaatcactaccaggtggttgaccaagagcctgaggctgaccctgttcttcagctggattctattaagaaccgagtttcccgcggttgcgctgcttccttcagttgttttggtggcgcttccgcgggacttgagaccccttctcctcttaaagttgaacctgtgcagcagcagcatcgtgaaatatcatcaccagagtctgttgttgttgtttctgaaaagggtaaagaccaaataagtgaagctgataatggcagcagcaaagaagctttcaaactctcgttgaggagtagcttgaagaggccctctgttgcggaatcacgctctctagaagatataaaagaatacgagacgttgagtgtggatggtagcgatctcactggtgacatggcaaggcggaaagttcagtggcctgatgcttgtggtagtgaactcactcaagttagagaatttgagccgagtgagatgggattatcagatgaagaatgggaggtaggacgacaaagaacatgttcgtgtgtgatcatgtaaattcagaaatcatcggtatcactctttactcatgtcttgtgtgcattgctcatatatttaaagtgtatctgttattacaaaagttctcttcaaggttttggcttgtacattattccctttgttttgagtggcaacttgttccgggtttctgttttctaaaaacgataagacaacatccaaatcgatgcaaagtggaagagagtggcaataactcttgttcttgtaacgctctcaaccacattacgtacgtgtacaacaaaactagaatgc

SEQ ID NO: 1671 - protein, 216 aa, Arabidopsis thaliana
MLLAVEGGGLFSASASGYSKGLTLLFSGDKDVDRPMRVVPWNHYQVVDQEPEADPVLQLDSIKNRVSRGCAASFSCFGGASAGLETPSPLKVEPVQQQHREISSPESVVVVSEKGKDQISEADNGSSKEAFKLSLRSSLKRPSVAESRSLEDIKEYETLSVDGSDLTGDMARRKVQWPDACGSELTQVREFEPSEMGLSDEEWEVGRQRTCSCVIM

SEQ ID NO: 1672 - protein, 181 aa, Arabidopsis thaliana
MRVVPWNHYQVVDQEPEADPVLQLDSIKNRVSRGCAASFSCFGGASAGLETPSPLKVEPVQQQHREISSPESVVVVSEKGKDQISEADNGSSKEAFKLSLRSSLKRPSVAESRSLEDIKEYETLSVDGSDLTGDMARRKVQWPDACGSELTQVREFEPSEMGLSDEEWEVGRQRTCSCVIM

SEQ ID NO: 1673 - DNA, 1134 bp, Arabidopsis thaliana
ctatctttcgagcattgaaatgataaaaaaaaaattagtggtgttttcaacatagatcatgacaggcaaaccctagattttacttcacctacttgaggttaaaaaacttaattgcaagtaggccagacatcggatcttctctcttaagggctaagcaaaacccatctctcctctttcttatatcttctttctcttccttctctcttctcttgtataaactccactgagctctgtttttgtttttaccgtagatcgtttcgagtctctttaatctttggcgggttccgtaaaaaaaaaaatggcctcttctagattccaatctgggttttgtcctatctcttcgtgtccctctcttgagaatttcatcgaaaggattaaagacgcatgtcgtttcaccctctccgctgttctagggacaattctctcggcggtcttgactttcttcttcgctttagtgggcacattgcttggagcacttactggagctttgataggccaagaaaccgaaagtgggtttatccgaggagcggcggttggagccatttcgggagctgttttctctatcgaagtctttgagtcatctcttgttctttggaaatctaatgagtcacgttttggatgtctcctctacttgattgatgtcattgttagtctgataagtggtagacttgtgcgggaacgaataggtccagcaatgctaagtgcggttcaaagtcagatgggagctgtggattcaactttcgaagagctctcgagtattttcgataccggtggctcaaaggggttaacaggagatttggttgataaaatacctaaaatcaaaatcactggcaaaaacaacttagatgcttctggcaacaaagactcatgttctgtttgtcttcaggattttcaacttggtgaaacggtgagaagcttgccacattgtcatcacatgtttcacttgccttgcatagacaattggctcttcaggcacggatcttgtccaatgtgtagacgcgatctgtaatctcttttcttaccatttgcacagcctcttccctctctctccttcttcttgtatggtcgtaaattcgtaatcatgtggttagagtctctatatatgtacaaagaaatgaaaaaaaaaaagttttg

SEQ ID NO: 1674 - protein, 236 aa, Arabidopsis thaliana
MASSRFQSGFCPISSCPSLENFIERIKDACRFTLSAVLGTILSAVLTFFFALVGTLLGALTGALIGQETESGFIRGAAVGAISGAVFSIEVFESSLVLWKSNESRFGCLLYLIDVIVSLISGRLVRERIGPAMLSAVQSQMGAVDSTFEELSSIFDTGGSKGLTGDLVDKIPKIKITGKNNLDASGNKDSCSVCLQDFQLGETVRSLPHCHHMFHLPCIDNWLFRHGSCPMCRRDL

SEQ ID NO: 1675 - DNA, 1089 bp, Arabidopsis thaliana
aaaaacttgtctatgtatattaattaggaagcttgcagaaccacaaaaaaagacttttttgtcaattgattcgattcaagagttctttcaacgtttggagtagagagagtttaacctatttgaaagtctctgagaccggtgtggcatgacggtcgcggcgggtatcggctacgcgctggtggctttaggaccgtctctttcacttttcgtctccgtcatctccagaaagccctttctcatcctcactgttctctccagtacgttgctttggcttgtgagtctgatcatcttgtcgggattatggagaccatttcttcctctcaaagccaatgtgtggtggccttatgctgtacttgttatcacctctgtctgtttccaggaaggccttcgctttctcttctggaaggtctacaagaggcttgaggatgtcttggattcctttgcggatcgtatctcaaggccccgcctgtttctcactgataagctgcagattgctctagctggtggtttaggtcatggtgtggcgcatgctgtattcttttgtttgagcctcttaactccagcgtttggtccagccacattctatgtcgaaagatgttcgaaggtgccattttttctcatctctgcaatcattgctcttgcatttgttacgatccacacattctcgatggtcatcgctttcgaagggtatgcaaaagggaacaaagtagatcaaataatagttccagtcatacaccttactgctggaatgttgacattggtgaattttgcatcggaaggttgtgtgatcggcgttcctcttctttaccttgtggcatctttgactcttgtgcattgtggaaaaatggtttggcaaaggttgttggaaagccggaaccaaagcagcgcctcacggtaatctggcctcggtctcagaacaacaatagaacagtcgttaatatcattttatctcatgtcttggtttcttgcttgcaaatctcgtacgtctttatctcctaattgcttcgaaacttaaacccttatgttttcaaacgcacttatgatcctaaattatcaaaaaaaaaaacgaggaaattttatcattgaatc

SEQ ID NO: 1676 - protein, 250 aa, Arabidopsis thaliana
MTVAAGIGYALVALGPSLSLFVSVISRKPFLILTVLSSTLLWLVSLIILSGLWRPFLPLKANVWWPYAVLVITSVCFQEGLRFLFWKVYKRLEDVLDSFADRISRPRLFLTDKLQIALAGGLGHGVAHAVFFCLSLLTPAFGPATFYVERCSKVPFFLISAIIALAFVTIHTFSMVIAFEGYAKGNKVDQIIVPVIHLTAGMLTLVNFASEGCVIGVPLLYLVASLTLVHCGKMVWQRLLESRNQSSASR

SEQ ID NO: 1677 - protein, 134 aa, Arabidopsis thaliana
MFEGAIFSHLCNHCSCICYDPHILDGHRFRRVCKREQSRSNNSSSHTPYCWNVDIGEFCIGRLCDRRSSSLPCGIFDSCALWKNGLAKVVGKPEPKQRLTVIWPRSQNNNRTVVNIILSHVLVSCLQISYVFIS

SEQ ID NO: 1678 - DNA, 1084 bp, Arabidopsis thaliana
acatagacaagaagatcacattataaagatctcatctttctcttctccttcttccctcctgtatctgtattctcttatcagacaaaaagttccaagatttttctaatagcgatggattgtgttgaatcttatttatccggagataattctgatgaatctccggtgatgcatacttggttttctccgtctccgtctccgtctgactcttcctcttctccttcatcttctgcttcttcttccattgggaggaatagcgacgacggtgagaaatcgtcggaggacggtggagatgacgccggagagaatgaagttgagtctccgtataaaggtcctcttgaaatgatggaatctctcgaacaagtcttacctgttaggaaagggatatcgaagtattacagtggaaagtcaaagtcttttactaatttaacggcggaggcagcttcggcgttgacttcttcttcgtcgatgaaagatttagcgaagccggagaatccttacagtaggaggaggaggaatctcctctgccatcagatttgggaaaataacaagacgactccacgtggtgggatctcgaagaaacacgttatgagttctagcagaagcgctttgacgctagctatggctgttgcggctggtgtgatgaccggagaaggatcttcttccggaggtgactcgtcgccgggatcaagtccgacgacttctggatctcctccgaggcagctacatcatcatcaacatcagatgaagaagcttcctccgttgtatcctaggagtcaagggtcttttggtaatttgacttcgtctcagtcgtcgttgggtttttgtgcctggagatcgttttcggtggctgattttccgaggtgttttccggcgacggcgagtgggattgggtttaatgactcgtaggaaatgatgataacaattgttttgttaaatttttatattttgaagttagtaacaaccacatccggagaatgtatgtgtatagaagagtttcaaaacttttgaatggatcatccacatcttttttttccattttggttttttgttctatcaattacatcttttcaaaaatctttgtcat

SEQ ID NO: 1679 - protein, 264 aa, Arabidopsis thaliana
MDCVESYLSGDNSDESPVMHTWFSPSPSPSDSSSSPSSSASSSIGRNSDDGEKSSEDGGDDAGENEVESPYKGPLEMMESLEQVLPVRKGISKYYSGKSKSFTNLTAEAASALTSSSSMKDLAKPENPYSRRRRNLLCHQIWENNKTTPRGGISKKHVMSSSRSALTLAMAVAAGVMTGEGSSSGGDSSPGSSPTTSGSPPRQLHHHQHQMKKLPPLYPRSQGSFGNLTSSQSSLGFCAWRSFSVADFPRCFPATASGIGFNDS

SEQ ID NO: 1680 - protein, 246 aa, Arabidopsis thaliana
MHTWFSPSPSPSDSSSSPSSSASSSIGRNSDDGEKSSEDGGDDAGENEVESPYKGPLEMMESLEQVLPVRKGISKYYSGKSKSFTNLTAEAASALTSSSSMKDLAKPENPYSRRRRNLLCHQIWENNKTTPRGGISKKHVMSSSRSALTLAMAVAAGVMTGEGSSSGGDSSPGSSPTTSGSPPRQLHHHQHQMKKLPPLYPRSQGSFGNLTSSQSSLGFCAWRSFSVADFPRCFPATASGIGFNDS

SEQ ID NO: 1681 - protein, 188 aa, Arabidopsis thaliana
MMESLEQVLPVRKGISKYYSGKSKSFTNLTAEAASALTSSSSMKDLAKPENPYSRRRRNLLCHQIWENNKTTPRGGISKKHVMSSSRSALTLAMAVAAGVMTGEGSSSGGDSSPGSSPTTSGSPPRQLHHHQHQMKKLPPLYPRSQGSFGNLTSSQSSLGFCAWRSFSVADFPRCFPATASGIGFNDS

SEQ ID NO: 1682 - DNA, 1440 bp, Arabidopsis thaliana
aaaacgagttgctacaatggcctcacactaggatcttcactttctcgcactttccctctcattttcccgatcatagaaacagcattgtacagagatttcaaagaatgtcactttgctcttccttcaacgtattcgcttcctactcaccaaaacccaaaaccatcttcaaagattccaaattcatttcacaatttcaggtaaagtcgtctcctttagcttcaacattccacacaaatgaatcctcaacgagtcttaagtataagagagcgagactcaaaccaatttcatctctagactcgggaatttcagaaatcgctacatcaccttcattcaggaacaaaagccctaaagatataaacgttttagtggttggttcaactgggtacataggtagatttgtagtgaaagagatgatcaaaagagggttcaatgtgattgctgttgcgagagagaagagtgggattagaggcaaaaacgacaaggaagagactttgaagcaattacaaggcgccaatgtgtgtttctctgatgttactgagttagatgttcttgagaaatctattgagaatctaggatttggtgttgatgttgttgtttcctgtctcgctagtcgtaatggagggattaaagattcgtggaagattgattatgaagctaccaaaaacagtcttgtagctgggaagaagtttggtgctaagcattttgttttgctctctgcgatttgtgtgcagaagcctttactggagtttcagagagcgaaactgaagttcgaagcagagttgatggatttggctgagcaacaagactctagctttacatacagcattgtgagaccaacggcttttttcaagagcttaggtggtcaagttgagattgtgaaagatgggaaaccttacgtgatgtttggagatggtaagctatgcgcttgtaaaccgatcagcgaacaagatttagcagcgtttatagcggattgcgtgttggaagagaacaagatcaatcaagttttgccaattggtggaccaggcaaggcattaacgccattagagcaaggagagattctgtttaagattcttgggagagagcctaagttcttgaaagtacctatcgagattatggattttgtgattggtgttctcgattctattgcaaagatctttccttcggttggagaggctgccgaatttgggaagattggaaggtattacgccgcagagagtatgttgattcttgatccagagactggagggtatagcgaggagaagacaccgagttacgggaaagacacgcttgaggatttctttgcgaaagtgatcagagaaggcatggcgggtcaagaactcggtgaacagttcttctagtatgaattgtttttgtgcgaaatgagtttgctgtgtagtttgtaactgatgagattataaatataaaacctgtgaatttgag

SEQ ID NO: 1683 - protein, 451 aa, Arabidopsis thaliana
NELLQWPHTRIFTFSHFPSHFPDHRNSIVQRFQRMSLCSSFNVFASYSPKPKTIFKDSKFISQFQVKSSPLASTFHTNESSTSLKYKRARLKPISSLDSGISEIATSPSFRNKSPKDINVLVVGSTGYIGRFVVKEMIKRGFNVIAVAREKSGIRGKNDKEETLKQLQGANVCFSDVTELDVLEKSIENLGFGVDVVVSCLASRNGGIKDSWKIDYEATKNSLVAGKKFGAKHFVLLSAICVQKPLLEFQRAKLKFEAELMDLAEQQDSSFTYSIVRPTAFFKSLGGQVEIVKDGKPYVMFGDGKLCACKPISEQDLAAFIADCVLEENKINQVLPIGGPGKALTPLEQGEILFKILGREPKFLKVPIEIMDFVIGVLDSIAKIFPSVGEAAEFGKIGRYYAAESMLILDPETGGYSEEKTPSYGKDTLEDFFAKVIREGMAGQELGEQFF

SEQ ID NO: 1684 - protein, 417 aa, Arabidopsis thaliana
MSLCSSFNVFASYSPKPKTIFKDSKFISQFQVKSSPLASTFHTNESSTSLKYKRARLKPISSLDSGISEIATSPSFRNKSPKDINVLVVGSTGYIGRFVVKEMIKRGFNVIAVAREKSGIRGKNDKEETLKQLQGANVCFSDVTELDVLEKSIENLGFGVDVVVSCLASRNGGIKDSWKIDYEATKNSLVAGKKFGAKHFVLLSAICVQKPLLEFQRAKLKFEAELMDLAEQQDSSFTYSIVRPTAFFKSLGGQVEIVKDGKPYVMFGDGKLCACKPISEQDLAAFIADCVLEENKINQVLPIGGPGKALTPLEQGEILFKILGREPKFLKVPIEIMDFVIGVLDSIAKIFPSVGEAAEFGKIGRYYAAESMLILDPETGGYSEEKTPSYGKDTLEDFFAKVIREGMAGQELGEQFF

SEQ ID NO: 1685 - protein, 315 aa, Arabidopsis thaliana
MIKRGFNVIAVAREKSGIRGKNDKEETLKQLQGANVCFSDVTELDVLEKSIENLGFGVDVVVSCLASRNGGIKDSWKIDYEATKNSLVAGKKFGAKHFVLLSAICVQKPLLEFQRAKLKFEAELMDLAEQQDSSFTYSIVRPTAFFKSLGGQVEIVKDGKPYVMFGDGKLCACKPISEQDLAAFIADCVLEENKINQVLPIGGPGKALTPLEQGEILFKILGREPKFLKVPIEIMDFVIGVLDSIAKIFPSVGEAAEFGKIGRYYAAESMLILDPETGGYSEEKTPSYGKDTLEDFFAKVIREGMAGQELGEQFF

SEQ ID NO: 1686 - DNA, 1325 bp, Arabidopsis thaliana
atgtttaacgttacactcattaagatcgtaccttagggaaaaaaaactcaagagacaaaaaaaaaaggaaggcgcgtcagtgatggagaagattattgacgtagcttatggcgcatcagtgaaggtgggtttgacgttgttggagatgaatctgttgccggatattgtcattaggcggctcacacgtctgcttctggccggtcgtctccgttccggttacaaacccacggcggagatgcaactctccgatctcctccgttttgttgactctataaagaagatgcctatagctatccataccgagaagccaaagactcaacactatgaattaccgacagctttcttcgaacttgtccttggaagaaacatgaagtacagctcttgttacttctcaaacgattcaagtagcttagaagatgcagaggaagcaattttggctctttattgtgaaagagctaaagtggaagatggtcaaagtgttcttgatatcggatgtggctggggatccttgtctttgtacattgcacgcaagtacagcaaatgcaagttaaccggtatctgcaactccaaaacgcagaaagcatttatcgatgagaaatgccggaaactcgggcttcagaatatcgaaatcattgtcgcggatattagcacttttgagcatgaagggacatacgatcggatattctccatcgagatgtttgagcatatgaaaaactatggagagctactaaagaagataggaaagtggatgaaggaagatagtcttctgtttgttcactatttctgccataagacatttgcttaccactttgaggatgtgaatgacgatgactggatcacaagacacttcttcagcggaggaacaatgccatcagcagatcttctgctatattttcaagaaaatgtttcgattgtggatcattggctcgtaagcgggacgcattatgcaaaaacaagtgaagagtggctaaaaagaatggataaggagatagttgcagtaaaaaaaatcatggaagtgacttatgggaaagaagaagcagtgaagtggatggtttactggagaaccttcttcatcgcggttgctgagcttttcggatacaacaatggagaagagtggatggttgcacacttcctcttcaagaagaaatgatgatgatttctttatttttcttccaatttttcaataaagaatacaacaatcccattctactttgtattctatgatgttatggtttcataccaaaggagtttgttcaatctttttaaagtgacaatgttatctcgaaaaacatggggatcaagtatcatgaactggattcttttgt

SEQ ID NO: 1687 - protein, 382 aa, Arabidopsis thaliana
CLTLHSLRSYLREKKLKRQKKKEGASVMEKIIDVAYGASVKVGLTLLEMNLLPDIVIRRLTRLLLAGRLRSGYKPTAEMQLSDLLRFVDSIKKMPIAIHTEKPKTQHYELPTAFFELVLGRNMKYSSCYFSNDSSSLEDAEEAILALYCERAKVEDGQSVLDIGCGWGSLSLYIARKYSKCKLTGICNSKTQKAFIDEKCRKLGLQNIEIIVADISTFEHEGTYDRIFSIEMFEHMKNYGELLKKIGKWMKEDSLLFVHYFCHKTFAYHFEDVNDDDWITRHFFSGGTMPSADLLLYFQENVSIVDHWLVSGTHYAKTSEEWLKRMDKEIVAVKKIMEVTYGKEEAVKWMVYWRTFFIAVAELFGYNNGEEWMVAHFLFKKK

SEQ ID NO: 1688 - protein, 355 aa, Arabidopsis thaliana
MEKIIDVAYGASVKVGLTLLEMNLLPDIVIRRLTRLLLAGRLRSGYKPTAEMQLSDLLRFVDSIKKMPIAIHTEKPKTQHYELPTAFFELVLGRNMKYSSCYFSNDSSSLEDAEEAILALYCERAKVEDGQSVLDIGCGWGSLSLYIARKYSKCKLTGICNSKTQKAFIDEKCRKLGLQNIEIIVADISTFEHEGTYDRIFSIEMFEHMKNYGELLKKIGKWMKEDSLLFVHYFCHKTFAYHFEDVNDDDWITRHFFSGGTMPSADLLLYFQENVSIVDHWLVSGTHYAKTSEEWLKRMDKEIVAVKKIMEVTYGKEEAVKWMVYWRTFFIAVAELFGYNNGEEWMVAHFLFKKK

SEQ ID NO: 1689 - protein, 334 aa, Arabidopsis thaliana
MNLLPDIVIRRLTRLLLAGRLRSGYKPTAEMQLSDLLRFVDSIKKMPIAIHTEKPKTQHYELPTAFFELVLGRNMKYSSCYFSNDSSSLEDAEEAILALYCERAKVEDGQSVLDIGCGWGSLSLYIARKYSKCKLTGICNSKTQKAFIDEKCRKLGLQNIEIIVADISTFEHEGTYDRIFSIEMFEHMKNYGELLKKIGKWMKEDSLLFVHYFCHKTFAYHFEDVNDDDWITRHFFSGGTMPSADLLLYFQENVSIVDHWLVSGTHYAKTSEEWLKRMDKEIVAVKKIMEVTYGKEEAVKWMVYWRTFFIAVAELFGYNNGEEWMVAHFLFKKK

SEQ ID NO: 1690 - DNA, 1001 bp, Arabidopsis thaliana
agagagacaattaatcagtttcgtgtgtttggagaagaagaagaacagatcaaatacgaggagagatctctaaagagatttatcgtttcaaatttgttcacgttgagaagtttaatttagattaaacaacaaaaagatgggttactggaattccaaggttgttccaaaattcaagaagttattcgagaaaaatagtgctaagaaggctgctgctgctgaagctaccaagacctttgatgaatctaaggaaacaatcaacaaggaaattgaggagaaaaagacagaactccaaccaaaggtcgtggaaacctatgaagccacgtctgcagaagtcaaggctttggtgagagaccctaaggtggctggtttgaagaaaaactcagcggctgtgcagaagtacctcgaggagcttgtcaaaattgaattccccggatcaaaagcggtgagtgaggcttcgtctagcttcggagctggctatgtcgcaggaccggtcacgttcatattcgagaaggtatctgttttcctcccggaggaggtgaagactaaagaaataccggtggaggaagtgaaagctgaagaacctgccaaaactgaagaaccagccaaaaccgaaggaacaagtggtgagaaagaggagattgttgaagagacaaagaaagacgagacccctgaaaccgcggtcgtggaggagaagaaaccagaggtagaggagaagaaggaagaagctactccggctccagcggtggttgaaactccagttaaggaaccggagacaacgacagcgccagtggctgaaccaccaaagccttgatctgttttcaagatggtatgattacttctcttgtatgaaaacatctttgtacgtaacaaaaaatgaaaggaagaaacgcaaaggaagaaaaaaaaaacttttttttcattcttttttttttttaatttggtttgtctttgtgtggataaatctctctgtttttttttttttaattattgggaaagtcttt

SEQ ID NO: 1691 - protein, 224 aa, Arabidopsis thaliana
MGYWNSKVVPKFKKLFEKNSAKKAAAAEATKTFDESKETINKEIEEKKTELQPKVVETYEATSAEVKALVRDPKVAGLKKNSAAVQKYLEELVKIEFPGSKAVSEASSSFGAGYVAGPVTFIFEKVSVFLPEEVKTKEIPVEEVKAEEPAKTEEPAKTEGTSGEKEEIVEETKKDETPETAVVEEKKPEVEEKKEEATPAPAVVETPVKEPETTTAPVAEPPKP

SEQ ID NO: 1692 - DNA, 1021 bp, Arabidopsis thaliana
ttgacccaaaagaacccataatgtttagagtgaccggaactctctcggcggcatcatctccagcggtggcggcggcgtctttctccgccgctctaagactttccataactcccactctcgctatcgcctctcctccccatctccgttggttctcgaagttttctcgtcaatttctcggcggacgcatctcttcactccgaccacgcattccttctccgtgcccgattcgactctctggtttcccggctctcaaaatgagagcttcgtttagcagtgggagtagtgggagtagtgcaagtagagagattctggtgcagcatttgcttgttaagaataatgatgttgagctctttgccgaactccaaaagaaattcttggatggagaggagatgagtgatcttgcggctgagtattcgatttgtccttccaaaaaggacggtggtatacttggatgggtaaaactgggtcaaatggtaccagagtttgaggaagctgcgtttaaagcagagctgaatcaggtggtgaggtgtagaacccaatttggcttgcacttattgcaagttctatctgagagagaaccggtgaaagatatccaggtagaggagctgcattccaaaatgcaagatccagttttcatggatgaggctcagttaattgatgtcagagaacccaatgagatagagatagcatccttgccaggattcaaagtgttcccactccgccaatttggaacatgggcaccagacatcacttcaaagctgaaccctgagaaggatacatttgtcttgtgcaaggttggtggcaggtcaatgcaggttgccaactggttacagtctcagggcttcaagagtgtgtacaacattactggtgggatacaagcttattctctcaaggttgacccatcaattcctacttactgaaattgagcatcttagtctctttttcttgtatcctcctaattccaaattagatttgcaaattcgtattcaataaactatataatataaggttcatttttgag

SEQ ID NO: 1693 - protein, 305 aa, Arabidopsis thaliana
DPKEPIMFRVTGTLSAASSPAVAAASFSAALRLSITPTLAIASPPHLRWFSKFSRQFLGGRISSLRPRIPSPCPIRLSGFPALKMRASFSSGSSGSSASREILVQHLLVKNNDVELFAELQKKFLDGEEMSDLAAEYSICPSKKDGGILGWVKLGQMVPEFEEAAFKAELNQVVRCRTQFGLHLLQVLSEREPVKDIQVEELHSKMQDPVFMDEAQLIDVREPNEIEIASLPGFKVFPLRQFGTWAPDITSKLNPEKDTFVLCKVGGRSMQVANWLQSQGFKSVYNITGGIQAYSLKVDPSIPTY

SEQ ID NO: 1694 - protein, 299 aa, Arabidopsis thaliana
MFRVTGTLSAASSPAVAAASFSAALRLSITPTLAIASPPHLRWFSKFSRQFLGGRISSLRPRIPSPCPIRLSGFPALKMRASFSSGSSGSSASREILVQHLLVKNNDVELFAELQKKFLDGEEMSDLAAEYSICPSKKDGGILGWVKLGQMVPEFEEAAFKAELNQVVRCRTQFGLHLLQVLSEREPVKDIQVEELHSKMQDPVFMDEAQLIDVREPNEIEIASLPGFKVFPLRQFGTWAPDITSKLNPEKDTFVLCKVGGRSMQVANWLQSQGFKSVYNITGGIQAYSLKVDPSIPTY

SEQ ID NO: 1695 - protein, 221 aa, Arabidopsis thaliana
MRASFSSGSSGSSASREILVQHLLVKNNDVELFAELQKKFLDGEEMSDLAAEYSICPSKKDGGILGWVKLGQMVPEFEEAAFKAELNQVVRCRTQFGLHLLQVLSEREPVKDIQVEELHSKMQDPVFMDEAQLIDVREPNEIEIASLPGFKVFPLRQFGTWAPDITSKLNPEKDTFVLCKVGGRSMQVANWLQSQGFKSVYNITGGIQAYSLKVDPSIPTY

SEQ ID NO: 1696 - DNA, 1626 bp, Arabidopsis thaliana
aaaacataactgcagtctcttcttgtttcgatggaactcaataaggatcagacagtcatgtcggaggataaaaagcctcaagatccaaatcccagatttgcttgcgaaggttgcagcgttctgctcgacatcaacgatggtgaccgtctcgtcttcgctcgtttatctagtggcgctatattaaaaattgggaataagaattattctttaaagccattgatcggagctccgtttggatctctgttccaagtcgaaaccggagaagatggttctttcctctctcgcattcttcccattaaacaagaaagtaacagtaataatgttatggacgattcgagagataatcgagaaatcgtcgacaataatgaagctcagaatcttactggtgaagaaattgaagctatgcggagagagggtgcaaaaggggatgaaattattgaagctctaattgcaaacagcaaaacttttgataagaagtttcagttgtctcaggaaaaatataagcttaaaaagcagaagaaatatgcaccaaagctgcttcttcgacggccttttgctcgaagtatatgtgaagcttatttcaagaaatacccagccagaattggattcttacgagtagatgcgttatctcttctgttaacgatggctaatgtcactgcatactcggatgtgcttgtggtggatatggttggtggccttgtcactggtgcagtggctgaaagattaggaggcactggttatgtttgcaatacatataagggaagttctccttatcctgtggagatggtaaggatgttcaactttagtgacaaggttttaaagaggatcgtgcagtcatcgataaacgagctctcgtcagccaaaactgcgtctactgaaggaaacaatcaacaagaaggagtttgcaaagctgagaacaatattaatgaaacagctacatctgatgttatggttgaagaaatatctgtgacaactgaggctggagtagtagatattgttgtaccagagagcaaaattatcaaagccgcaaaagctggagccaaagcttcaaaagaaacaatagagatgtggcaagaaaacggtttttcgagtctaatcatggctgcgcaagaccaagacccatggatcgtagctaaggatgtattgccactactgtcctactctgctccttttgcaatatatcatcagtatttacagccgctggcgacatgtatgcacaagcttcaacagggtaaaatggcgatcaatctgcaaataacagaaccatggctacgcgaatatcaggtgcttccttcaagatctcaccctcacatgcagatgagttcttttggaggctatgttctgagtggcatcagaatctctaccacttgactgttgttttcataaccagaaactgtggtttgatgtttggtcttttctttcacaacgtctttctggttgttttgttgttgtaacattaagggcttagattatgagaacactgaaaataattgaaaattttgacggatatttgaagttaatactagcatttaccttctaattttcttgatggttttgtatgaccacacctgaagactgatagtctgatacgcttgaactatttttggatgattagtgcatccgatc

SEQ ID NO: 1697 - protein, 446 aa, Arabidopsis thaliana
MELNKDQTVMSEDKKPQDPNPRFACEGCSVLLDINDGDRLVFARLSSGAILKIGNKNYSLKPLIGAPFGSLFQVETGEDGSFLSRILPIKQESNSNNVMDDSRDNREIVDNNEAQNLTGEEIEAMRREGAKGDEIIEALIANSKTFDKKFQLSQEKYKLKKQKKYAPKLLLRRPFARSICEAYFKKYPARIGFLRVDALSLLLTMANVTAYSDVLVVDMVGGLVTGAVAERLGGTGYVCNTYKGSSPYPVEMVRMFNFSDKVLKRIVQSSINELSSAKTASTEGNNQQEGVCKAENNINETATSDVMVEEISVTTEAGVVDIVVPESKIIKAAKAGAKASKETIEMWQENGFSSLIMAAQDQDPWIVAKDVLPLLSYSAPFAIYHQYLQPLATCMHKLQQGKMAINLQITEPWLREYQVLPSRSHPHMQMSSFGGYVLSGIRISTT

SEQ ID NO: 1698 - protein, 437 aa, Arabidopsis thaliana
MSEDKKPQDPNPRFACEGCSVLLDINDGDRLVFARLSSGAILKIGNKNYSLKPLIGAPFGSLFQVETGEDGSFLSRILPIKQESNSNNVMDDSRDNREIVDNNEAQNLTGEEIEAMRREGAKGDEIIEALIANSKTFDKKFQLSQEKYKLKKQKKYAPKLLLRRPFARSICEAYFKKYPARIGFLRVDALSLLLTMANVTAYSDVLVVDMVGGLVTGAVAERLGGTGYVCNTYKGSSPYPVEMVRMFNFSDKVLKRIVQSSINELSSAKTASTEGNNQQEGVCKAENNINETATSDVMVEEISVTTEAGVVDIVVPESKIIKAAKAGAKASKETIEMWQENGFSSLIMAAQDQDPWIVAKDVLPLLSYSAPFAIYHQYLQPLATCMHKLQQGKMAINLQITEPWLREYQVLPSRSHPHMQMSSFGGYVLSGIRISTT

SEQ ID NO: 1699 - protein, 348 aa, Arabidopsis thaliana
MDDSRDNREIVDNNEAQNLTGEEIEAMRREGAKGDEIIEALIANSKTFDKKFQLSQEKYKLKKQKKYAPKLLLRRPFARSICEAYFKKYPARIGFLRVDALSLLLTMANVTAYSDVLVVDMVGGLVTGAVAERLGGTGYVCNTYKGSSPYPVEMVRMFNFSDKVLKRIVQSSINELSSAKTASTEGNNQQEGVCKAENNINETATSDVMVEEISVTTEAGVVDIVVPESKIIKAAKAGAKASKETIEMWQENGFSSLIMAAQDQDPWIVAKDVLPLLSYSAPFAIYHQYLQPLATCMHKLQQGKMAINLQITEPWLREYQVLPSRSHPHMQMSSFGGYVLSGIRISTT

SEQ ID NO: 1700 - DNA, 990 bp, Arabidopsis thaliana
gatcatcactcgatcaggatagcgtttaaaaaggaaccaaaaataataattagagcctgaaaatggcgaatctgttcactgctacggctcctttcctctcactctcgaagccattcaccaaaacggcatcgtaccaccagtgttacgcctcttcttccaatccgccggagcctgagtcttcttctcctcctcctcctccgcctccgcctcaaccgctggcatcgcaacagaagaggaagaagaacgttgagacgacggattgggtcgcttcttccttgacccggcggtttggaatcggcgcgggtcttgcctgggcgggctttctggctttcggtgtaatctccgagcagatcaagactaggattgaggtttctcaggaagtagctaacaccagagatgtagaagaagagaaagagattgtgttgcccaacggcataaggtactatgatcaacgggttggaggaggagcaacaccaagagcaggagacttggtagtgattgatctaaaggggcaagtgcaaggaaccggacaagtattcgtggatacatttggaaccaaagacaagaagaagatgaagccattggcacttgtggtgggttcaaaaccatatagcaaaggattatgtgaaggcatagattatgtactaaggtccatgaaggctggaggtaaacgcagagtgattgttccaccatcgttaggatttggtgtagacggtgctgaattggaatcgggtttgcagattcctcctaatgcttcgttggaatatatagttgagattgatagagtctcaattgcaccagcttgagttgttgtacgtacagctttggtttcattcccaaatccttcaaatatttggttgtataagtatgagtggaaaacaaagtgtaaatttttgtttcttttggggtcgatgtgattgaaccgagataaaccggatcaaaatcttcggtttgatttatttatttatttaaatagatataaaattacgc

SEQ ID NO: 1701 - protein, 247 aa, Arabidopsis thaliana
MANLFTATAPFLSLSKPFTKTASYHQCYASSSNPPEPESSSPPPPPPPPQPLASQQKRKKNVETTDWVASSLTRRFGIGAGLAWAGFLAFGVISEQIKTRIEVSQEVANTRDVEEEKEIVLPNGIRYYDQRVGGGATPRAGDLVVIDLKGQVQGTGQVFVDTFGTKDKKKMKPLALVVGSKPYSKGLCEGIDYVLRSMKAGGKRRVIVPPSLGFGVDGAELESGLQIPPNASLEYIVEIDRVSIAPA

SEQ ID NO: 1702 - DNA, 1592 bp, Arabidopsis thaliana
atctgaagatcgtagaagaaatcgagaaaacgctttgtaccaattagaaaccctagcgagcggaggaaggagacaaagaacgagacttttgagagattggagatttcaattttgagatcaaatcttgaaatcaacaaataggagaaagatttagtgatgggtaagaagaagaagagagctacagagaaggtgtggtgttattactgcgatagagagtttgatgatgagaagattcttgtgcagcatcagaaagctaagcactttaagtgtcatgtctgtcataagaagctttctacagctagtggcatggtgattcatgttcttcaggttcataaagagaatgttacaaaagttcctaatgctaaagacggtcgagattcaactgatattgaaatatatggaatgcaaggaattccaccccatgtcttgactgctcattatggagaagaagaggatgagcctccagccaaagttgcaaaagttgagattccttctgcccctcttggtggtgtagttcctagaccatatggaatggtatatccgcctcaacaagtacctggtgctgtacctgcacgaccaatgtattatccgggtcctcctatgcgtcatcctgctcctgtatggcaaatgccacctcctcgtccgcaacaatggtatcctcaaaatccagctctttctgtacctccagctgcccatttagggtatcgaccacaaccactttttcctgttcaaaatatggggatgactccaactccaacctcagctcctgccatacaaccatcaccagtcactggagtaactcctcctggaattcctacatcatcacctgcaatgccagttcctcaacctctgttccctgttgtgaataacagcattccttctcaagctccaccattttctgctcctctgcctgttggtggggctcagcaaccatctcatgcagatgctttaggatcagcagatgcttatccgcctaacaattctattccaggtgggactaatgctcattcttatgcctctggcccaaacactagcggtccttcaattggtccacctcctgtaattgcaaacaaagctcctagcaatcagcctaatgaggtctatcttgtatgggatgatgaagcgatgtctatggaggaaagaagaatgtccttaccaaaatacaaagtgcacgatgaaaccagccagatgaactcgataaatgcagcgatagacagacgaatctcagagagtaggcttgctgggcggatggcgttttagaatttggcaccaaaccaaaccagcgtcaaagaaaaggcgatatggatgaaggctttgttacaacaacaagtcttcactcacttttgttcagatactgaatttatgatctgattttaagttattaactttccatctgttgtattctttagccaggtgagttagtttaccattacattgtttagggatctcagagatgttttttctcagaagtttagtcctttttttttttggtcgttggagacttggaggaagaactttgtctccttttcttctgaattgatcaaagtattatattatacagattcacccaaaatgtttgcaccatgttgttc

SEQ ID NO: 1703 - protein, 367 aa, Arabidopsis thaliana
MGKKKKRATEKVWCYYCDREFDDEKILVQHQKAKHFKCHVCHKKLSTASGMVIHVLQVHKENVTKVPNAKDGRDSTDIEIYGMQGIPPHVLTAHYGEEEDEPPAKVAKVEIPSAPLGGVVPRPYGMVYPPQQVPGAVPARPMYYPGPPMRHPAPVWQMPPPRPQQWYPQNPALSVPPAAHLGYRPQPLFPVQNMGMTPTPTSAPAIQPSPVTGVTPPGIPTSSPAMPVPQPLFPVVNNSIPSQAPPFSAPLPVGGAQQPSHADALGSADAYPPNNSIPGGTNAHSYASGPNTSGPSIGPPPVIANKAPSNQPNEVYLVWDDEAMSMEERRMSLPKYKVHDETSQMNSINAAIDRRISESRLAGRMAF

SEQ ID NO: 1704 - protein, 317 aa, Arabidopsis thaliana
MVIHVLQVHKENVTKVPNAKDGRDSTDIEIYGMQGIPPHVLTAHYGEEEDEPPAKVAKVEIPSAPLGGVVPRPYGMVYPPQQVPGAVPARPMYYPGPPMRHPAPVWQMPPPRPQQWYPQNPALSVPPAAHLGYRPQPLFPVQNMGMTPTPTSAPAIQPSPVTGVTPPGIPTSSPAMPVPQPLFPVVNNSIPSQAPPFSAPLPVGGAQQPSHADALGSADAYPPNNSIPGGTNAHSYASGPNTSGPSIGPPPVIANKAPSNQPNEVYLVWDDEAMSMEERRMSLPKYKVHDETSQMNSINAAIDRRISESRLAGRMAF

SEQ ID NO: 1705 - protein, 285 aa, Arabidopsis thaliana
MQGIPPHVLTAHYGEEEDEPPAKVAKVEIPSAPLGGVVPRPYGMVYPPQQVPGAVPARPMYYPGPPMRHPAPVWQMPPPRPQQWYPQNPALSVPPAAHLGYRPQPLFPVQNMGMTPTPTSAPAIQPSPVTGVTPPGIPTSSPAMPVPQPLFPVVNNSIPSQAPPFSAPLPVGGAQQPSHADALGSADAYPPNNSIPGGTNAHSYASGPNTSGPSIGPPPVIANKAPSNQPNEVYLVWDDEAMSMEERRMSLPKYKVHDETSQMNSINAAIDRRISESRLAGRMAF

SEQ ID NO: 1706 - DNA, 1729 bp, Arabidopsis thaliana
agaactcgctctcttttctcagccaacaaacactagtctcttctgatttgtaccctaacgtttactcgacttatctaaagccgtgaacctcgccggaattcttaaagtcgcgatttttccttaacgccgtttgattcccttacggcctttgaggtccaggagatagcaaatttgttggtgagtactgaaaaatggaggaagagaacgaagtagtgaagacgtttgcagagcttggtgtgcgtgaggagcttgttaaagcttgcgagagattgggatggaagaacccttccaaaattcaagccgaagcccttccttttgctcttgaagggaaagatgtaattggacttgcgcaaaccggttctggtaaaaccggagcttttgcaattcctatattgcaagcactacttgagtatgtttatgattctgagcctaagaaaggacgtagaccggatcctgctttcttcgcttgtgttttatctccaactcgagaacttgcaatccagattgctgaacagtttgaagctcttggtgctgatataagtcttaggtgtgctgtgcttgttggaggtatagacaggatgcaacaaactattgctcttgggaaacggcctcatgttattgttgcaacacctggtcgtctttgggatcatatgtctgatacaaaaggcttttctctgaaatcattgaaatatctggttcttgatgaagcagatagactgttgaatgaagattttgagaaatctcttaaccagattttggaagagatccctcttgagcggaaaacatttcttttttcagcgactatgactaaaaaggttcgaaaacttcaaagggcatgtttgaggaatcctgtgaagattgaagctgcctccaaatattccactgtcgatactcttaagcagcagtatcggtttgttgccgctaaatacaaggattgctatctggtatacattctgagtgaaatgcctgaatcaacatctatgattttcacccgaacatgtgatggtactcgctttctggctttggtgcttcggagccttggttttagagctattcctatcagtggtcaaatgactcagtcaaagagactgggagctttaaataagttcaaagcaggggaatgtaatatcttggtttgtaccgatgtggctagtagagggctcgatatcccatcagttgatgtggttatcaattatgatattcccacaaattcaaaggattacatccatagagtaggaagaaccgctcgtgctggacgttctggtgttgggatatcacttgtaaaccagtatgagctcgaatggtatatacaaatagaaaaactcattggcaagaaactacctgaatatcccgctgaggaagatgaagtcttgtcattgttggagagagttgcagaagcgaaaaagctatctgcaatgaatatgaaagaatcaggaggtaggaagagaaggggagaagatgatgaagaaagtgagaggttcttgggaggtaacaaggacagaggcaacaaggaaagaggtggtaacaaagacaagaagtcttctaagaagttcaaacgataaaatagctctgtttttactgttttccgataactcaccaaagttttgaattgaagttttccatatgaactagggaaatttaatccattttgtactcgtaatttgtatgttcttttctttttgctttgtttctcaatgacagattatacaatttaagttgaaagatgttt

SEQ ID NO: 1707 - protein, 456 aa, Arabidopsis thaliana
MEEENEVVKTFAELGVREELVKACERLGWKNPSKIQAEALPFALEGKDVIGLAQTGSGKTGAFAIPILQALLEYVYDSEPKKGRRPDPAFFACVLSPTRELAIQIAEQFEALGADISLRCAVLVGGIDRMQQTIALGKRPHVIVATPGRLWDHMSDTKGFSLKSLKYLVLDEADRLLNEDFEKSLNQILEEIPLERKTFLFSATMTKKVRKLQRACLRNPVKIEAASKYSTVDTLKQQYRFVAAKYKDCYLVYILSEMPESTSMIFTRTCDGTRFLALVLRSLGFRAIPISGQMTQSKRLGALNKFKAGECNILVCTDVASRGLDIPSVDVVINYDIPTNSKDYIHRVGRTARAGRSGVGISLVNQYELEWYIQIEKLIGKKLPEYPAEEDEVLSLLERVAEAKKLSAMNMKESGGRKRRGEDDEESERFLGGNKDRGNKERGGNKDKKSSKKFKR

SEQ ID NO: 1708 - protein, 327 aa, Arabidopsis thaliana
MQQTIALGKRPHVIVATPGRLWDHMSDTKGFSLKSLKYLVLDEADRLLNEDFEKSLNQILEEIPLERKTFLFSATMTKKVRKLQRACLRNPVKIEAASKYSTVDTLKQQYRFVAAKYKDCYLVYILSEMPESTSMIFTRTCDGTRFLALVLRSLGFRAIPISGQMTQSKRLGALNKFKAGECNILVCTDVASRGLDIPSVDVVINYDIPTNSKDYIHRVGRTARAGRSGVGISLVNQYELEWYIQIEKLIGKKLPEYPAEEDEVLSLLERVAEAKKLSAMNMKESGGRKRRGEDDEESERFLGGNKDRGNKERGGNKDKKSSKKFKR

SEQ ID NO: 1709 - protein, 303 aa, Arabidopsis thaliana
MSDTKGFSLKSLKYLVLDEADRLLNEDFEKSLNQILEEIPLERKTFLFSATMTKKVRKLQRACLRNPVKIEAASKYSTVDTLKQQYRFVAAKYKDCYLVYILSEMPESTSMIFTRTCDGTRFLALVLRSLGFRAIPISGQMTQSKRLGALNKFKAGECNILVCTDVASRGLDIPSVDVVINYDIPTNSKDYIHRVGRTARAGRSGVGISLVNQYELEWYIQIEKLIGKKLPEYPAEEDEVLSLLERVAEAKKLSAMNMKESGGRKRRGEDDEESERFLGGNKDRGNKERGGNKDKKSSKKFKR

SEQ ID NO: 1710 - DNA, 2141 bp, Arabidopsis thaliana
atcactctctcattaatcgaacttggcgtgtttaaataatcttccgatcgttaattctcttccgatttcgattcgattttagcggcgatgtctctcagacctagcgcgaagacggaggtgcgacggaatcggtacaaagtagcggtcgatgcggaggaaggacggcggaggcgagaggataacttggttgagatcaggaagaacaagagagaggaaaatttgcagaagaagagatttacgtcttctatggcttttggctcagcaacgggacaaacggaacaggatctttcttcagcgaaccaattaaaagataatctacctgctatggttgctggaatctggtcagaggatagcaattcacaattggaggcaacaaatctcttgcggaaactgctttctattgaacaaaatcctcctatcaatgaagttgtacaatctggtgttgttcctcgtgttgtgaagtttctttccagggatgacttccccaaacttcagtttgaggcagcttgggcgctcacccaacattgcttcagggacatcagagaacacaaatgtcatcattgaaagtggagctgtcccgatattcatccaacttctcagctctgctagtgaagatgtccgcgaacaggctgtttgggcattgggaaatgttgctggagactcaccaaaatgccgggatttagtcctaagttacggtgccatgacacctcttctgtctcaattcaatgagaatacaaagctttcaatgctgagaaatgctacatggacattatcaaacttctgcagagggaagcccccacctgcatttgaacagacacaaccagctttaccagttcttgagcgccttgtgcaatcaatggatgaagaagttctcacagatgcatgctgggctctgtcatacctctcggataattcaaacgacaaaatacaagcagtcattgaagcaggagttgttcctcgcctcatccagctcttaggtcattcgtcgccatcagtgctgattcctgctcttcgtaccattggaaatattgtaaccggggatgatctacagactcagatggttctcgaccagcaagcgcttccttgtcttttgaaccttctaaaaaacaattacaagaagagtatcaagaaggaagcttgctggactatctccaacattacagctggaaatgcagatcagatacaagcagtgattgatgcaggtataatccagtctcttgtttgggtgcttcaaagtgcagagttcgaagtaaaaaaagaagctgcttggggaatctcaaatgctacttctggtggcactcatgatcaaatcaagtttatggtgagccaaggctgtatcaaacctctatgcgatctccttacttgcccagatctgaaagttgtaacggtttgcttagaagcactagagaacattctcgtggttggagaagcagagaagaacttaggtcacacaggagaagacaacctctacgctcaaatgattgacgaagcagaagggttagagaagattgagaatcttcagagtcacgacaacaatgatatctacgacaaagccgtgaagatcctcgaaacattttggactgaagacaatgaagaagaaggcaacgacgagaatcatgctccacaatctggtttccagttcggaagcaccaatgttcctcctggtcaattcaactttatttgaaagacaacaagaacaacaacatagccagatataatgctgtcttcaccagcttttgctgcagcacgttctactctcggtcgtcgtcttcatgcgaagagactatcttcttctactggtcgaaccgctgatccagagattcatgcccgtaacgatggagacgagcctagtctttttccatcagaccccgagggtttggatgatgtagcgaacccgaagactccagcggatgaggatgtaccggatattcgaccacccggttttgtaaaggaaccgctttctccgccaaaaaatcccagagatacttcacacaagcttgaatctactcccgttggtctacctgcagatctcaatttccaacagaaacgaaattaatagcagcaaacgccttagccgttatggccttctagatcattcagaaatgcttacttttgattagctttgagaataaaatttaatt

SEQ ID NO: 1711 - protein, 402 aa, Arabidopsis thaliana
MTSPNFSLRQLGRSPNIASGTSENTNVIIESGAVPIFIQLLSSASEDVREQAVWALGNVAGDSPKCRDLVLSYGAMTPLLSQFNENTKLSMLRNATWTLSNFCRGKPPPAFEQTQPALPVLERLVQSMDEEVLTDACWALSYLSDNSNDKIQAVIEAGVVPRLIQLLGHSSPSVLIPALRTIGNIVTGDDLQTQMVLDQQALPCLLNLLKNNYKKSIKKEACWTISNITAGNADQIQAVIDAGIIQSLVWVLQSAEFEVKKEAAWGISNATSGGTHDQIKFMVSQGCIKPLCDLLTCPDLKVVTVCLEALENILVVGEAEKNLGHTGEDNLYAQMIDEAEGLEKIENLQSHDNNDIYDKAVKILETFWTEDNEEEGNDENHAPQSGFQFGSTNVPPGQFNFI

SEQ ID NO: 1712 - protein, 327 aa, Arabidopsis thaliana
MTPLLSQFNENTKLSMLRNATWTLSNFCRGKPPPAFEQTQPALPVLERLVQSMDEEVLTDACWALSYLSDNSNDKIQAVIEAGVVPRLIQLLGHSSPSVLIPALRTIGNIVTGDDLQTQMVLDQQALPCLLNLLKNNYKKSIKKEACWTISNITAGNADQIQAVIDAGIIQSLVWVLQSAEFEVKKEAAWGISNATSGGTHDQIKFMVSQGCIKPLCDLLTCPDLKVVTVCLEALENILVVGEAEKNLGHTGEDNLYAQMIDEAEGLEKIENLQSHDNNDIYDKAVKILETFWTEDNEEEGNDENHAPQSGFQFGSTNVPPGQFNFI

SEQ ID NO: 1713 - protein, 312 aa, Arabidopsis thaliana
MLRNATWTLSNFCRGKPPPAFEQTQPALPVLERLVQSMDEEVLTDACWALSYLSDNSNDKIQAVIEAGVVPRLIQLLGHSSPSVLIPALRTIGNIVTGDDLQTQMVLDQQALPCLLNLLKNNYKKSIKKEACWTISNITAGNADQIQAVIDAGIIQSLVWVLQSAEFEVKKEAAWGISNATSGGTHDQIKFMVSQGCIKPLCDLLTCPDLKVVTVCLEALENILVVGEAEKNLGHTGEDNLYAQMIDEAEGLEKIENLQSHDNNDIYDKAVKILETFWTEDNEEEGNDENHAPQSGFQFGSTNVPPGQFNFI

SEQ ID NO: 1714 - DNA, 2371 bp, Arabidopsis thaliana
ccccccccccccccccccgctgtgtctttatcttctctctcctcttcttgaaaaactgaacctttaattctttcttcacatctcctttagctttctgaagctgctatcttcaagctcaaaaccaaaccctagaaataaaatgacggcgacacaaatgctgcttcatcttcttcttcttccacttctcttccttcacttcagcaaccaagtcatggcagaaatcaccgacgagttagcgacattgatggaggttaaaacagagcttgacccagaagacaaacacttagcttcatggagtgttaatggagatctgtgtaaagactttgaaggtgttggttgtgactggaaaggacgagtttctaacatatctctacaagggaaaggcttatctggtaaaatctctccgaacattggaaagcttaaacatttgacgggtttgttcttgcactacaatgctcttgttggagatattcctagagaacttggtaacttgtcggaacttacggatctttatctcaatgttaataatctctccggtgagattccttcaaacattgggaagatgcaaggcttgcaagttttgcagctctgttacaacaatttgactggaagcattcctagggagcttagttcactgaggaagctgagtgttcttgctcttcaatctaacaaactcactggagctatacctgcgagtttaggagatttaagtgctctagagcggctagatttgagctacaatcatttgtttggttctgtaccaggcaagttagctagccctcctctgcttcgagttctcgacatccgcaacaactccctcactggcaatgtacctcctgtactgaagagattaaatgaaggtttttcgtttgaaaacaacttgggactatgtggagctgagttctcgccgttgaaatcttgcaatggcacagctcctgaggaacctaagccatacggtgcaaccgtgtttggttttccatcccgggatataccagaatcagctaatctacggtcaccttgtaatggaacaaactgtaatactcctccaaaatctcaccaaggtgcaatccttattggtttggttgtctcgactattgcattgtctgctattagcatcctcttgttcacgcattatcgcagacgcaaacagaagctttcaaccacttatgaaatgtcggacaaccgtctcaacaccgtaggaggaggttttaggaagaacaatggttctccattggccagtcttgaatatactaatggttgggatccactttcagacaataggaatctcagtgtctttgctcaagaagttatccagagctttcgattcaatcttgaagaggttgaaactgctacacagtatttctcagaagtgaatttgcttggaagaagcaacttctctgcgacttacaaaggaatcttgagagatggttctgctgtagcgatcaaacggtttagtaaaacaagttgcaaatctgaagaacctgagttcttgaaaggactcaacatgttggcgtctctgaaacatgaaaacttgtcaaaacttagaggcttctgctgttcaagaggccgtggagaatgttttctcatctatgattttgctcctaatggaaatttactgagctatcttgatctcaaagatggtgatgcgcatgttcttgattggtccacgagagtatccattgctaaaggcatcgcaaaagggattgcttatctacattcatacaaaggaagcaagccagcattggttcaccaaaacatctcagcggagaaagttctaatcgaccagcgatacagtcctctactctcaaactcaggcctccacacacttctcacaaacgacattgtcttctctgcactcaaagacagtgcagcaatgggctacctcgctccagaatacaccacaaccggacgtttcaccgagaaaaccgatgtctacgctttcgggattcttgtgtttcagataatctccgggaaacagaaggttaggcatcttgttaagcttggaactgaagcttgtaggttcaatgattacatagatccaaatcttcaaggaagattctttgaatatgaagccacaaagctagctagaatcgcgtggctatgcactcatgaatctcccattgaaagaccatccgtggaagctgtagttcatgagctaggtaactgtagtagctgtctctgagaactctctcgaggcaaatgtgtaatgtgtaccttaggaatcaattaaggaagggtttgttagtcaccttttcctgtgtttagggttaagaaaaggtgccttttcccttcccattaacgtttaaaaactgttcaacgtgttgtactttattggtttgtatgatttgtgtttatgttaagttcttcaacc

SEQ ID NO: 1715 - protein, 680 aa, Arabidopsis thaliana
MTATQMLLHLLLLPLLFLHFSNQVMAEITDELATLMEVKTELDPEDKHLASWSVNGDLCKDFEGVGCDWKGRVSNISLQGKGLSGKISPNIGKLKHLTGLFLHYNALVGDIPRELGNLSELTDLYLNVNNLSGEIPSNIGKMQGLQVLQLCYNNLTGSIPRELSSLRKLSVLALQSNKLTGAIPASLGDLSALERLDLSYNHLFGSVPGKLASPPLLRVLDIRNNSLTGNVPPVLKRLNEGFSFENNLGLCGAEFSPLKSCNGTAPEEPKPYGATVFGFPSRDIPESANLRSPCNGTNCNTPPKSHQGAILIGLVVSTIALSAISILLFTHYRRRKQKLSTTYEMSDNRLNTVGGGFRKNNGSPLASLEYTNGWDPLSDNRNLSVFAQEVIQSFRFNLEEVETATQYFSEVNLLGRSNFSATYKGILRDGSAVAIKRFSKTSCKSEEPEFLKGLNMLASLKHENLSKLRGFCCSRGRGECFLIYDFAPNGNLLSYLDLKDGDAHVLDWSTRVSIAKGIAKGIAYLHSYKGSKPALVHQNISAEKVLIDQRYSPLLSNSGLHTLLTNDIVFSALKDSAAMGYLAPEYTTTGRFTEKTDVYAFGILVFQIISGKQKVRHLVKLGTEACRFNDYIDPNLQGRFFEYEATKLARIAWLCTHESPIERPSVEAVVHELGNCSSCL

SEQ ID NO: 1716 - protein, 675 aa, Arabidopsis thaliana
MLLHLLLLPLLFLHFSNQVMAEITDELATLMEVKTELDPEDKHLASWSVNGDLCKDFEGVGCDWKGRVSNISLQGKGLSGKISPNIGKLKHLTGLFLHYNALVGDIPRELGNLSELTDLYLNVNNLSGEIPSNIGKMQGLQVLQLCYNNLTGSIPRELSSLRKLSVLALQSNKLTGAIPASLGDLSALERLDLSYNHLFGSVPGKLASPPLLRVLDIRNNSLTGNVPPVLKRLNEGFSFENNLGLCGAEFSPLKSCNGTAPEEPKPYGATVFGFPSRDIPESANLRSPCNGTNCNTPPKSHQGAILIGLVVSTIALSAISILLFTHYRRRKQKLSTTYEMSDNRLNTVGGGFRKNNGSPLASLEYTNGWDPLSDNRNLSVFAQEVIQSFRFNLEEVETATQYFSEVNLLGRSNFSATYKGILRDGSAVAIKRFSKTSCKSEEPEFLKGLNMLASLKHENLSKLRGFCCSRGRGECFLIYDFAPNGNLLSYLDLKDGDAHVLDWSTRVSIAKGIAKGIAYLHSYKGSKPALVHQNISAEKVLIDQRYSPLLSNSGLHTLLTNDIVFSALKDSAAMGYLAPEYTTTGRFTEKTDVYAFGILVFQIISGKQKVRHLVKLGTEACRFNDYIDPNLQGRFFEYEATKLARIAWLCTHESPIERPSVEAVVHELGNCSSCL

SEQ ID NO: 1717 - protein, 656 aa, Arabidopsis thaliana
MAEITDELATLMEVKTELDPEDKHLASWSVNGDLCKDFEGVGCDWKGRVSNISLQGKGLSGKISPNIGKLKHLTGLFLHYNALVGDIPRELGNLSELTDLYLNVNNLSGEIPSNIGKMQGLQVLQLCYNNLTGSIPRELSSLRKLSVLALQSNKLTGAIPASLGDLSALERLDLSYNHLFGSVPGKLASPPLLRVLDIRNNSLTGNVPPVLKRLNEGFSFENNLGLCGAEFSPLKSCNGTAPEEPKPYGATVFGFPSRDIPESANLRSPCNGTNCNTPPKSHQGAILIGLVVSTIALSAISILLFTHYRRRKQKLSTTYEMSDNRLNTVGGGFRKNNGSPLASLEYTNGWDPLSDNRNLSVFAQEVIQSFRFNLEEVETATQYFSEVNLLGRSNFSATYKGILRDGSAVAIKRFSKTSCKSEEPEFLKGLNMLASLKHENLSKLRGFCCSRGRGECFLIYDFAPNGNLLSYLDLKDGDAHVLDWSTRVSIAKGIAKGIAYLHSYKGSKPALVHQNISAEKVLIDQRYSPLLSNSGLHTLLTNDIVFSALKDSAAMGYLAPEYTTTGRFTEKTDVYAFGILVFQIISGKQKVRHLVKLGTEACRFNDYIDPNLQGRFFEYEATKLARIAWLCTHESPIERPSVEAVVHELGNCSSCL

SEQ ID NO: 1718 - DNA, 2350 bp, Arabidopsis thaliana
aaaagctatagatcgatcctaggcttacctcaaacctcagtctccgttgactactgagactcgtcgacctctgatccgcttcttcgactatacggatctacttccgatcttgatgatggccggaggtaacgtacggtttctggttttgatactcgccgtagcaatttgcggtgctgcttctgttttccagccgatctcagactctcaccgatctgcggctctggatgtcttcgtaccagtcgatggatcatacaaaagcttggaggaggcatatgaagcattaaagactttggagattcttggaattgataaaaagtctgatcttagctcaaagacttgtgagaatgtggttaaagttcttcagtcgtcttcttctactcttaaggatgcattttatgcgttaaacgttaatgggattctaaaatgtaaaattggtgaagctggtcctaaggacattgtttctcaacttcaagctggtgttaaagatgcgaagctattgcttgatttctattattctgtcagaggcttggtgctggctaaggagcaatttcctggaactcatataagtcttggagatgccgaagccattttccgttccatcaagtctcttagccagagtgatggaagatggcgctacagctccaacaatcccgaatcaagcacttttgctgctggcttagcctatgaaacgcttgctggagtgatttcattagcaccttcagagtttgatccatctttgatccagtcggtgaagacgggtatcctgaagctttctgacagtatccaaaaatatgatgatgggacattttattttgatgagaagtctgttgatgcaagtcaaggcccgatctcaacaactgcatcagttattagagggctcacgtcatttgcagcttcagaatccacaggattgaaccttccaggtgataagatagttggtctggccaaattctttctgggtgttggaattcctggtgatgccaaggacttcttcaaccaaatagatgcactagcttgtttggaagacaacaagttttctgttccactcatcttgtctcttccatccactgtcatttcattgacaaagaaagagcctctgaaggttaaagttagcactgtactgggttcgaaggcaccagctcttagtgtgaagcttacacaagctctaagttctaagtcagtggattcatctgtaattaataaccaggagcttaagtttgacgctgacagtgcaacgtacttcctggactcctttcccaagaactttgacattggaaaatatacttttgtatttaagattgtgctggatgaatcagcacatgagaaagtatacataactgaagctcaaacaaaagtgcctatagctgccacaggagctattagcattgaaaatgcagaaattgctgtacttgacagtgacattggaagcgttgaatctcagaaaaagctagatttaactaaagatggagcggtatcattatcagcaaaccaccttcaaaagctacgcctgtcattccagttaactactccacttggcaatgcgtttaagccacaccaggcatttttcaagctgaaacatgagtcacaggtcgagcatatctttctcgtgaaaacttctggaaagaagtctgaattagttctagattttcttggattggttgagaagctctactacctctctggtaaatatgagatacagctaaccattggagatgcttctatggagaactctttactgagtaatattggtcacattgaactagacctaccagagcgtccagagaaggcgactcgtcctcctctacagtctactgagccttactcaagatatgggccaaaagctgaaatatcacacatattcaggattcctgaaaagcttccagcaaagcagctctcactagttttcttgggtgttatcgttctcccattcatcggtttcctgattgggcttacgcggttgggagtgaacataaagagcttcccatcgtcgactggatctgcaatatccgctttacttttccactgcggaattggagctgttttgcttctatatgtgctattctggttgaagttggatctattcacgactctcaaggcactttctttgttgggagtgtttctgttgttcgtgggacacagaacactatctcaacttgcatcagcatcaaacaagttgaaatctgcttgaagaagaagaactcactatgaaggatctttttttggtttatgcgtattttcagttttgtagtattgcttatagattatggtgatagacaaattcaaaagaagttcagagtttacatactctctcagtttagtcttaaaaagtaatcaagagtctctttccttg

SEQ ID NO: 1719 - protein, 691 aa, Arabidopsis thaliana
MMAGGNVRFLVLILAVAICGAASVFQPISDSHRSAALDVFVPVDGSYKSLEEAYEALKTLEILGIDKKSDLSSKTCENVVKVLQSSSSTLKDAFYALNVNGILKCKIGEAGPKDIVSQLQAGVKDAKLLLDFYYSVRGLVLAKEQFPGTHISLGDAEAIFRSIKSLSQSDGRWRYSSNNPESSTFAAGLAYETLAGVISLAPSEFDPSLIQSVKTGILKLSDSIQKYDDGTFYFDEKSVDASQGPISTTASVIRGLTSFAASESTGLNLPGDKIVGLAKFFLGVGIPGDAKDFFNQIDALACLEDNKFSVPLILSLPSTVISLTKKEPLKVKVSTVLGSKAPALSVKLTQALSSKSVDSSVINNQELKFDADSATYFLDSFPKNFDIGKYTFVFKIVLDESAHEKVYITEAQTKVPIAATGAISIENAEIAVLDSDIGSVESQKKLDLTKDGAVSLSANHLQKLRLSFQLTTPLGNAFKPHQAFFKLKHESQVEHIFLVKTSGKKSELVLDFLGLVEKLYYLSGKYEIQLTIGDASMENSLLSNIGHIELDLPERPEKATRPPLQSTEPYSRYGPKAEISHIFRIPEKLPAKQLSLVFLGVIVLPFIGFLIGLTRLGVNIKSFPSSTGSAISALLFHCGIGAVLLLYVLFWLKLDLFTTLKALSLLGVFLLFVGHRTLSQLASASNKLKSA

SEQ ID NO: 1720 - protein, 690 aa, Arabidopsis thaliana
MAGGNVRFLVLILAVAICGAASVFQPISDSHRSAALDVFVPVDGSYKSLEEAYEALKTLEILGIDKKSDLSSKTCENVVKVLQSSSSTLKDAFYALNVNGILKCKIGEAGPKDIVSQLQAGVKDAKLLLDFYYSVRGLVLAKEQFPGTHISLGDAEAIFRSIKSLSQSDGRWRYSSNNPESSTFAAGLAYETLAGVISLAPSEFDPSLIQSVKTGILKLSDSIQKYDDGTFYFDEKSVDASQGPISTTASVIRGLTSFAASESTGLNLPGDKIVGLAKFFLGVGIPGDAKDFFNQIDALACLEDNKFSVPLILSLPSTVISLTKKEPLKVKVSTVLGSKAPALSVKLTQALSSKSVDSSVINNQELKFDADSATYFLDSFPKNFDIGKYTFVFKIVLDESAHEKVYITEAQTKVPIAATGAISIENAEIAVLDSDIGSVESQKKLDLTKDGAVSLSANHLQKLRLSFQLTTPLGNAFKPHQAFFKLKHESQVEHIFLVKTSGKKSELVLDFLGLVEKLYYLSGKYEIQLTIGDASMENSLLSNIGHIELDLPERPEKATRPPLQSTEPYSRYGPKAEISHIFRIPEKLPAKQLSLVFLGVIVLPFIGFLIGLTRLGVNIKSFPSSTGSAISALLFHCGIGAVLLLYVLFWLKLDLFTTLKALSLLGVFLLFVGHRTLSQLASASNKLKSA

SEQ ID NO: 1721 - DNA, 1112 bp, Arabidopsis thaliana
atctaattgctaaaaggaaaagcatcaaactttgttttctttgcttcttctatcttcttcttctttcttcttctcgctttaatactctttgattcctctgttcgtttgatgagaattagattttaaatggcaaaagtttcgtttaaggattctctgaaagctcttgaagctgatattcaacacgctaacactgtagctttagattatcctcgggagaaggatggagcgcgtgttcaaatgaggctatcgtacactccagctgctcagtttttactttttcttgtacaatggactgattgccatcttgctggtacactcggtctgctcagagttctgatttacatgacctatgcggatgggaaaaccacaatgtcggtttatgagagaaaaacaagtattaaagatttctatgctgtgatatttccgtcgttgttacaactagaaagaggtatcacagacctggatgatcgtaaacagaaagaagtctgcaaaatacggtacagaaataaagatgagactgaaaaggtcaagctctcggagattgacatcgagagagaagaagaatgcgggatttgtatggagatgaacaacatggtggttctccctaattgtacgcattctttatgcatcaagtgttaccgcgattggcacgggaggtcagaatcatgccctttttgccgagacagtcttaagagagtaaactcaggggacttatggatgttaatggagaaatccgatacggttaatatgtatacaattgagcgggagaataagaagaggttgtttgtgtatatagagaagctacctctagtggttccagatcaagtgtttgcttcttctccttatgattgccatgtcaagtaaataagacggagaagagctttggcaaaagccgaaaccgggtctggtaaacttttatctgaatgtatatgtatataatgttttagagtagtagtaagtaatatagtgtaactatttcttggggaagtccatttctacttgcttttctttttatctgcatttggcttttggttcccaaaaactcttatttctgttgtacattcatgtctgaatttaataacctcttcttcaagaaatggctttcactcacc

SEQ ID NO: 1722 - protein, 245 aa, Arabidopsis thaliana
MAKVSFKDSLKALEADIQHANTVALDYPREKDGARVQMRLSYTPAAQFLLFLVQWTDCHLAGTLGLLRVLIYMTYADGKTTMSVYERKTSIKDFYAVIFPSLLQLERGITDLDDRKQKEVCKIRYRNKDETEKVKLSEIDIEREEECGICMEMNNMVVLPNCTHSLCIKCYRDWHGRSESCPFCRDSLKRVNSGDLWMLMEKSDTVNMYTIERENKKRLFVYIEKLPLVVPDQVFASSPYDCHVK

SEQ ID NO: 1723 - protein, 208 aa, Arabidopsis thaliana
MRLSYTPAAQFLLFLVQWTDCHLAGTLGLLRVLIYMTYADGKTTMSVYERKTSIKDFYAVIFPSLLQLERGITDLDDRKQKEVCKIRYRNKDETEKVKLSEIDIEREEECGICMEMNNMVVLPNCTHSLCIKCYRDWHGRSESCPFCRDSLKRVNSGDLWMLMEKSDTVNMYTIERENKKRLFVYIEKLPLVVPDQVFASSPYDCHVK

SEQ ID NO: 1724 - protein, 173 aa, Arabidopsis thaliana
MTYADGKTTMSVYERKTSIKDFYAVIFPSLLQLERGITDLDDRKQKEVCKIRYRNKDETEKVKLSEIDIEREEECGICMEMNNMVVLPNCTHSLCIKCYRDWHGRSESCPFCRDSLKRVNSGDLWMLMEKSDTVNMYTIERENKKRLFVYIEKLPLVVPDQVFASSPYDCHVK

SEQ ID NO: 1725 - DNA, 1122 bp, Arabidopsis thaliana
tgggagacaaaagagcttctgaatctctctctcttctgcgtctcgccaaatttatttcccgattcaatttgtagggtttctgcagaagaaggaaaccaccattaaaccctaagtacgtcacctttcaagctccttcttcttaccaatcgcaatcgttttcttcctctctcgatctgttcctcggacgagaaaactggacaacaaacctatgccgtcgacgccgctggctaacggtggtacgcctcctatgggtggcggagagagaacgacggttacaacttccacggtggcggatgataagcctggagtttcgatgatggagcagttggttccggaaattacgacacacgcgcttagttacttggattatcccagtctctgtcgcttatccatgactaattccttgatgaggaaagctgctaatgatgataatgcttggaaagctctttatcacaaggattttactctggagcaagatggtataacaccagtcaatgggtggaaagagtactatgcaactactagagcgattattagtgtgaatacggaattcttcaccatcattagagacagagcgcttcaagcgatggctcggttgtggttgaactcggactatgtcaagtgtatccatgcctctggcgaactcttctccgggtacaatgaagtgatacaaagctggcaactttgtttcaattgggaacaagggtttgactttcaggtccacacggttcgcactcggatactaacagacatggcttgggtcaccatgaaggcatacctgaacgtggatggtggtccattcctaataaccaatgtgttcgagttccacaatggaaggtggcacatggttcatcatcacagctcagtgatgctcatcgatgatcaacaagttgttgttcattgatgaatgatgataatatcttttagttttggtttccttctcttcttttattttcatggggacaacaaataaagaagaagaaagaaactgcatattggagaaattggcttattagatttttagtggttattatttagttttaactacatgtactgaatgttctattttttttttttttctcagttgctgttgaatggttggtctaattattactttttcct

SEQ ID NO: 1726 - protein, 231 aa, Arabidopsis thaliana
MPSTPLANGGTPPMGGGERTTVTTSTVADDKPGVSMMEQLVPEITTHALSYLDYPSLCRLSMTNSLMRKAANDDNAWKALYHKDFTLEQDGITPVNGWKEYYATTRAIISVNTEFFTIIRDRALQAMARLWLNSDYVKCIHASGELFSGYNEVIQSWQLCFNWEQGFDFQVHTVRTRILTDMAWVTMKAYLNVDGGPFLITNVFEFHNGRWHMVHHHSSVMLIDDQQVVVH

SEQ ID NO: 1727 - protein, 218 aa, Arabidopsis thaliana
MGGGERTTVTTSTVADDKPGVSMMEQLVPEITTHALSYLDYPSLCRLSMTNSLMRKAANDDNAWKALYHKDFTLEQDGITPVNGWKEYYATTRAIISVNTEFFTIIRDRALQAMARLWLNSDYVKCIHASGELFSGYNEVIQSWQLCFNWEQGFDFQVHTVRTRILTDMAWVTMKAYLNVDGGPFLITNVFEFHNGRWHMVHHHSSVMLIDDQQVVVH

SEQ ID NO: 1728 - protein, 196 aa, Arabidopsis thaliana
MMEQLVPEITTHALSYLDYPSLCRLSMTNSLMRKAANDDNAWKALYHKDFTLEQDGITPVNGWKEYYATTRAIISVNTEFFTIIRDRALQAMARLWLNSDYVKCIHASGELFSGYNEVIQSWQLCFNWEQGFDFQVHTVRTRILTDMAWVTMKAYLNVDGGPFLITNVFEFHNGRWHMVHHHSSVMLIDDQQVVVH

SEQ ID NO: 1729 - DNA, 1045 bp, Arabidopsis thaliana
aaaaagcttttgaagaacagaggaacaagaagaagaaagatgttcaggaaccagtacgacacagatgtgacaacatggagtcccacaggtcgactattccaagtcgaatacgccatggaagctgtgaaacaaggctccgcagcaataggactcagatctcgctctcatgtcgtcctcgcttgtgtcaacaaagcacaatcagagctctcttctcatcaaaggaagatctttaaagtcgatgatcatattggtgttgctattgctggtctcactgctgatggtcgtgttctctctcgatatatgagatctgagtctattaatcactcttttacttatgagtctcctcttcctgttggtcgtcttgttgttcatcttgctgataaagctcaggtatgtacccaacgatcatggaaacggccttatggtgtgggtttgctggtaggtggattggacgagtcaggagctcacctctactacaactgccctagcggaaactactttgaatatcaagcattcgctatcgggtctcgttcacaagctgcgaaaacctatctggagcgcaaattcgagagcttccaagaatcatcaaaagaagatctgataaaagatgctattatggccataagggaaactttgcaaggggaaacactgaagagctcgctctgcactgtttctgttctaggagtcgatgaaccattccatttcttggaccaggaaagcattcaaaaggtgattgatacgtttgagaaggttcctgaggaagaggaagatgctggtgagggtgaggccgaacccgaagctgctcctggtgctgctggaactggtgaacaaggtggttcaggtgatcaagatgttgcaccaatggaaatttgagcaagagggaatgagttcaaagttggattttctaaccaactttcttgtgtttagctctttgatgtgttccaacttccaagtattgttgttttaactcagctttgtttattttaacagcttgcaacaatgagttattgagtgccactagcttatatttagtcatacttaagtt

SEQ ID NO: 1730 - protein, 290 aa, Arabidopsis thaliana
KKLLKNRGTRRRKMFRNQYDTDVTTWSPTGRLFQVEYAMEAVKQGSAAIGLRSRSHVVLACVNKAQSELSSHQRKIFKVDDHIGVAIAGLTADGRVLSRYMRSESINHSFTYESPLPVGRLVVHLADKAQVCTQRSWKRPYGVGLLVGGLDESGAHLYYNCPSGNYFEYQAFAIGSRSQAAKTYLERKFESFQESSKEDLIKDAIMAIRETLQGETLKSSLCTVSVLGVDEPFHFLDQESIQKVIDTFEKVPEEEEDAGEGEAEPEAAPGAAGTGEQGGSGDQDVAPMEI

SEQ ID NO: 1731 - protein, 277 aa, Arabidopsis thaliana
MFRNQYDTDVTTWSPTGRLFQVEYAMEAVKQGSAAIGLRSRSHVVLACVNKAQSELSSHQRKIFKVDDHIGVAIAGLTADGRVLSRYMRSESINHSFTYESPLPVGRLVVHLADKAQVCTQRSWKRPYGVGLLVGGLDESGAHLYYNCPSGNYFEYQAFAIGSRSQAAKTYLERKFESFQESSKEDLIKDAIMAIRETLQGETLKSSLCTVSVLGVDEPFHFLDQESIQKVIDTFEKVPEEEEDAGEGEAEPEAAPGAAGTGEQGGSGDQDVAPMEI

SEQ ID NO: 1732 - protein, 252 aa, Arabidopsis thaliana
MEAVKQGSAAIGLRSRSHVVLACVNKAQSELSSHQRKIFKVDDHIGVAIAGLTADGRVLSRYMRSESINHSFTYESPLPVGRLVVHLADKAQVCTQRSWKRPYGVGLLVGGLDESGAHLYYNCPSGNYFEYQAFAIGSRSQAAKTYLERKFESFQESSKEDLIKDAIMAIRETLQGETLKSSLCTVSVLGVDEPFHFLDQESIQKVIDTFEKVPEEEEDAGEGEAEPEAAPGAAGTGEQGGSGDQDVAPMEI

SEQ ID NO: 1733 - DNA, 584 bp, Arabidopsis thaliana
ctctctctctcactcttttcttttccgagaacccaacaaaaaaaaagctactattaatccttcccctcgtgaggaaatcatttcttcttgtttctcgagatttattctctttctctctctctttctctgtgtgtttcgtgtcttcagattagttcgatgtttcgttcagacaaggcggaaaaaatggataaacgacgacggagacagagcaaagccaaggcttcttgttccgaagaggtgagtagtatcgaatgggaagctgtgaagatgtcagaagaagaagaagatctcatttctcggatgtataaactcgttggcgacaggtgggagttgatcgccggaaggatcccgggacggacgccggaggagatagagagatattggcttatgaaacacggcgtcgtttttgccaacagacgaagagacttttttaggaaatgattttttttgtttggattaaaagaaaattttcctctccttaattcacaagacaagaaaaaaaggaaatgtacctgtccttgaattactattttggaatgtataattatctatatatataagaagaaaaaattgcttaggaattt

SEQ ID NO: 1734 - protein, 94 aa, Arabidopsis thaliana
MFRSDKAEKMDKRRRRQSKAKASCSEEVSSIEWEAVKMSEEEEDLISRMYKLVGDRWELIAGRIPGRTPEEIERYWLMKHGVVFANRRRDFFRK

SEQ ID NO: 1735 - protein, 85 aa, Arabidopsis thaliana
MDKRRRRQSKAKASCSEEVSSIEWEAVKMSEEEEDLISRMYKLVGDRWELIAGRIPGRTPEEIERYWLMKHGVVFANRRRDFFRK

SEQ ID NO: 1736 - protein, 79 aa, Arabidopsis thaliana
SLSHSFLFREPNKKKATINPSPREEIISSCFSRFILFLSLFLCVFRVFRLVRCFVQTRRKKWINDDGDRAKPRLLVPKR

SEQ ID NO: 1737 - DNA, 949 bp, Arabidopsis thaliana
ttggtagcaacacactctaaaagcaacaaaggatccaactaacaaacaacaaatcagtgtttttgtttctatcaacagtctctctgaaaatctcacaaagttttcatcttttaataagaaatcaagtttacggacagagatgagttatttgggagtcggagttagtcccggaaacgtctccggaagtactaccaaaatgaagctgattgatcggaaagtgagagtcacggagttgattctgaggtgtttggtttgtgtccttgctctcgtcgctgcgattctcattgctacagatgttcaagtgagagagattttcatgattcagaagaaagccaaattcaccgacatgaaggcgcttgtgcttttggtggtcgtcaatggcatagccgcgggttattctttggttcaggcggttcgttgcgtggtgggtttgatgaaaggaagagttttgtttagtaagcctctggcttgggccattttcttcggcgatcaggcagtagcatacttgtgtgtggcgggggttgcagccgcggcgcagtctgcggcctttgcaaagttgggtgagccagagcttcaatggatgaaaatttgtaatatgtatgggaagttttgtaaccaagtgggtgaaggaattgcgagcgctttgtttgcttgcattggaatggttttgatctcttgcatttcggctttcggtgtctttcgtttgtacggcggaagcaaatctaggccaagctcacggtggtgaaggcctgtagtggtcttggaccaaccttgtttgtggaacctctattaaatgttgtggtgtgtgtcctcttatctctcagtgtgtataccgctattacttactgtcatgatctcagctgatctataaacataatcatgacaattatggttgtttgatgtgaataattattagtattttaaaccacaaacaatgacatgtttagtc

SEQ ID NO: 1738 - protein, 201 aa, Arabidopsis thaliana
MSYLGVGVSPGNVSGSTTKMKLIDRKVRVTELILRCLVCVLALVAAILIATDVQVREIFMIQKKAKFTDMKALVLLVVVNGIAAGYSLVQAVRCVVGLMKGRVLFSKPLAWAIFFGDQAVAYLCVAGVAAAAQSAAFAKLGEPELQWMKICNMYGKFCNQVGEGIASALFACIGMVLISCISAFGVFRLYGGSKSRPSSRW

SEQ ID NO: 1739 - protein, 182 aa, Arabidopsis thaliana
MKLIDRKVRVTELILRCLVCVLALVAAILIATDVQVREIFMIQKKAKFTDMKALVLLVVVNGIAAGYSLVQAVRCVVGLMKGRVLFSKPLAWAIFFGDQAVAYLCVAGVAAAAQSAAFAKLGEPELQWMKICNMYGKFCNQVGEGIASALFACIGMVLISCISAFGVFRLYGGSKSRPSSRW

SEQ ID NO: 1740 - protein, 142 aa, Arabidopsis thaliana
MIQKKAKFTDMKALVLLVVVNGIAAGYSLVQAVRCVVGLMKGRVLFSKPLAWAIFFGDQAVAYLCVAGVAAAAQSAAFAKLGEPELQWMKICNMYGKFCNQVGEGIASALFACIGMVLISCISAFGVFRLYGGSKSRPSSRW

SEQ ID NO: 1741 - DNA, 1843 bp, Arabidopsis thaliana
tacggctgcgagaagacgacagaagggggcagcaaaacaaacaatcatggcggagaaactcagtgatggcagcatcatcatctcagtccatcctagaccctccaagggtttctcctcgaagcttctcgatcttctcgagagacttgttgtcaagctcatgcacgatgcttctctccctctccactacctctcaggcaacttcgctcccatccgtgatgaaactcctcccgtcaaggatctccccgtccatggatttcttcccgaatgcttgaatggtgaatttgtgagggttggtccaaaccccaagtttgatgctgtcgctggatatcactggtttgatggagatgggatgattcatggggtacgcatcaaagatgggaaagctacttatgtttctcgatatgttaagacatcacgtcttaagcaggaagagttcttcggagctgccaaattcatgaagattggtgaccttaaggggtttttcggattgctaatggtcaatgtccaacagctgagaacgaagctcaaaatattggacaacacttatggaaatggaactgccaatacagcactcgtatatcaccatggaaaacttctagcattacaggaggcagataagccgtacgtcatcaaagttttggaagatggagacctgcaaactcttggtataatagattatgacaagagattgacccactccttcactgctcacccaaaagttgacccggttacgggtgaaatgtttacattcggctattcgcatacgccaccttatctcacatacagagttatctcgaaagatggcattatgcatgacccagtcccaattactatatcagagcctatcatgatgcatgattttgctattactgagacttatgcaatcttcatggatcttcctatgcacttcaggccaaaggaaatggtgaaagagaagaaaatgatatactcatttgatcccacaaaaaaggctcgttttggtgttcttccacgctatgccaaggatgaacttatgattagatggtttgagcttcccaactgctttattttccacaacgccaatgcttgggaagaagaggatgaagtcgtcctcatcacttgtcgtcttgagaatccagatcttgacatggtcagtgggaaagtgaaagaaaaactcgaaaattttggcaacgaactgtacgaaatgagattcaacatgaaaacgggctcagcttctcaaaaaaaactatccgcatctgcggttgatttccccagaatcaatgagtgctacaccggaaagaaacagagatacgtatatggaacaattctggacagtatcgcaaaggttaccggaatcatcaagtttgatctgcatgcagaagctgagacagggaaaagaatgctggaagtaggaggtaatatcaaaggaatatatgacctgggagaaggcagatatggttcagaggctatctatgttccgcgtgagacagcagaagaagacgacggttacttgatattctttgttcatgatgaaaacacagggaaatcatgcgtgactgtgatagacgcaaaaacaatgtcggctgaaccggtggcagtggtggagctgccgcacagggtcccatatggcttccatgccttgtttgttacagaggaacaactccaggaacaaactcttatataagccaagctgtgtgcatatacacataatacttctgagtcagagatgtgaaactcggtgatactgaattactgatattaccattacacacatattatggcgttatgtattcataatactgcctggtttctctttacatataattacatttcatcctccaatatcaacaaggtctctactttc

SEQ ID NO: 1742 - protein, 553 aa, Arabidopsis thaliana
TAARRRQKGAAKQTIMAEKLSDGSIIISVHPRPSKGFSSKLLDLLERLVVKLMHDASLPLHYLSGNFAPIRDETPPVKDLPVHGFLPECLNGEFVRVGPNPKFDAVAGYHWFDGDGMIHGVRIKDGKATYVSRYVKTSRLKQEEFFGAAKFMKIGDLKGFFGLLMVNVQQLRTKLKILDNTYGNGTANTALVYHHGKLLALQEADKPYVIKVLEDGDLQTLGIIDYDKRLTHSFTAHPKVDPVTGEMFTFGYSHTPPYLTYRVISKDGIMHDPVPITISEPIMMHDFAITETYAIFMDLPMHFRPKEMVKEKKMIYSFDPTKKARFGVLPRYAKDELMIRWFELPNCFIFHNANAWEEEDEVVLITCRLENPDLDMVSGKVKEKLENFGNELYEMRFNMKTGSASQKKLSASAVDFPRINECYTGKKQRYVYGTILDSIAKVTGIIKFDLHAEAETGKRMLEVGGNIKGIYDLGEGRYGSEAIYVPRETAEEDDGYLIFFVHDENTGKSCVTVIDAKTMSAEPVAVVELPHRVPYGFHALFVTEEQLQEQTLI

SEQ ID NO: 1743 - protein, 538 aa, Arabidopsis thaliana
MAEKLSDGSIIISVHPRPSKGFSSKLLDLLERLVVKLMHDASLPLHYLSGNFAPIRDETPPVKDLPVHGFLPECLNGEFVRVGPNPKFDAVAGYHWFDGDGMIHGVRIKDGKATYVSRYVKTSRLKQEEFFGAAKFMKIGDLKGFFGLLMVNVQQLRTKLKILDNTYGNGTANTALVYHHGKLLALQEADKPYVIKVLEDGDLQTLGIIDYDKRLTHSFTAHPKVDPVTGEMFTFGYSHTPPYLTYRVISKDGIMHDPVPITISEPIMMHDFAITETYAIFMDLPMHFRPKEMVKEKKMIYSFDPTKKARFGVLPRYAKDELMIRWFELPNCFIFHNANAWEEEDEVVLITCRLENPDLDMVSGKVKEKLENFGNELYEMRFNMKTGSASQKKLSASAVDFPRINECYTGKKQRYVYGTILDSIAKVTGIIKFDLHAEAETGKRMLEVGGNIKGIYDLGEGRYGSEAIYVPRETAEEDDGYLIFFVHDENTGKSCVTVIDAKTMSAEPVAVVELPHRVPYGFHALFVTEEQLQEQTLI

SEQ ID NO: 1744 - protein, 501 aa, Arabidopsis thaliana
MHDASLPLHYLSGNFAPIRDETPPVKDLPVHGFLPECLNGEFVRVGPNPKFDAVAGYHWFDGDGMIHGVRIKDGKATYVSRYVKTSRLKQEEFFGAAKFMKIGDLKGFFGLLMVNVQQLRTKLKILDNTYGNGTANTALVYHHGKLLALQEADKPYVIKVLEDGDLQTLGIIDYDKRLTHSFTAHPKVDPVTGEMFTFGYSHTPPYLTYRVISKDGIMHDPVPITISEPIMMHDFAITETYAIFMDLPMHFRPKEMVKEKKMIYSFDPTKKARFGVLPRYAKDELMIRWFELPNCFIFHNANAWEEEDEVVLITCRLENPDLDMVSGKVKEKLENFGNELYEMRFNMKTGSASQKKLSASAVDFPRINECYTGKKQRYVYGTILDSIAKVTGIIKFDLHAEAETGKRMLEVGGNIKGIYDLGEGRYGSEAIYVPRETAEEDDGYLIFFVHDENTGKSCVTVIDAKTMSAEPVAVVELPHRVPYGFHALFVTEEQLQEQTLI

SEQ ID NO: 1745 - DNA, 2788 bp, Arabidopsis thaliana
gtctacaaaaattcgtcgaccattgcatttttcagttttgaaactcgaaagagatggagggaaaattcgctatttcagaatcgactaatttgcttcaaaggatcaaagattttactcaatcggtcgttgtagatctggctgaaggaagatctccaaaaatttccatcaatcaattcaggaactattgcatgaatccagaagctgattgcttatgcagctctgataaaccaaagggtcaggaaattttcactcttaagaaggaaccacaaacctacagaatcgatatgttgctaagagtattgttgatagtccaacaacttctgcaagaaaatagacatgcttcgaaaagagatatctactacatgcatccatcagctttcaaagcacaatccattgtggaccgtgcaattggtgatatatgcattctttttcagtgtagtcggtacaacttgaatgtggtttctgttggaaacgggttggtgatgggttggttaaaatttagggaagctggaaggaaatttgattgtttaaacagcttgaacactgcatatcccgttcctgttcttgtagaggaagtcgaagatattgttagcttagctgagtacatactggttgtggaaaaagaaacagtattccagcgtttagcaaatgacatgttttgcaagacgaaccgctgcattgttatcacaggaagaggatatccagatgtctcaacaagaaggttcttgcgactcctgatggagaagttgcatctacctgtgcattgtctagtcgactgtgatccatatggctttgagatcctagccacataccgttttggctccatgcaaatggcctatgatattgaatcattacgagcaccagatatgaaatggttgggagcttttccttcagactctgaggtatatagtgttcccaaacagtgtcttttgccactgacagaagaagataagaaaagaactgaagcaatgttgcttagatgctacctgaagcgtgaaatgccacaatggaggttggaacttgaaacgatgttgaaaagaggggtcaagtttgagatcgaagcactctcagttcactcactgtcctttttgtcagaggtatatattccttctaagattcgtcgtgaagtaagctctccttgagcttcatacgagataactagtctccaactcaaggtaatgctcattgttttttttatgactctttctaagctttttagtgcaaaccaaatgcattggtagaatggacaaatgaacatagttttaatggaaaaatcataaatatacagattataaaaaataattctcagtttttaatttttaataatacaaagtacattcactaatgactaatgagtaataagtttgaaattttgaataatacaaaagtaatttagggttcatttgctttatattgttaccaaacctaatttgaagtattaaagccgttcccctgactaaaaacctttgaacactccgatccaaaaaaaagaagagaaaaacctttgcatacagctaaaaacgatgtcgtctctctctcgctttctccttcgtggcaacttcagcttcagcacccacacgaatcgccgcttcttctccgccgttaccgctgctgcagccacaccctcgccacccaaaccgtccctcatcaccctcgtaaatgacgaacgcgaccccaaattcatcacggagaagttcaagaaagcctgccaagcagagtggttccggaagaatatagccgtctatgagagaaccgttcgccgtctcgctgcagccaagaaatttgagtgggtcgaggagatcctggaggagcagaataagtatccaaacatgtcaaaggaaggattcgtagcgaggattatcaatctctatggacgagtcggtatgtttgagaatgcacagaaagtgttcgacgaaatgcctgagagaaactgcaagagaacagtgttgtctttcaacgcattactgaatgcctgtgtgaactccaagaagtttgatttggttgaaggtatcttcgaggagttgccaggtaagctctcgattgaaccagatgttgcatcttacaatactttgatcaagggattgtgtggaaagggttccttcactgaagctgttgcgttgattgatgagattgagaacaagggtttgaaacctgatcatatcaccttcaataaggagaacagatatgggctagaatggtagagaagaatgttaagcgagacatccgtagttacaatgctcggttgttaggactagccatggagaataaatcagaagagatggttagtctctttgacaaacttaagggtaatgagctcaaacctgatgttttcacattcactgccatgattaaaggatttgtcagtgaaggaaaattagatgaagccataacgtggtacaaggaaatcgagaagaatggttgtcgcccgttgaaatttgtctttaactcattgcttcctgcaatatgtaaggcgggcgatttagagtctgcttatgagctctgcaaggaaatatttgctaagcgtctgctagtcgatgaggctgtcctgcaggaggtagttgatgcattggtgaaagggtccaagcaagacgaagctgaagagattgtcgagctagcaaagacgaatgactatttgcagtgcaagcttcgtctctttcccaaagagtagttaattggcaaggcttattgactagtttttaatttagtctgtgtttccctctttttaatgtcttgttgcaaactgcgagtgcggtgattgaataattgaactatctctatctgtagtgtg

SEQ ID NO: 1746 - protein, 362 aa, Arabidopsis thaliana
MEGKFAISESTNLLQRIKDFTQSVVVDLAEGRSPKISINQFRNYCMNPEADCLCSSDKPKGQEIFTLKKEPQTYRIDMLLRVLLIVQQLLQENRHASKRDIYYMHPSAFKAQSIVDRAIGDICILFQCSRYNLNVVSVGNGLVMGWLKFREAGRKFDCLNSLNTAYPVPVLVEEVEDIVSLAEYILVVEKETVFQRLANDMFCKTNRCIVITGRGYPDVSTRRFLRLLMEKLHLPVHCLVDCDPYGFEILATYRFGSMQMAYDIESLRAPDMKWLGAFPSDSEVYSVPKQCLLPLTEEDKKRTEAMLLRCYLKREMPQWRLELETMLKRGVKFEIEALSVHSLSFLSEVYIPSKIRREVSSP

SEQ ID NO: 1747 - protein, 317 aa, Arabidopsis thaliana
MNPEADCLCSSDKPKGQEIFTLKKEPQTYRIDMLLRVLLIVQQLLQENRHASKRDIYYMHPSAFKAQSIVDRAIGDICILFQCSRYNLNVVSVGNGLVMGWLKFREAGRKFDCLNSLNTAYPVPVLVEEVEDIVSLAEYILVVEKETVFQRLANDMFCKTNRCIVITGRGYPDVSTRRFLRLLMEKLHLPVHCLVDCDPYGFEILATYRFGSMQMAYDIESLRAPDMKWLGAFPSDSEVYSVPKQCLLPLTEEDKKRTEAMLLRCYLKREMPQWRLELETMLKRGVKFEIEALSVHSLSFLSEVYIPSKIRREVSSP

SEQ ID NO: 1748 - protein, 285 aa, Arabidopsis thaliana
MLLRVLLIVQQLLQENRHASKRDIYYMHPSAFKAQSIVDRAIGDICILFQCSRYNLNVVSVGNGLVMGWLKFREAGRKFDCLNSLNTAYPVPVLVEEVEDIVSLAEYILVVEKETVFQRLANDMFCKTNRCIVITGRGYPDVSTRRFLRLLMEKLHLPVHCLVDCDPYGFEILATYRFGSMQMAYDIESLRAPDMKWLGAFPSDSEVYSVPKQCLLPLTEEDKKRTEAMLLRCYLKREMPQWRLELETMLKRGVKFEIEALSVHSLSFLSEVYIPSKIRREVSSP

SEQ ID NO: 1749 - DNA, 1694 bp, Arabidopsis thaliana
atggcttctaatcttctcctcatcgtcctcctcgtactcgtgtccctctctttagcttctggatattctttttccacgagagatgctgtctcaaaacaagacgatgaatcctatattatgactacgagtgatcaagattcttcaatggtcgttcttgaagatgtagtaaaaggtcgtcgtcttctaaccagagtcgttcgctcgggagctgttgtgaataaatcaagttcaaagagctctccaagcaaaaattcgaagaagaaagaaaaagataagaaaataggatcactggctggtgagcttattcatgttattatgtttggaccatgtactcttgtaggtgcgaaaaagaaacttaagagctttaaaataggagcattgactgttggacttggagccttgatcgggatcatcatcgcagcagttgtgggtttcattgtgatcgtcgttgttatatgccttttattagtttgctgtctcaggcacaaagcaaaaaaggctaaaagtactactgctgaaaaacctaatgggacatcgggaaatcagactgctaaagcagatgatcatgttctttcaatgtcatggctgacaaagtcgataccaagttcgtctgggttccgatttccgtcccaagtaggacggttcaagcgcatctacagaaaaacggtttgtactttcaaaagaacgcaacttttatttcgaaagttcgatcctttgggtccatagtattgacgggccactcaaccaactacgagtgctatctttcacccctgagttcactgaaagtgttcctgcttggtttgctgatgagctattgcttgtggagttagtttaaatatctgcaaatgtcaagtcttcttaatatatctcactgtagctatcatggatactcaggactcactagtaggggaggcataaacactgttgaaaaccatagatgggtctggcacaacaacggagtcaggttgtcgtttccaagagccgagtcttctataaacatcactatgggttgtacgcttcagcgtgggatagcaaaaagcttaagtcaggaaaacctagtggagttatctgatgaaaatgatgatctatgtcctgtggagtgtgtcactgagttcaagacagatgatgaattgcttagcgttcttgaaaagtcgaaagaaactaattctttggttgtggttgatttttatcgcactgcatgtgggagttgtaaatacatagagcagggcttctcaaaactgtgcaagcaatctggtgaccaagaagctcctgttatcttccttaagcataatgtggtagatgaatatgatgaacaatctgaagtcgcagaaaggctccgtatcaaggcggttcctctcttccacttctacaaaaacggagttctcttagaatcatttgcaactagagacaaggagaggatcgacgcagctattctcaaatatacatcctcggaatcttgaagaacattcgacaaaaccgcactctttgggttacctttcccaaatcattgaatatgatgtaacttatattgaacaacacagcatcatccttcttcttgtaagatgtcatactgaataagacagatgcaacattttgatctctttcttttgtttgtttgcctttatgtcttcataacccacatacttatagtatatatgtgcaaaatctgcagtgacagcttactagttttggtg

SEQ ID NO: 1750 - protein, 241 aa, Arabidopsis thaliana
MASNLLLIVLLVLVSLSLASGYSFSTRDAVSKQDDESYIMTTSDQDSSMVVLEDVVKGRRLLTRVVRSGAVVNKSSSKSSPSKNSKKKEKDKKIGSLAGELIHVIMFGPCTLVGAKKKLKSFKIGALTVGLGALIGIIIAAVVGFIVIVVVICLLLVCCLRHKAKKAKSTTAEKPNGTSGNQTAKADDHVLSMSWLTKSIPSSSGFRFPSQVGRFKRIYRKTVCTFKRTQLLFRKFDPLGP

SEQ ID NO: 1751 - protein, 204 aa, Arabidopsis thaliana
MSSLLNISHCSYHGYSGLTSRGGINTVENHRWVWHNNGVRLSFPRAESSINITMGCTLQRGIAKSLSQENLVELSDENDDLCPVECVTEFKTDDELLSVLEKSKETNSLVVVDFYRTACGSCKYIEQGFSKLCKQSGDQEAPVIFLKHNVVDEYDEQSEVAERLRIKAVPLFHFYKNGVLLESFATRDKERIDAAILKYTSSES

SEQ ID NO: 1752 - protein, 202 aa, Arabidopsis thaliana
MTTSDQDSSMVVLEDVVKGRRLLTRVVRSGAVVNKSSSKSSPSKNSKKKEKDKKIGSLAGELIHVIMFGPCTLVGAKKKLKSFKIGALTVGLGALIGIIIAAVVGFIVIVVVICLLLVCCLRHKAKKAKSTTAEKPNGTSGNQTAKADDHVLSMSWLTKSIPSSSGFRFPSQVGRFKRIYRKTVCTFKRTQLLFRKFDPLGP

SEQ ID NO: 1753 - DNA, 2421 bp, Arabidopsis thaliana
gatatatcaaaaattccattttctacagagagagagagagagagagagagagagagagggacgaaatattaatcatcgatcaagttgcttcaatcgcgaaaaaatccatgaataaaactatggaatggaatgtgaatcaaaggatttggttatggtgatgacgcgatcttcgattcgattcggtgattaaaagatttggaagctcagatctcaagctcggatttctaatttttgttggattatctaacccaaaagccaaaaaaaaaaaatgaacggtggtgacgatgccgctactagtggtcctcctccgtctttagagtggagattctctcaggtcttcggtgagcgaaccgccggagaagaagttcaggaagttgacatcatttcagccatcgaatttgataaaagtggagaccatctcgcaactggtgaccgtgggggccgagtagttctttttgaaaggacagatactaaagatcatggagggtccaggaaggatcttgagcagacggattacccagttaggcatcctgagtttcgatataaaacagaatttcagagtcatgaaccagagtttgactatctcaagagtttggagatagaggagaaaatcaacaaaatcagatggtgtcagccagctaatggtgcattgtttctgctttctacaaacgataaaaccatcaaatattggaaggtacaagagaagaagatcaagaaaattagtgaaatgaatattgatccgtcagaaagttcaaatatccctcctcaattagttactaatggattacctgctgataaagggcatgactacctgagcaaggacttttctttcccgccaggaggcattccatctctgcgtttgcctgtggtagttaccagccaggagactaaccttgtggctagatgccgaagagtgtatgcccatgctcatgattaccatattaattcaatctccaatagcagtgacggagaaacctttatttcggctgatgatctgcgagtaaatctctggaatttggaaattagcaaccagagtttcaatattgttgatgttaagcccacaaacatggaggacttaactgaggttattacatcagctgagtttcatcctatccattgtaatatgctcgcatatagtagttcaaaaggctccattcgtttgattgatatgcgtcaatcagctctgtgtgattctcatacgaaattatttgaagaaccggaagcacctggttcaagatcatttttcacagagataattgcctcaatttcagatattaaattctcaaaggatgggagatacatacttagtcgcgattacatgacgctcaagctgtgggacataaacatggattctggtccggtcgcatcttaccaggttcatgaacatctgagacccaggctatgcgatctatatgaaaatgactccatctttgataaatttgagtgttgtctgagtggcgatggattgagggtagcaacaggttcttacagcaatctattccgcgtatttggagcgtctcaaggaagtactgaagctgcgactttggaagctagcaaaaacccgatgaggaggcaaatccagacacctgcaagaccatccagatctataggcagtatgacacgcgtggttagacgaggatcagagagtcccggaacagaggcaaatgggaacgcctacgatttcacaacaaagttgctgcatatggcttggcacccaacagagaactcaattgcttgtgcagcagcaaacagcttgtacatgtactatgcatgagttgggaagagagagagaagacataaacatggaatcagcttgctccaatttaactttccctttcttcttttcccgggtctctctctcactctctttctctctttcttttaacaaccaaagtcatgatgtaaccagaaaaggtgtagtagtaacagagtaatgctgtgaccaagaccaaagcctgaccagtcaccgcgacgagtcaacggaagaagcagcaacagtaatctttcaggagttagtaaggtaaaaagtgttgggttgggaaagaaaacaagaagaggccttttgtttacctgaagaagggtaatgtcttaaatatccgaaccacccctcctacttaggttgtcttttttttgggttgctgcactaaggataaattttattttatttttttagtatcgattctattaccttttttttttcaattaagaaacaaattatggtgtgtgggattttttagtatgagacgattgggagggatgtgcttcaaaatttgtttattgattcttttgtcatatcttcttcttcttcttgaacaccacatccattctgtttttttgctatttgtctatttttcaattgtattttcagacacctcttttgtgttttttacttttacccacaataaaaagtagctttctccc

SEQ ID NO: 1754 - protein, 501 aa, Arabidopsis thaliana
MNGGDDAATSGPPPSLEWRFSQVFGERTAGEEVQEVDIISAIEFDKSGDHLATGDRGGRVVLFERTDTKDHGGSRKDLEQTDYPVRHPEFRYKTEFQSHEPEFDYLKSLEIEEKINKIRWCQPANGALFLLSTNDKTIKYWKVQEKKIKKISEMNIDPSESSNIPPQLVTNGLPADKGHDYLSKDFSFPPGGIPSLRLPVVVTSQETNLVARCRRVYAHAHDYHINSISNSSDGETFISADDLRVNLWNLEISNQSFNIVDVKPTNMEDLTEVITSAEFHPIHCNMLAYSSSKGSIRLIDMRQSALCDSHTKLFEEPEAPGSRSFFTEIIASISDIKFSKDGRYILSRDYMTLKLWDINMDSGPVASYQVHEHLRPRLCDLYENDSIFDKFECCLSGDGLRVATGSYSNLFRVFGASQGSTEAATLEASKNPMRRQIQTPARPSRSIGSMTRVVRRGSESPGTEANGNAYDFTTKLLHMAWHPTENSIACAAANSLYMYYA

SEQ ID NO: 1755 - protein, 348 aa, Arabidopsis thaliana
MNIDPSESSNIPPQLVTNGLPADKGHDYLSKDFSFPPGGIPSLRLPVVVTSQETNLVARCRRVYAHAHDYHINSISNSSDGETFISADDLRVNLWNLEISNQSFNIVDVKPTNMEDLTEVITSAEFHPIHCNMLAYSSSKGSIRLIDMRQSALCDSHTKLFEEPEAPGSRSFFTEIIASISDIKFSKDGRYILSRDYMTLKLWDINMDSGPVASYQVHEHLRPRLCDLYENDSIFDKFECCLSGDGLRVATGSYSNLFRVFGASQGSTEAATLEASKNPMRRQIQTPARPSRSIGSMTRVVRRGSESPGTEANGNAYDFTTKLLHMAWHPTENSIACAAANSLYMYYA

SEQ ID NO: 1756 - DNA, 1116 bp, Arabidopsis thaliana
accaccttcgtgtttctctctctattacagaaaaaaagattcaaaaaccctagatttcacaaaatcgattggctgtcaaatttctctccggcgattttcctcgagtgaaattcggctcaaggtgattatagcgatcatcgaatcaaattgattgaagaggtacaaaggttagttactttgagctgaaagatgaacacgtcagaggtgagagtacctcgaggaaatcgacggaggaaagctgtgattgatctgaatgcggtacctgttgatcaagaagggacctctgcttctgttagaactcttacggtgcctattacaccgtctcagcctgctcctacgatgattgatgtcgatgctattgaggatgatgttattgaatcatccgctagtgcttttgctgaagctaaaagcaaatcaagaaatgcacgtcggagacctttgatggttgatgtagagtcaggaggtacgactagattccctgccaacataagcaacaaacgcagaaggattccttctagtgaatctgtcatcgactgtgagcatgcctctgtaaatgatgaagtcaacatgtcttcgagagtgtctagatcaaaggctccagctcctccaccagaagagccaaagtttacatgtccaatctgcatgtgtccctttacggaggagatgtcaaccaagtgcggtcacatcttctgcaagggatgtataaagatggcaatatctcgccagggcaaatgccctacttgtaggaaaaaggttactgcaaaagagctgattcgagttttccttccaaccactagatgagtggtccggcaacatcaccagccaccctgtctaatggtttatcagactatcctcctattcactttggaacattgaagggacttcgttgacttggtatttttgaatattttgctttgttggaagagaaatattcagtgatcaagaagccagaaggccctatcattcgatggatatcattggtaataactctttgtttttagttgttgttctatgtaatttaggtctctgcaaacctctcagtcgatactcttctctcttgatagatgataagatatatggaaaaaaaatttaatattgaatctttactaaaattct

SEQ ID NO: 1757 - protein, 203 aa, Arabidopsis thaliana
MNTSEVRVPRGNRRRKAVIDLNAVPVDQEGTSASVRTLTVPITPSQPAPTMIDVDAIEDDVIESSASAFAEAKSKSRNARRRPLMVDVESGGTTRFPANISNKRRRIPSSESVIDCEHASVNDEVNMSSRVSRSKAPAPPPEEPKFTCPICMCPFTEEMSTKCGHIFCKGCIKMAISRQGKCPTCRKKVTAKELIRVFLPTTR

SEQ ID NO: 1758 - protein, 153 aa, Arabidopsis thaliana
MIDVDAIEDDVIESSASAFAEAKSKSRNARRRPLMVDVESGGTTRFPANISNKRRRIPSSESVIDCEHASVNDEVNMSSRVSRSKAPAPPPEEPKFTCPICMCPFTEEMSTKCGHIFCKGCIKMAISRQGKCPTCRKKVTAKELIRVFLPTTR

SEQ ID NO: 1759 - protein, 119 aa, Arabidopsis thaliana
MVDVESGGTTRFPANISNKRRRIPSSESVIDCEHASVNDEVNMSSRVSRSKAPAPPPEEPKFTCPICMCPFTEEMSTKCGHIFCKGCIKMAISRQGKCPTCRKKVTAKELIRVFLPTTR

SEQ ID NO: 1760 - DNA, 1755 bp, Arabidopsis thaliana
gtcgcgattactctctttgagctctctctctctcttctaacatcggtcttgtattggtgcttattggatatctccggcgaaggaaacgagtttcgcggttagatttttctttatcgcttaccggcgaggatgatcgtttcttcggtaaggtcgattaatcggttctgttttcgaagatgttgttgttagagttagatccgcatggttttggtgatcgttttggatcgaagacgtggttccacagacgcaaaaaatgccgtcgtctcttgctttgagatttggcttctgaaatctttcctctttcgttctcgttgaatcctaatttttgttttgtcttttttagaaatttttggtctttctaatcctggggataggttacagtctccgattgtaaatagaaatttgcggcgaggttaggaaaagttgtacagatagagattgagctctgaaacacatctcaggaacattttttgttccttgtttaaaaaagtttttttttttgtgtgtgtttctctgggttggttagaaagtggcgaagatgaatttgggtgcggccgaggaagaatcggctcaggagattcatttaccagctgatatcaattgggagatgcttgataaatccaagtttttcgttttaggcgctgctttgttttcaggggtatctggagctctttatcctgcggttttgatgaaaactcggcaacaagtgtgtcattcgcaaggttcttgtattaaaactgcgtttactcttgtgagacatgaaggtttaaggggattgtacagaggatttggaacttctttgatgggaactatccctgctcgtgctttgtacatgactgccttggaggttactaagagtaacgtaggctctgctgctgtcagcttggggttgacagaggctaaagctgctgctgttgctaatgcggttggaggtttgagtgctgcgatggctgcacagcttgtttggactcctgttgatgtggttagccaaaggcttatggttcaaggaagtgctggtcttgttaatgcatcaaggtgtaattatgttaacgggtttgatgcatttagaaagatcgttcgcgctgatggaccgaaggggttatacagagggtttgggatatcgattctgacttatgcgccgtctaatgctgtttggtgggcgtcttactctgttgcacagcggatggtttggggtggaattgggtgttatgtctgtaagaaagacgaagaaagcgggaacaatagtaccacgatgaaaccagattctaaaacgataatggctgttcaaggagttagtgctgcgattgctggaagtgtttctgctttgattacaatgccactcgacacaatcaagacgagattgcaggttcttgatggggaagatagtagtaacaacgggaagcgtggaccgagtattggacagactgtaagaaacttggttagagaaggtggatggacggcttgttatagaggattgggaccaagatgtgcttcaatgtcaatgtctgcaacaactatgatcactacctacgagttcttgaaacggctttctgctaagaaccatgacgggttttattctaaatcatagtgataacaactgggaatccacatagaagaatcttttatggaaatgtctctagttttcttacttatcttgttctttatctagctcttctgctatttcatttgtttccagtcatatgtaaggaatgtgttaaattcagttgtttttaaataaataaatgttctttccac

SEQ ID NO: 1761 - protein, 349 aa, Arabidopsis thaliana
MNLGAAEEESAQEIHLPADINWEMLDKSKFFVLGAALFSGVSGALYPAVLMKTRQQVCHSQGSCIKTAFTLVRHEGLRGLYRGFGTSLMGTIPARALYMTALEVTKSNVGSAAVSLGLTEAKAAAVANAVGGLSAAMAAQLVWTPVDVVSQRLMVQGSAGLVNASRCNYVNGFDAFRKIVRADGPKGLYRGFGISILTYAPSNAVWWASYSVAQRMVWGGIGCYVCKKDEESGNNSTTMKPDSKTIMAVQGVSAAIAGSVSALITMPLDTIKTRLQVLDGEDSSNNGKRGPSIGQTVRNLVREGGWTACYRGLGPRCASMSMSATTMITTYEFLKRLSAKNHDGFYSKS

SEQ ID NO: 1762 - protein, 326 aa, Arabidopsis thaliana
MLDKSKFFVLGAALFSGVSGALYPAVLMKTRQQVCHSQGSCIKTAFTLVRHEGLRGLYRGFGTSLMGTIPARALYMTALEVTKSNVGSAAVSLGLTEAKAAAVANAVGGLSAAMAAQLVWTPVDVVSQRLMVQGSAGLVNASRCNYVNGFDAFRKIVRADGPKGLYRGFGISILTYAPSNAVWWASYSVAQRMVWGGIGCYVCKKDEESGNNSTTMKPDSKTIMAVQGVSAAIAGSVSALITMPLDTIKTRLQVLDGEDSSNNGKRGPSIGQTVRNLVREGGWTACYRGLGPRCASMSMSATTMITTYEFLKRLSAKNHDGFYSKS

SEQ ID NO: 1763 - protein, 299 aa, Arabidopsis thaliana
MKTRQQVCHSQGSCIKTAFTLVRHEGLRGLYRGFGTSLMGTIPARALYMTALEVTKSNVGSAAVSLGLTEAKAAAVANAVGGLSAAMAAQLVWTPVDVVSQRLMVQGSAGLVNASRCNYVNGFDAFRKIVRADGPKGLYRGFGISILTYAPSNAVWWASYSVAQRMVWGGIGCYVCKKDEESGNNSTTMKPDSKTIMAVQGVSAAIAGSVSALITMPLDTIKTRLQVLDGEDSSNNGKRGPSIGQTVRNLVREGGWTACYRGLGPRCASMSMSATTMITTYEFLKRLSAKNHDGFYSKS

SEQ ID NO: 1764 - DNA, 1066 bp, Arabidopsis thaliana
aagactctgttttttcccaagatgtctggtttcctcttttgtttcgtccaaatctctactttttagggatcttgtccttctcttttctgctgattaaaaccctcgaatttgctccaattcgacgcgaaaaagggcattgagatggtgaatggagaatcatcaactagtacgtcttactctgatagtaacaatgacacaaatgatcaaggaggagactttgaatgtaacatttgtttcgaactagctcaagatccgattgtcactctctgtggccatctcttttgctggccttgcttataccgttggcttcaccaccattcacattctcaagaatgtccggtttgtaaagccgtggttcaagacgataagcttgttcctctttacggtagaggcaagaaccagactgacccgagatcaaaacgttatccgggtttacggattcctaaccgaccaacaggtcaaagacctgagactgctgctcctcctcctcagcctgaagctgcgagtaattttttcaactacggtattggtttgatgggtggaattatgccgatgatggcgactacgaggtttgggaatttcagtatggggtttggtggtttgttaccttctttgtttaactttcagtttcatggatttcatgatgctacgctttatggttcaacaccgggttatccttacggtggttatcataacggtttccgtggagttcctcctcgtggacaagagcgtcctatggctcgtggaggaaaccaaagtgatgcatttctgaagaatatcctcttttttgttggaatctgtgtggtgatatttctcatctggtgaaaacgaatcacatttggtgtatttccaggtatgatcaaacttacttacttggtgcaagttgtgtatgtaaatatggtaatagctgagtgtacttgtctgctatttcgacgttgttattgtatttttgttttgaagatgaaccgtgagtctacaagcttttttacacaactcttttgttgcttttgtgttttgtctaagcatcttatgaaaactagttgtgaaataaatggtgcgtgttatg

SEQ ID NO: 1765 - protein, 227 aa, Arabidopsis thaliana
MVNGESSTSTSYSDSNNDTNDQGGDFECNICFELAQDPIVTLCGHLFCWPCLYRWLHHHSHSQECPVCKAVVQDDKLVPLYGRGKNQTDPRSKRYPGLRIPNRPTGQRPETAAPPPQPEAASNFFNYGIGLMGGIMPMMATTRFGNFSMGFGGLLPSLFNFQFHGFHDATLYGSTPGYPYGGYHNGFRGVPPRGQERPMARGGNQSDAFLKNILFFVGICVVIFLIW

SEQ ID NO: 1766 - DNA, 1145 bp, Arabidopsis thaliana
aagctgagctgaccccgtcgagaattggtttcctcttttcctcgctccgaagacaagaaatattccggtgaggcaatggcgtcgaacagcagagaagccaggaggcggaagatcctagatagaggatctgatcgtttagcctttatcactggtcagatcaacggcgttccttctccacctccttccgattctacttcttccctttcccagtctgaccttcaaactgaccaatccttaccggatacgattccccctcgcgatcagattcttaaagctcaagaaatcgctttcacaagtcaccaggacaacatctctgatgctgcaatgcttgagaatgtggatcatatcatccatcaaagcagggaagaacctcttcagcctcagaggcatgctgaaacattggcagaagcctctgcttcagatcctagagacacaacaacaatacaaccgcctcctacaacatcaagtgttcaaaacccatcagtggtagatttaggtgcttctcaagcatttattcctgtggttagttttgtgaacgccatcacaccaaagcacattggagcggccattgatgcttcggaatacgcacggatgttcacagctcttgcgattgcacttgttgtcatactatctcatctcggtttctcttccctaggcaacattgtaagcttcaggccagttttcttgcttgtcttgactgatgccacaattgtgcttggacgtgttctgctgagtcatcgtggagactcttcctcggcctcagggacggtgacgagcgggcagggtattgtggaccaagtaggcaacgctttggagacggtgatgatggtgaagataatggatgcacttcttatggattttagcttatacgctgtgattctcatatgtggcctcttggtcacccaaagcatctttccttaggtcaccttttaaattaggtttctttgtgctcggtagatttgtgttttgcttatggtttgaatatcttaaaattatagttagttccaaaacataattacatgtttcagatatctttctctttccttttcttttgcgtgagaagatcaatatttattggtgtttggtagtttggaagaataaatttaaaggttctcctccaattttttttaaagttatcattgcac

SEQ ID NO: 1767 - protein, 281 aa, Arabidopsis thaliana
MASNSREARRRKILDRGSDRLAFITGQINGVPSPPPSDSTSSLSQSDLQTDQSLPDTIPPRDQILKAQEIAFTSHQDNISDAAMLENVDHIIHQSREEPLQPQRHAETLAEASASDPRDTTTIQPPPTTSSVQNPSVVDLGASQAFIPVVSFVNAITPKHIGAAIDASEYARMFTALAIALVVILSHLGFSSLGNIVSFRPVFLLVLTDATIVLGRVLLSHRGDSSSASGTVTSGQGIVDQVGNALETVMMVKIMDALLMDFSLYAVILICGLLVTQSIFP

SEQ ID NO: 1768 - protein, 198 aa, Arabidopsis thaliana
MLENVDHIIHQSREEPLQPQRHAETLAEASASDPRDTTTIQPPPTTSSVQNPSVVDLGASQAFIPVVSFVNAITPKHIGAAIDASEYARMFTALAIALVVILSHLGFSSLGNIVSFRPVFLLVLTDATIVLGRVLLSHRGDSSSASGTVTSGQGIVDQVGNALETVMMVKIMDALLMDFSLYAVILICGLLVTQSIFP

SEQ ID NO: 1769 - DNA, 1127 bp, Arabidopsis thaliana
atattttcattgattttgcatattaatgcatatgttttcataaaaaaagaaaaacgagtgtaaagttattgatagtttctgttacttattaatttttaaggttatgtgtattattaccaattggaggactatatagtcgcaagtctcaaccctataaaagaaaacattcttcgatcatcttcccgcctcgagtatctctctctctctctctcttctctgttttctttattgattgcatagacaaaaatacacacatacacaacagaaagaaagatggagacgacgatgaagaagaaagggagagtgaaagcgacaataacgtcacagaaagaagaagaaggaacagtgagaaaaggaccatggactatggaagaagatttcatcctctttaattacatccttaatcatggtgaaggtctttggaactctgtcgccaaagcctctggtctaaaacgtactggaaaaagttgtcggctccggtggctgaactatctccgaccagatgtgcggcgagggaacataaccgaagaagaacagcttttgatcattcagcttcatgctaagcttggaaacaggtggtcgaagattgcgaagcatcttccgggaagaacggacaacgagataaagaacttctggaggacaaagattcagagacacatgaaagtgtcatcggaaaatatgatgaatcatcaacatcattgttcgggaaactcacagagctcggggatgacgacgcaaggcagctccggcaaagccatagacacggctgagagcttctctcaggcgaagacgacgacgtttaatgtggtggaacaacagtcaaacgagaattactggaacgttgaagatctgtggcccgtccacttgcttaatggtgaccaccatgtgatttaagatatatatatagacctcctatacatttatatgccccagctgggtttttttgtatggtacgttatttggtttttctattgctgaaatgtcgttgcatttaatttacatacgaaaagtgcattaaatcattaaatcttcaatacatatggaggtggtgtttgagtaacttctggtcgttaaagcatatatactactgtactctttttttttctttcaaattgttgttgtttttg

SEQ ID NO: 1770 - protein, 206 aa, Arabidopsis thaliana
METTMKKKGRVKATITSQKEEEGTVRKGPWTMEEDFILFNYILNHGEGLWNSVAKASGLKRTGKSCRLRWLNYLRPDVRRGNITEEEQLLIIQLHAKLGNRWSKIAKHLPGRTDNEIKNFWRTKIQRHMKVSSENMMNHQHHCSGNSQSSGMTTQGSSGKAIDTAESFSQAKTTTFNVVEQQSNENYWNVEDLWPVHLLNGDHHVI

SEQ ID NO: 1771 - protein, 202 aa, Arabidopsis thaliana
MKKKGRVKATITSQKEEEGTVRKGPWTMEEDFILFNYILNHGEGLWNSVAKASGLKRTGKSCRLRWLNYLRPDVRRGNITEEEQLLIIQLHAKLGNRWSKIAKHLPGRTDNEIKNFWRTKIQRHMKVSSENMMNHQHHCSGNSQSSGMTTQGSSGKAIDTAESFSQAKTTTFNVVEQQSNENYWNVEDLWPVHLLNGDHHVI

SEQ ID NO: 1772 - protein, 175 aa, Arabidopsis thaliana
MEEDFILFNYILNHGEGLWNSVAKASGLKRTGKSCRLRWLNYLRPDVRRGNITEEEQLLIIQLHAKLGNRWSKIAKHLPGRTDNEIKNFWRTKIQRHMKVSSENMMNHQHHCSGNSQSSGMTTQGSSGKAIDTAESFSQAKTTTFNVVEQQSNENYWNVEDLWPVHLLNGDHHVI

SEQ ID NO: 1773 - DNA, 1110 bp, Arabidopsis thaliana
acttcacttttgttctttgtcgcttcaattcaacgcttattcctaaattcgattttgcgttgtcaaattccttaaatttcgttacaaaggtttgatatttccgatgagatctccagcaaagacgatgccgtcgatgtcaccttcttcagtttccacggagaaatctccacctccgtcagatacttcaatggctatagtagctttcgataactccactactcacttctcttcttctccatcgccgccacattctcttgatcattccagtgaatcggagaaggaagatgcgaaaagtaaacccgagagtagaagaaacaagaatcctggaaaggttgaggaaactccatctccgattgtggtggttcataatcacaatcgctctgtgaaagaagtggttccgacgagaaagagtgcgagagttggttctgggagaagtagtggccaacgatctggagctgtttcggctattttgagaaggtctaggagagaagaggtggtaaagttttcagctttagggtttcggttgagtgaggttgtgttggctttgatatctttctcaattatggctgctgataaaactaaaggttggagtggtgattctttcgatcgttacaaggagtacaggttttgcctgtctgtgaacgtggttgcttttgtatattctagttttcaagcatgtgacttagcgtaccatcttgtcaaagagaagcatttgatcagccaccaccttcgacctctgtttgagttcattatagatcaggtacttgcatatctgcttatgtctgcctcaacagcagcagtcactcgcgttgatgattgggtttcaaactggggaaaagacgagttcacagagatggcaagtgcctcgattgctatgtccttcctggccttccttgcctttgctttcagttccctcatttcaggctataacctatttaaccaaggctctctctgatcctcccacctttttgtataggtccacactccttgtgtgatgtataataaaaatgatcaatatatcttagcattgtaattattatactatttttgtagcctatataaaggtttccaaaaactatgaggttaataagagaggcatatcctgttgtc

SEQ ID NO: 1774 - protein, 283 aa, Arabidopsis thaliana
MRSPAKTMPSMSPSSVSTEKSPPPSDTSMAIVAFDNSTTHFSSSPSPPHSLDHSSESEKEDAKSKPESRRNKNPGKVEETPSPIVVVHNHNRSVKEVVPTRKSARVGSGRSSGQRSGAVSAILRRSRREEVVKFSALGFRLSEVVLALISFSIMAADKTKGWSGDSFDRYKEYRFCLSVNVVAFVYSSFQACDLAYHLVKEKHLISHHLRPLFEFIIDQVLAYLLMSASTAAVTRVDDWVSNWGKDEFTEMASASIAMSFLAFLAFAFSSLISGYNLFNQGSL

SEQ ID NO: 1775 - protein, 276 aa, Arabidopsis thaliana
MPSMSPSSVSTEKSPPPSDTSMAIVAFDNSTTHFSSSPSPPHSLDHSSESEKEDAKSKPESRRNKNPGKVEETPSPIVVVHNHNRSVKEVVPTRKSARVGSGRSSGQRSGAVSAILRRSRREEVVKFSALGFRLSEVVLALISFSIMAADKTKGWSGDSFDRYKEYRFCLSVNVVAFVYSSFQACDLAYHLVKEKHLISHHLRPLFEFIIDQVLAYLLMSASTAAVTRVDDWVSNWGKDEFTEMASASIAMSFLAFLAFAFSSLISGYNLFNQGSL

SEQ ID NO: 1776 - protein, 273 aa, Arabidopsis thaliana
MSPSSVSTEKSPPPSDTSMAIVAFDNSTTHFSSSPSPPHSLDHSSESEKEDAKSKPESRRNKNPGKVEETPSPIVVVHNHNRSVKEVVPTRKSARVGSGRSSGQRSGAVSAILRRSRREEVVKFSALGFRLSEVVLALISFSIMAADKTKGWSGDSFDRYKEYRFCLSVNVVAFVYSSFQACDLAYHLVKEKHLISHHLRPLFEFIIDQVLAYLLMSASTAAVTRVDDWVSNWGKDEFTEMASASIAMSFLAFLAFAFSSLISGYNLFNQGSL

SEQ ID NO: 1777 - DNA, 1449 bp, Arabidopsis thaliana
tgatctacacacaccgatctccctctccctctccctctccctctttatctttctcttcctcctttgctaataaacttttctttgaaccttacacgccttgttgatattactctcttaaatatatattttcgtacattaacacagacatatataaagctaaagatttcttcacgtaatgggtttgaaagatattgggtccaaattgccaccggggtttcgatttcatccaagtgatgaagagttggtttgtcattatctttgcaacaagattagggccaaatctgatcatggtgatgttgatgatgatgatgatgatgttgatgaagctttgaagggttctactgatcttgtggagattgacttgcatatctgtgagccatgggagcttcctgatgtggcaaagttaaacgcaaaggaatggtacttcttcagtttccgtgatcgaaagtatgctactggatatcgcacgaacagagcgacagtaagcggatactggaaagcaacaggaaaagatcgaacggtgatggatccacgtacaaggcaattggtagggatgagaaaaacactagtgttctacagaaacagagcaccaaatgggatcaaaactacttggatcatgcacgagttccgtcttgagtgtcctaacatcccacctaaggaagactgggtcttgtgcagagtgttcaacaaaggcagagactcatcgctacaagacaataattattataacaatgataatcagacgcaaaggcttgaagttaatgacgctccggatcttaattacaacaatcagttgccacctttgctatcatcccctcctcataatcatcaacatgagaagatgaaaatccaagtttgtgatcagtgggagcagctaatgaagcagccttcaaggaccaccggccacccctatcatcaccattgtcatcatcaaaccatagcatgtggttgggagcagatgatgatcggttcgctgtcatcaccttcgagtcatggccctgatcacgagtccttgctaaatttgctttacgtcgacaataacaacagtgtcaacatcagtggtgatcatcatcagaattatgagaagattttgttgtcatcactagacatgacgagtttggatcacgacaagacatgtatgggatcatcatcggatggtggtatggtctctgatcttcacatggaatgtggtggattgagttttgagaccgaaaatatcctcgctttccaatgaacataattcaaggggttcgccaatttgttgattcgtgaattatacaaacattttatctatagatttatcacattatcaaacatgtaagttgtgtggcatttgggtatagggtttgtgtgattctaggtttttaggacgatgtatgttgttatatttagcgtgtttttaggatttattctcattttaaaattatatgaaaacccattactatgaat

SEQ ID NO: 1778 - protein, 352 aa, Arabidopsis thaliana
MGLKDIGSKLPPGFRFHPSDEELVCHYLCNKIRAKSDHGDVDDDDDDVDEALKGSTDLVEIDLHICEPWELPDVAKLNAKEWYFFSFRDRKYATGYRTNRATVSGYWKATGKDRTVMDPRTRQLVGMRKTLVFYRNRAPNGIKTTWIMHEFRLECPNIPPKEDWVLCRVFNKGRDSSLQDNNYYNNDNQTQRLEVNDAPDLNYNNQLPPLLSSPPHNHQHEKMKIQVCDQWEQLMKQPSRTTGHPYHHHCHHQTIACGWEQMMIGSLSSPSSHGPDHESLLNLLYVDNNNSVNISGDHHQNYEKILLSSLDMTSLDHDKTCMGSSSDGGMVSDLHMECGGLSFETENILAFQ

SEQ ID NO: 1779 - protein, 236 aa, Arabidopsis thaliana
MDPRTRQLVGMRKTLVFYRNRAPNGIKTTWIMHEFRLECPNIPPKEDWVLCRVFNKGRDSSLQDNNYYNNDNQTQRLEVNDAPDLNYNNQLPPLLSSPPHNHQHEKMKIQVCDQWEQLMKQPSRTTGHPYHHHCHHQTIACGWEQMMIGSLSSPSSHGPDHESLLNLLYVDNNNSVNISGDHHQNYEKILLSSLDMTSLDHDKTCMGSSSDGGMVSDLHMECGGLSFETENILAFQ

SEQ ID NO: 1780 - protein, 226 aa, Arabidopsis thaliana
MRKTLVFYRNRAPNGIKTTWIMHEFRLECPNIPPKEDWVLCRVFNKGRDSSLQDNNYYNNDNQTQRLEVNDAPDLNYNNQLPPLLSSPPHNHQHEKMKIQVCDQWEQLMKQPSRTTGHPYHHHCHHQTIACGWEQMMIGSLSSPSSHGPDHESLLNLLYVDNNNSVNISGDHHQNYEKILLSSLDMTSLDHDKTCMGSSSDGGMVSDLHMECGGLSFETENILAFQ

SEQ ID NO: 1781 - DNA, 1242 bp, Arabidopsis thaliana
aattgaacctaaagttgaagactttggacggatttagaaagaaagacccaaaaagatgctgaagagcgaggcatctctctcgatttactgcgactctggagatgggttcaaatccgaagatccggtgactggaatcgaggagaatttggagagaacggttacgattggtgatgctattgacggcggcgagttcagttttgcgaaacacaaggaagaagatagtggtgaaggtgagagaggtgtttttgaagaggttattaagaagcttgggattggtgtgagagatgaactaggttttgagattgaaagaccaccaagccctcctatgcatttagctgcagggttaggaattgataagtttgatttgtatggtagtgagatcaaattcgatttgccgggttacgatgataagaattgtggtgattactacaaaggaatgctcgaggagtatccattgcatcctttgcttctcaaaaactatgccaagttcttggagtataaaggagatcttagtggagcagaagagtattatcataagtgtactgtagttgagcctagtgatggagtagctttagcaaactatggtagattagtaatgaagcttcaccaagatgaagctaaagccatgagctactttgaacgtgcagttcaagcatctcctgatgatagcattgttcttgcagcatatgctagtttcctctgggagataaacgcggatgatgatgatgaggatgatgatgaggatgatgatgagtcttctggacaaggaaaagacgaatttgaggctgatgcagcgggaaaaggcaaatcaagcttgtccaagacagaagatggagaaacgctatgcagatacgcgaaggcgttctggagtattaataatgaccatgagaaggccttgttctactttgagaaggccgttgaagcctctccaaatgatagcattattcttggagagtacgctcggttcttatgggaaatagatgaatgaccatcaagaagagaagaagatgtctatagctgaggtaaaaaatataagattcaatagctctcttcttcatgaaacaaaggtcttgttgtattagctttaaagcttcatgcatgtccgttatgtgttgtatattcagaaatgccagaatctcgtttttgttttttacgtttcttgcataataatccttaattttccaactatgtaatataaatgcttattgattcactcggacccaagttatctcacagagttat

SEQ ID NO: 1782 - protein, 310 aa, Arabidopsis thaliana
MLKSEASLSIYCDSGDGFKSEDPVTGIEENLERTVTIGDAIDGGEFSFAKHKEEDSGEGERGVFEEVIKKLGIGVRDELGFEIERPPSPPMHLAAGLGIDKFDLYGSEIKFDLPGYDDKNCGDYYKGMLEEYPLHPLLLKNYAKFLEYKGDLSGAEEYYHKCTVVEPSDGVALANYGRLVMKLHQDEAKAMSYFERAVQASPDDSIVLAAYASFLWEINADDDDEDDDEDDDESSGQGKDEFEADAAGKGKSSLSKTEDGETLCRYAKAFWSINNDHEKALFYFEKAVEASPNDSIILGEYARFLWEIDE

SEQ ID NO: 1783 - protein, 220 aa, Arabidopsis thaliana
MHLAAGLGIDKFDLYGSEIKFDLPGYDDKNCGDYYKGMLEEYPLHPLLLKNYAKFLEYKGDLSGAEEYYHKCTVVEPSDGVALANYGRLVMKLHQDEAKAMSYFERAVQASPDDSIVLAAYASFLWEINADDDDEDDDEDDDESSGQGKDEFEADAAGKGKSSLSKTEDGETLCRYAKAFWSINNDHEKALFYFEKAVEASPNDSIILGEYARFLWEIDE

SEQ ID NO: 1784 - protein, 183 aa, Arabidopsis thaliana
MLEEYPLHPLLLKNYAKFLEYKGDLSGAEEYYHKCTVVEPSDGVALANYGRLVMKLHQDEAKAMSYFERAVQASPDDSIVLAAYASFLWEINADDDDEDDDEDDDESSGQGKDEFEADAAGKGKSSLSKTEDGETLCRYAKAFWSINNDHEKALFYFEKAVEASPNDSIILGEYARFLWEIDE

SEQ ID NO: 1785 - DNA, 997 bp, Arabidopsis thaliana
ctacagatatagatataacagccttcaatcttccatatctctctctctctctctctctgctcggcgagaataatcagacatcaaaagcagcatcatgaagttcaagttccagtacgaggaggaatacatcaaaaactcgagagacgttgagttattcgcttgcagatggcttccttcttcttctccccgagctctagtcttcctctgccatggttatggaatggagtgcagtagcttcatgagagaatgcggaatacggctggcatcagcgggatatgcagtgtttgggatggactacgaggggcatggtcggtccaagggtgctcgttgctatatcaaaaaattcagtaatatagtaaatgactgctttgactattacacatccatctctgcaaaagaagaatacaaagagaaaggtagatttttgtatggagaatcaatgggaggtgcagttgctttgttgcttcacaagaaagatccttctttttggaacggggctcttctcgttgctcccatgtgtaagatatcagagaaggtgaaaccacacccagtagtcataaatctactaacgagagttgaagatattataccaaaatggaagatagttcctacaaaagatgttatcgatgctgccttcaaggatccggtcaagcgcgaagagataaggaacaacaagctgatatatcaagacaagccaagacttaaaaccgcacttgaaatgcttagaacgagcatggaccttgaagacactctccacgagatcacattgcctttctttgtccttcacggtgaagcagacattgtgactgatccagagataagcaaagccttgttcgagaaggcaagcacacgcgataaaaccattagactttacccaggaatgtggcatggattaacttctagtgagcctgatgctaacgttgacctcgtttttgctgacattgtcaattggcttgatgctcgtaccggagactccgcttctctggcagtcacgccc

SEQ ID NO: 1786 - protein, 301 aa, Arabidopsis thaliana
MKFKFQYEEEYIKNSRDVELFACRWLPSSSPRALVFLCHGYGMECSSFMRECGIRLASAGYAVFGMDYEGHGRSKGARCYIKKFSNIVNDCFDYYTSISAKEEYKEKGRFLYGESMGGAVALLLHKKDPSFWNGALLVAPMCKISEKVKPHPVVINLLTRVEDIIPKWKIVPTKDVIDAAFKDPVKREEIRNNKLIYQDKPRLKTALEMLRTSMDLEDTLHEITLPFFVLHGEADIVTDPEISKALFEKASTRDKTIRLYPGMWHGLTSSEPDANVDLVFADIVNWLDARTGDSASLAVTP

SEQ ID NO: 1787 - protein, 259 aa, Arabidopsis thaliana
MECSSFMRECGIRLASAGYAVFGMDYEGHGRSKGARCYIKKFSNIVNDCFDYYTSISAKEEYKEKGRFLYGESMGGAVALLLHKKDPSFWNGALLVAPMCKISEKVKPHPVVINLLTRVEDIIPKWKIVPTKDVIDAAFKDPVKREEIRNNKLIYQDKPRLKTALEMLRTSMDLEDTLHEITLPFFVLHGEADIVTDPEISKALFEKASTRDKTIRLYPGMWHGLTSSEPDANVDLVFADIVNWLDARTGDSASLAVTP

SEQ ID NO: 1788 - protein, 253 aa, Arabidopsis thaliana
MRECGIRLASAGYAVFGMDYEGHGRSKGARCYIKKFSNIVNDCFDYYTSISAKEEYKEKGRFLYGESMGGAVALLLHKKDPSFWNGALLVAPMCKISEKVKPHPVVINLLTRVEDIIPKWKIVPTKDVIDAAFKDPVKREEIRNNKLIYQDKPRLKTALEMLRTSMDLEDTLHEITLPFFVLHGEADIVTDPEISKALFEKASTRDKTIRLYPGMWHGLTSSEPDANVDLVFADIVNWLDARTGDSASLAVTP

SEQ ID NO: 1789 - DNA, 1046 bp, Arabidopsis thaliana
tgaacgcaggcagagattcttcgaacttgatatttgggaaacttgcaatccgattctgtcaccagtgttttgccttcataaatggagtttgttgttgaagaaggaaagctagtgaatgaagattgctcgactttagttctcccagcattgtcaattgggaatgtaggacagctcgctgttgatcttctagtgtcatctactggtgcagagagagttggttatcttgatgatccaaatctgcttccttgtgttggaaatgatgcttatggccctcttccttgtggcgagatcgcccttcctctcgaggtttatgagtcatcttcaattgctactacccttgctcagcaacggtctccagttgcaaagggaatgatgattaaatttgcggagaatatagccaattttgctgcttcaagtggaaagaagcacatcattgtgttatcgagtttagacttccaaaggctgcataacttggatatgtcgagaggcccacaggtgtattatctgtctaacgctgaatctgatggaagagatggtcactgtgaaaggcttgggtttggaagattgcacgagtatgattcagaaggaagatgttggaagtaccttagctctgtctttgaaaagaacagtgtagaagagctggcgttgccttcagaagatgaacttgaagacatggactactatccaagcttgccatttgcagctcttttctcagcttttaaggcaagaggcttgaagatgacatgcctgctatgttactgttctgaaggagacaacattcctgaagcatttcttctagctgaggcttcatctaagcttatgggtctgactcctgacaagttccatggggaagaaggtgggaaatgggagataccgtattcatggaagagtatgtatggagctcctccggatatgtctatgttttaagactgttgttggagctcacagtgtcagacaccgaggttgttgtagtggtacaattatgatccaatgagaagtttatgaacatttgagatggtttaatccgatagagacaccttttcttt

SEQ ID NO: 1790 - protein, 281 aa, Arabidopsis thaliana
MEFVVEEGKLVNEDCSTLVLPALSIGNVGQLAVDLLVSSTGAERVGYLDDPNLLPCVGNDAYGPLPCGEIALPLEVYESSSIATTLAQQRSPVAKGMMIKFAENIANFAASSGKKHIIVLSSLDFQRLHNLDMSRGPQVYYLSNAESDGRDGHCERLGFGRLHEYDSEGRCWKYLSSVFEKNSVEELALPSEDELEDMDYYPSLPFAALFSAFKARGLKMTCLLCYCSEGDNIPEAFLLAEASSKLMGLTPDKFHGEEGGKWEIPYSWKSMYGAPPDMSMF

SEQ ID NO: 1791 - protein, 185 aa, Arabidopsis thaliana
MMIKFAENIANFAASSGKKHIIVLSSLDFQRLHNLDMSRGPQVYYLSNAESDGRDGHCERLGFGRLHEYDSEGRCWKYLSSVFEKNSVEELALPSEDELEDMDYYPSLPFAALFSAFKARGLKMTCLLCYCSEGDNIPEAFLLAEASSKLMGLTPDKFHGEEGGKWEIPYSWKSMYGAPPDMSMF

SEQ ID NO: 1792 - protein, 184 aa, Arabidopsis thaliana
MIKFAENIANFAASSGKKHIIVLSSLDFQRLHNLDMSRGPQVYYLSNAESDGRDGHCERLGFGRLHEYDSEGRCWKYLSSVFEKNSVEELALPSEDELEDMDYYPSLPFAALFSAFKARGLKMTCLLCYCSEGDNIPEAFLLAEASSKLMGLTPDKFHGEEGGKWEIPYSWKSMYGAPPDMSMF

SEQ ID NO: 1793 - DNA, 1103 bp, Arabidopsis thaliana
gactcttgtaatagtataaaattttattgaataattcatctgtagacaagggggaaaagaaagactgattttacgctttattgctctcactaaaaccctaattctctccgtctcgatcgcgacctctgtttcttcggcaatggcggattctcctcaaagaagaagggattcacgatctccttcaccccgaaaagaacgagctagatccagatccaggtctaggtccaggtctagatccaggcccaggcttaggtccaggtcaagatctttgccaaggcctgtttctccatcacgaagccgtggaaggtcaaggtcaagaagccgtggaagaagtgaagttgaaaaccctggtaccactctctatgtgactggcctatctacaagagtcactgacaaggatcttgaagcacatttcgccaaggaaggaaaggttgcgtcttgttttcttgtgatggagccgcgcacccgtgtgtctcgtggttttgcctttgttacaatgagcagccttaaagatgctgagcggtgcattaaatatctcaaccagtctgtactagaaggccgatacataactgtggaaaggtccaggagaaagcgcccgagaactcccaccccaggccactatcttggcttgaaaagctccagagacagcgatcgagaaggccgtagcagtcgagggaggcactatgatcgtgatgattacagagaccgtaggtcaccaagacgcgactattcacctcgtgatgaaagaaggtctagaagagatcggtcttactctcctcatggaagaagcccagagagaagatcagagagaaggtctgagaggtcagagagaaggtatgaaccccgtggctcgagatgacctgttttcatccttttgacaaaggattcaaaaacttctctgttgatttaggttgtgtaattgatcatccttaaaatagcacaaagattctgtcaggcaacgctttgggtttcatttattttctgttgttaacgtgttattctgtcggaactctctgaagtgaaaactaaaaactgtaatagcttctctgttatgtctctactctacttgtttttgaatgaatcagaatatcttatgtgattag

SEQ ID NO: 1794 - protein, 239 aa, Arabidopsis thaliana
MADSPQRRRDSRSPSPRKERARSRSRSRSRSRSRPRLRSRSRSLPRPVSPSRSRGRSRSRSRGRSEVENPGTTLYVTGLSTRVTDKDLEAHFAKEGKVASCFLVMEPRTRVSRGFAFVTMSSLKDAERCIKYLNQSVLEGRYITVERSRRKRPRTPTPGHYLGLKSSRDSDREGRSSRGRHYDRDDYRDRRSPRRDYSPRDERRSRRDRSYSPHGRSPERRSERRSERSERRYEPRGSR

SEQ ID NO: 1795 - protein, 135 aa, Arabidopsis thaliana
MEPRTRVSRGFAFVTMSSLKDAERCIKYLNQSVLEGRYITVERSRRKRPRTPTPGHYLGLKSSRDSDREGRSSRGRHYDRDDYRDRRSPRRDYSPRDERRSRRDRSYSPHGRSPERRSERRSERSERRYEPRGSR

SEQ ID NO: 1796 - protein, 120 aa, Arabidopsis thaliana
MSSLKDAERCIKYLNQSVLEGRYITVERSRRKRPRTPTPGHYLGLKSSRDSDREGRSSRGRHYDRDDYRDRRSPRRDYSPRDERRSRRDRSYSPHGRSPERRSERRSERSERRYEPRGSR

SEQ ID NO: 1797 - DNA, 1855 bp, Arabidopsis thaliana
aaaaagaaatattcaaataatgtaataaaccctcttttttgtattctctgattacttcgtctcttcccctgtaatggcgcttccacacgtagtctcttcaccttcttcaacttcattatctccttccttcaaatccaaaccaccgtttcactcccttagatctttatcaccgacggttgataatcgccggcgttgtaaactcaacagttccttccgatgttcatcttcttcattctccgagaagcatcacaacgcgaaatctccaaaatccgatgatatcgtcgagcttcctctgtttccactcccactcgttctcttccccggagcaatccttcctcttcagatcttcgaattccgttaccgtatcatgatgcacacgctcctccaatctgatctacgattcggcgtagtttactccgattccgtctctggctccgccgcagaagtaggatgtgtaggagaagtcgtgaaacacgagcgtctcgtcgatgatcgattctttctagtctgcaaaggtcaagaacgattccgagtcacgaatgtcgttcgtacgaaaccctaccttgtcggagaagtcacgtggcttgaagatcgtccttccggtgaagaaaatcttgattcgttagctaatgaagtcgaagttctaatgaaagaagtgattaggttatcgaatagattgaatggtaaggctgagaaagaagttcaagatctgaggaggaatcagtttccgacgccgttttcgttcttcgtcggaagtacgtttgaaggagctcctagagagcagcaagcgttgcttgagcttgaagatacggcagctaggttaaaaagagaaagagagactttgaggaatacacttaattatttgactgcagcttctgctgttaaagatgtgtttccttcatcatcttagtgtgtattctacttttactggtacatagaatttctgaacctcttctctctctaagcgtttggtatattgagctttgtcagtaattgaatatacgaaacttatgaaaacctgcaaagttgtgaaagtgtaattgcctttgtaatacggtgattttggtggtattagtatatgttttgaaggtttttataggatttatagctgaattgatcacaaaaatgttgtggtttacttgagttagcttccaaagtggaaacctagagaatctgctatgtcaacaattcctaatagagagagatgttcactaaaccagggaatgtcaaaactgctacgactcatatagagactaagtagtgttggttgctttatctacatactatagacttatggtacttgtatcagtttcgttgcaactatggtactggtttaattatctttggtgtagattctagtgagcgttttcgacctctagaaccaagtggaaacttaccaaataaactgcttgggctgtggattgcctgcctctgtgtgtctgtcgagtcattcggcgctagtttgatcatctggttctggtatgaataaccgcgttatgtctatgccatcgagtgtcgtctaattatgagatcatggagcctcgtccatggttcactgcgaggtttagggtttagcagagtgactctggtggtgtttcgagtcaagatagtctctatcgattcaaattgctacaccaaacatatattttcgaacttttctgctataagaattaacaagtgttcgcgacaagaagatgatttctgttacaaactctgtttttacggctccatgttctgtttttcttcaaagcatcttgtgtaattaacaaaggttttttggtgaatataatttggcattcaaaacttatgtacacgagttgtttcctttgccataaaaaaattgcttgccttcaag

SEQ ID NO: 1798 - protein, 278 aa, Arabidopsis thaliana
MALPHVVSSPSSTSLSPSFKSKPPFHSLRSLSPTVDNRRRCKLNSSFRCSSSSFSEKHHNAKSPKSDDIVELPLFPLPLVLFPGAILPLQIFEFRYRIMMHTLLQSDLRFGVVYSDSVSGSAAEVGCVGEVVKHERLVDDRFFLVCKGQERFRVTNVVRTKPYLVGEVTWLEDRPSGEENLDSLANEVEVLMKEVIRLSNRLNGKAEKEVQDLRRNQFPTPFSFFVGSTFEGAPREQQALLELEDTAARLKRERETLRNTLNYLTAASAVKDVFPSSS

SEQ ID NO: 1799 - protein, 180 aa, Arabidopsis thaliana
MMHTLLQSDLRFGVVYSDSVSGSAAEVGCVGEVVKHERLVDDRFFLVCKGQERFRVTNVVRTKPYLVGEVTWLEDRPSGEENLDSLANEVEVLMKEVIRLSNRLNGKAEKEVQDLRRNQFPTPFSFFVGSTFEGAPREQQALLELEDTAARLKRERETLRNTLNYLTAASAVKDVFPSSS

SEQ ID NO: 1800 - protein, 179 aa, Arabidopsis thaliana
MHTLLQSDLRFGVVYSDSVSGSAAEVGCVGEVVKHERLVDDRFFLVCKGQERFRVTNVVRTKPYLVGEVTWLEDRPSGEENLDSLANEVEVLMKEVIRLSNRLNGKAEKEVQDLRRNQFPTPFSFFVGSTFEGAPREQQALLELEDTAARLKRERETLRNTLNYLTAASAVKDVFPSSS

SEQ ID NO: 1801 - DNA, 1039 bp, Arabidopsis thaliana
actgctaaaacctcacctgcggcttcacctttcttcgagttcgtgaaaaagagacgtcgcatcgcaccgccgtcgccatttccaccgtcgtagcattgccgcttcactgactgtcgcactgaatattgttgaatcgagaaaatggcttatgttgggcaaagtagaaacgtgattcggcatgtagtctcgagaggaacagcttatcacaagtatgaaaatgcgattcatcatcctctccttttcgcttgtcaaggagttcgatacagaaaattagaagttattcttacaacgggcattgagaagcttggcaaagctggtgagactgtgaaggtagctcctggatacttcaggaatcaccttatgccaaaacttcttgctgtgcctaacattgacaagtatgcttatctcatccgagagcaacgcaagatgtataatcatgaagaagtaaaggaggaggttaaggtggttcataaaacttctgaagtccagacaaaagagtatgaaaaggctgcaaagcgtctggcgaatgctaatttggtattgaggaagttagttgacaaggaaaagttcaaaaaccgctcctcaaaagacgacaaacctgatgttcaaactcctatcacaaaggaagagatagtctctgaggtggcgaggcagctctgtgtgaagattgatccagacaatgtggttttagcggcgcctttggaaacttttggcgagtacgaggtgcctcttaaattccccaagacaattcctttgccacaaggaactgttcaatggattctcaaagtcaaagtccgtggccattaaatcttccacctttgaaagtcctccttcagtgatagttctcttcttcaatatgtttcaatatagttttggaattgcagaaacataagcaaacacaaatcagttacatttcccttgactcagtttttttttttttttttttgtagttgtataaaccgggtttactccggtctttaatttaaacaatgactcgaattttgcgaaaaccggactcgtccagaagacggataaattt

SEQ ID NO: 1802 - protein, 221 aa, Arabidopsis thaliana
MAYVGQSRNVIRHVVSRGTAYHKYENAIHHPLLFACQGVRYRKLEVILTTGIEKLGKAGETVKVAPGYFRNHLMPKLLAVPNIDKYAYLIREQRKMYNHEEVKEEVKVVHKTSEVQTKEYEKAAKRLANANLVLRKLVDKEKFKNRSSKDDKPDVQTPITKEEIVSEVARQLCVKIDPDNVVLAAPLETFGEYEVPLKFPKTIPLPQGTVQWILKVKVRGH

SEQ ID NO: 1803 - protein, 148 aa, Arabidopsis thaliana
MPKLLAVPNIDKYAYLIREQRKMYNHEEVKEEVKVVHKTSEVQTKEYEKAAKRLANANLVLRKLVDKEKFKNRSSKDDKPDVQTPITKEEIVSEVARQLCVKIDPDNVVLAAPLETFGEYEVPLKFPKTIPLPQGTVQWILKVKVRGH

SEQ ID NO: 1804 - protein, 126 aa, Arabidopsis thaliana
MYNHEEVKEEVKVVHKTSEVQTKEYEKAAKRLANANLVLRKLVDKEKFKNRSSKDDKPDVQTPITKEEIVSEVARQLCVKIDPDNVVLAAPLETFGEYEVPLKFPKTIPLPQGTVQWILKVKVRGH

SEQ ID NO: 1805 - DNA, 1222 bp, Arabidopsis thaliana
aattttttacgtgtaagaaaaaaacaaaggatccttttttactggaaagatgtttttttttttcttatcttctgagataaattgcgatagagagagagaacaaaaaaattctcagtgagcgcttattgatcaacaatggcgaaagagacagtgtgtgtaaccggagctaatggtttcatcggatcttggataatccgaacgttaattgagaaaggatatactaaaatccacgcttcgatttacccaggatccgacccgactcatcttctgcaactacccggatccgattctaagatcaagatctttgaagcggatctcttagactctgatgcaatctccagagctattgatggatgtgcgggagtgttccacgtggcgtcaccttgtacgttggatccaccggtagatccagagaaggagctggtcgaaccggcggttaagggaacgatcaatgtgttggaagctgctaagaggtttaatgtgagacgcgtggtgatcacgtcatctatctccgcattggttcctaaccctaattggccggaaaaagttcccgtcgatgagtcgtcgtggtccgatcttgatttttgcaagtcgaggcagaaatggtatccaatttcgaagacattagctgagaaagcagcttgggaattttcggagaagcatggaaccaacattgtgacgattcatccatcaacatgtctcggaccgcttctgcaaccgaacctaaacgcaagctgtgctgttctgctacagcttttacaaggctcgaccgagacgcaagagcatcactggctcggtgtggttcacgtgaaagatgtggctaaaggtcatgtgatgctattcgaaacacctgacgcttctggacggtttttatgcactaatgggatttatcagttcagtgagtttgctgctcttgtgtctaagctcttccctgagtttgctgttcacaagtttgataaagagactcaacctgggcttacgtcgtgtaatgatgcggctaagcgattgattgagctcgggctggtttttactgcggttgaagatgcggttaaggagacggtccagagtcttagagacaaaggcttcctctgagaatgtatgatatatctttgcaaattttaaactctgtgagtaagatgtaactggtttatatgataaaagtagaggaactaagatgtaactggtttatatgatacatgtacgagtacaaggtattactctc

SEQ ID NO: 1806 - protein, 318 aa, Arabidopsis thaliana
MAKETVCVTGANGFIGSWIIRTLIEKGYTKIHASIYPGSDPTHLLQLPGSDSKIKIFEADLLDSDAISRAIDGCAGVFHVASPCTLDPPVDPEKELVEPAVKGTINVLEAAKRFNVRRVVITSSISALVPNPNWPEKVPVDESSWSDLDFCKSRQKWYPISKTLAEKAAWEFSEKHGTNIVTIHPSTCLGPLLQPNLNASCAVLLQLLQGSTETQEHHWLGVVHVKDVAKGHVMLFETPDASGRFLCTNGIYQFSEFAALVSKLFPEFAVHKFDKETQPGLTSCNDAAKRLIELGLVFTAVEDAVKETVQSLRDKGFL

SEQ ID NO: 1807 - DNA, 1886 bp, Arabidopsis thaliana
acaaaaacaaaaaaatcaaaagagctctcagagcaaaaaacaaaaaaaaagaaaaaaaaaccctaaatctaaatctcaccttccacctctgtcttttttttttttttgttctttttttttttttactgtatcttctcttctctttgctctgcaaaaatctcacatccatggatccatctcttggtgatcctcatcatcctcctcagttcaccccttttcctcattttcccacctccaatcatcatcctttaggaccaaatccgtacaataccatgtcgtcttccaaccgcagccgcaaacgcaaacgcaaatcccgcaaccgcagatgtttcagttatctccacatgtttcaatgccccaccctccttactccgaaatgatttgcgctgcgattgcggcgttaaacgaaccggatggttcgagcaagatggcaatttcgagatacatcgagagatgttacaccggtttaacttctgctcatgctgctttgttgactcaccatctcaagactttgaagaccagtggtgttctttctatggttaagaaatcttacaaaattgctggttcttctactcctcctgctagtgtagctgttgctgctgctgccgccgctcaaggtctcgatgttcccagatctgagattctccattcaagtaacaacgatcccatggcttctggctctgcttctcagcctctgaaacgaggtcgtggtcgtcctcctaagcctaaacctgaatctcaaccacaaccactacagcaacttccaccgaccaatcaagtccaggctaacggacagccaatctgggaacagcagcaagttcaatcacctgttccggttccgactccggttacagagtcggcgaagagaggacctggtcgtccaaggaagaacggttctgctgctcctgctactgcaccaatcgttcaagcttcggttatggctggaattatgaaacgtagaggtagaccaccgggtcgtcgagctgctgggagacagaggaagcccaaatccgtttcttctactgcctctgtgtatccttatgttgctaatggtgctagacgcagaggaaggcctaggagagttgttgaccctagcagtattgttagtgttgctccagtaggtggtgaaaatgtggcagcggttgcgccagggatgaagcgtggacgtggacgaccacctaagattggtggtgttatcagtaggcttattatgaagcctaagagaggacgaggacgtcctgtaggtagacccagaaagattggaacatcagtcacgactgggacacaagattctggagaactcaagaagaagtttgatatttttcaagagaaagtgaaagaaattgtgaaggtgttgaaggatggagttacaagtgagaatcaagcagtggtgcaagccataaaagatctggaagcactaacagtgacggagaccgttgagccacaagttatggaagaagtgcagccagaggagactgaagctcaacaaactgaagctgctgagacacaaggaggacaagaagaaggacaagaaagagaaggagaaacacagacccagacagaagcagaggcaatgcaagaagctctgttctgaagaataataatgatctagaaaacaacctagacataatagccttggtgtttggcgttaggagtgtttttttttagttgttttaggtgttggaatcgcatcttaaattatataaaaatctataaggaattttaatttttctaggttttgttgtctgcagaagaagaaatagtagactcgttaatggtgttgttgtcggtgtgtctttaaccaaaccataagacgtggctgtaaattagcgatgtttctagtcttccatctttaataatctcttattgcgtctgtgcctttgttt

SEQ ID NO: 1808 - protein, 422 aa, Arabidopsis thaliana
MFQLSPHVSMPHPPYSEMICAAIAALNEPDGSSKMAISRYIERCYTGLTSAHAALLTHHLKTLKTSGVLSMVKKSYKIAGSSTPPASVAVAAAAAAQGLDVPRSEILHSSNNDPMASGSASQPLKRGRGRPPKPKPESQPQPLQQLPPTNQVQANGQPIWEQQQVQSPVPVPTPVTESAKRGPGRPRKNGSAAPATAPIVQASVMAGIMKRRGRPPGRRAAGRQRKPKSVSSTASVYPYVANGARRRGRPRRVVDPSSIVSVAPVGGENVAAVAPGMKRGRGRPPKIGGVISRLIMKPKRGRGRPVGRPRKIGTSVTTGTQDSGELKKKFDIFQEKVKEIVKVLKDGVTSENQAVVQAIKDLEALTVTETVEPQVMEEVQPEETEAQQTEAAETQGGQEEGQEREGETQTQTEAEAMQEALF

SEQ ID NO: 1809 - protein, 413 aa, Arabidopsis thaliana
MPHPPYSEMICAAIAALNEPDGSSKMAISRYIERCYTGLTSAHAALLTHHLKTLKTSGVLSMVKKSYKIAGSSTPPASVAVAAAAAAQGLDVPRSEILHSSNNDPMASGSASQPLKRGRGRPPKPKPESQPQPLQQLPPTNQVQANGQPIWEQQQVQSPVPVPTPVTESAKRGPGRPRKNGSAAPATAPIVQASVMAGIMKRRGRPPGRRAAGRQRKPKSVSSTASVYPYVANGARRRGRPRRVVDPSSIVSVAPVGGENVAAVAPGMKRGRGRPPKIGGVISRLIMKPKRGRGRPVGRPRKIGTSVTTGTQDSGELKKKFDIFQEKVKEIVKVLKDGVTSENQAVVQAIKDLEALTVTETVEPQVMEEVQPEETEAQQTEAAETQGGQEEGQEREGETQTQTEAEAMQEALF

SEQ ID NO: 1810 - protein, 405 aa, Arabidopsis thaliana
MICAAIAALNEPDGSSKMAISRYIERCYTGLTSAHAALLTHHLKTLKTSGVLSMVKKSYKIAGSSTPPASVAVAAAAAAQGLDVPRSEILHSSNNDPMASGSASQPLKRGRGRPPKPKPESQPQPLQQLPPTNQVQANGQPIWEQQQVQSPVPVPTPVTESAKRGPGRPRKNGSAAPATAPIVQASVMAGIMKRRGRPPGRRAAGRQRKPKSVSSTASVYPYVANGARRRGRPRRVVDPSSIVSVAPVGGENVAAVAPGMKRGRGRPPKIGGVISRLIMKPKRGRGRPVGRPRKIGTSVTTGTQDSGELKKKFDIFQEKVKEIVKVLKDGVTSENQAVVQAIKDLEALTVTETVEPQVMEEVQPEETEAQQTEAAETQGGQEEGQEREGETQTQTEAEAMQEALF

SEQ ID NO: 1811 - DNA, 1946 bp, Arabidopsis thaliana
acctctaaaccacaaacaaaaagagagagaagagaacgagagaatcattgagaaacgaaacaacaatggccgtctcatcattccagtgccctaccatcttctcctcctcctcaatctccggctttcaatgccgttctgatccagatctcgtcggttctcccgtcggtggatcatctcgccgtcgtgtccatgcctccgccgggatttcttcctcattcaccggggacgctggattatcctccaggatcttaagatttcctcctaatttcgtccgtcagctgagcattaaagcccgtagaaactgtagcaacatcggtgttgcacagatcgtggcggctaagtggtccaacaacccatcctccgcgttaccttcggcggcggcggctgctgctacctcgtctgcatctgcggtttcttccgccgcatctgcagccgcagcctcgtccgccgccgccgcccctgtggctgccgcgcctcccgtcgtgctgaaaagcgtcgatgaggaggttgtggtggccgaggaggggatcagggagaagataggtagtgtacagctgacggattccaaacattctttcttgagctccgatgggagcctcactgttcatgccggtgaaagattaggccgtggtatagtgacggatgctatcactactcctgtagtcaacacatctgcctacttcttcaagaaaactgctgagcttattgacttcaaggagaaaaggagtgtgagtttcgagtatggtcgttatggtaaccctacgactgtggtacttgaagataagataagtgcacttgaaggggctgaatcaactttggttatggcatctgggatgtgtgcaagcactgttatgcttttggcattggttcctgctggtggacacattgtcactactactgattgctacaggaagactaggatcttcatggagaattttcttcccaagttggggatcactgtcactgtgattgatcctgctgatatcgcagggcttgaagctgcagtgaatgagttcaaggtatctctgttcttcactgagtccccgacaaacccattccttagatgtgtcgacattgagctagtttcaaaaatatgccacaagaggggaactctggtttgcattgatggcacctttgcaacacctctgaatcagaaagcccttgctcttggtgctgatcttgtcgtgcactctgctacaaagtacattggaggacacaatgatgttcttgctggatgcatctgtggttcactgaagttggtttcagaaattcgcaatctgcatcatgtgttgggaggaacacttaacccaaacgctgcgtacctaatcatccgaggcatgaagacattgcatcttcgtgtacagcaacagaattcgaccgcttttagaatggccgaaattttagaggcacatcctaaggtgagtcatgtgtactatccaggccttccaagtcatcccgaacatgaactcgccaagcgacaaatgactggttttggaggtgtggtcagtttcgagattgatggagacattgaaacgacaatcaagtttgtggattctctaaagattccttacattgcaccatccttcggtggctgcgaaagcattgttgaccaacctgctatcatgtcctactgggatctgccgcaagaggagagactaaagtatggaatcaaagataacttggttcgtttcagctttggagttgaagactttgaagatgtcaaagctgacattcttcaagctctcgaagccatctgaaaatgacacatcacacaaaaacgctgtcgtttctttgtcctttatttatctctctttgctgttttcagtcaccgtaataatgatgtctttgaactattgttccgcgacatttacgttccgaaataatcgtgtactattatgatgtttgttgtgctatataataaattctgtttagttcccctgacgtag

SEQ ID NO: 1812 - protein, 563 aa, Arabidopsis thaliana
MAVSSFQCPTIFSSSSISGFQCRSDPDLVGSPVGGSSRRRVHASAGISSSFTGDAGLSSRILRFPPNFVRQLSIKARRNCSNIGVAQIVAAKWSNNPSSALPSAAAAAATSSASAVSSAASAAAASSAAAAPVAAAPPVVLKSVDEEVVVAEEGIREKIGSVQLTDSKHSFLSSDGSLTVHAGERLGRGIVTDAITTPVVNTSAYFFKKTAELIDFKEKRSVSFEYGRYGNPTTVVLEDKISALEGAESTLVMASGMCASTVMLLALVPAGGHIVTTTDCYRKTRIFMENFLPKLGITVTVIDPADIAGLEAAVNEFKVSLFFTESPTNPFLRCVDIELVSKICHKRGTLVCIDGTFATPLNQKALALGADLVVHSATKYIGGHNDVLAGCICGSLKLVSEIRNLHHVLGGTLNPNAAYLIIRGMKTLHLRVQQQNSTAFRMAEILEAHPKVSHVYYPGLPSHPEHELAKRQMTGFGGVVSFEIDGDIETTIKFVDSLKIPYIAPSFGGCESIVDQPAIMSYWDLPQEERLKYGIKDNLVRFSFGVEDFEDVKADILQALEAI

SEQ ID NO: 1813 - protein, 311 aa, Arabidopsis thaliana
MASGMCASTVMLLALVPAGGHIVTTTDCYRKTRIFMENFLPKLGITVTVIDPADIAGLEAAVNEFKVSLFFTESPTNPFLRCVDIELVSKICHKRGTLVCIDGTFATPLNQKALALGADLVVHSATKYIGGHNDVLAGCICGSLKLVSEIRNLHHVLGGTLNPNAAYLIIRGMKTLHLRVQQQNSTAFRMAEILEAHPKVSHVYYPGLPSHPEHELAKRQMTGFGGVVSFEIDGDIETTIKFVDSLKIPYIAPSFGGCESIVDQPAIMSYWDLPQEERLKYGIKDNLVRFSFGVEDFEDVKADILQALEAI

SEQ ID NO: 1814 - protein, 307 aa, Arabidopsis thaliana
MCASTVMLLALVPAGGHIVTTTDCYRKTRIFMENFLPKLGITVTVIDPADIAGLEAAVNEFKVSLFFTESPTNPFLRCVDIELVSKICHKRGTLVCIDGTFATPLNQKALALGADLVVHSATKYIGGHNDVLAGCICGSLKLVSEIRNLHHVLGGTLNPNAAYLIIRGMKTLHLRVQQQNSTAFRMAEILEAHPKVSHVYYPGLPSHPEHELAKRQMTGFGGVVSFEIDGDIETTIKFVDSLKIPYIAPSFGGCESIVDQPAIMSYWDLPQEERLKYGIKDNLVRFSFGVEDFEDVKADILQALEAI

SEQ ID NO: 1815 - DNA, 1549 bp, Arabidopsis thaliana
cccccccccccccggcagaacccttaaaccttatctcttcaccaccagcttctcaaagctttagcctcgagagcaaaattctctcaagctttagccatgtctgcctctgcttcttccctctctgctttcaatcctaaatcccttcctctctgcgtctccagacccgcttccgtctccgtcttacctccttccctctccttcaaacttcactccgaccacctcgtctctatcttcgcttcctccgccctcaaatgctcatcccccgccgagtacccgtcgcgtttcgttagaaacgttgctgtatcttcggattttgaggtggaggaagatgatatgttcgctgacggtgacgattcagcgcctgtggagcgtaactccttctctcctgaccttaagctctttgttggtaacctttcttttaacgttgatagcgctcagcttgctcagctctttgagagcgctggaaatgttgagatggttgaggttatctatgacaaagtgactggccggagcaggggtttcggatttgtgacaatgtcaaccgcagcggaagttgaagcagcagctcaacagttcaatggctatgaatttgaaggcagacctttgagagtcaatgctggccctcctccacctaaaagagaggaatccttctccagaggaccaagaagtggaggttacggttctgagcgtggtggaggttacggttccgagcgtggtggtggttatggttccgagcgtggtggtggttatggttccgagcgtggtggtggatacggttctcaacgtagtggtggtggttacggagggtctcaacgttccagttatggttcggggtcagggtccggttcgggctcaggttcaggaaaccgtctctacgtgggcaacctttcttggggtgttgatgacatggcacttgagaacttgtttaacgagcaaggaaaggtagttgaagctagggttatctacgacagggacagcggtagatccaagggttttggatttgtgacacttagctcttcccaagaggttcagaaggcgatcaattccttgaatggagcagatttggatggaagacaaataagagtctcagaggctgaggctaggccaccaagaggccaattttgagcggtcacacctctttcatattctcaaaaaatgcaaattctggagggttctttgaagcatatagggttagtggaaaatggcggtttcagacagtaactaaaactcactgctggtgcacgctaggctttatccgcctttgatgcatgaaggtcgttaaggaatggtctttttttgagaaagataacaattagattaaagcagagaacccatgtttcttgtctgttcgaatcctgcgagattggttgtagttgaagttgcattttcttcttgtcttttttgttggtattttgacacaatttggctttttggcatatgagagtgactgtagcagtctgttttatttgatgttcgtgatcttcttatgttctgaaaaccagttttcctaaaacttaacaaatttcgatatggaacaagaaattttttg

SEQ ID NO: 1816 - protein, 342 aa, Arabidopsis thaliana
MSASASSLSAFNPKSLPLCVSRPASVSVLPPSLSFKLHSDHLVSIFASSALKCSSPAEYPSRFVRNVAVSSDFEVEEDDMFADGDDSAPVERNSFSPDLKLFVGNLSFNVDSAQLAQLFESAGNVEMVEVIYDKVTGRSRGFGFVTMSTAAEVEAAAQQFNGYEFEGRPLRVNAGPPPPKREESFSRGPRSGGYGSERGGGYGSERGGGYGSERGGGYGSERGGGYGSQRSGGGYGGSQRSSYGSGSGSGSGSGSGNRLYVGNLSWGVDDMALENLFNEQGKVVEARVIYDRDSGRSKGFGFVTLSSSQEVQKAINSLNGADLDGRQIRVSEAEARPPRGQF

SEQ ID NO: 1817 - protein, 263 aa, Arabidopsis thaliana
MFADGDDSAPVERNSFSPDLKLFVGNLSFNVDSAQLAQLFESAGNVEMVEVIYDKVTGRSRGFGFVTMSTAAEVEAAAQQFNGYEFEGRPLRVNAGPPPPKREESFSRGPRSGGYGSERGGGYGSERGGGYGSERGGGYGSERGGGYGSQRSGGGYGGSQRSSYGSGSGSGSGSGSGNRLYVGNLSWGVDDMALENLFNEQGKVVEARVIYDRDSGRSKGFGFVTLSSSQEVQKAINSLNGADLDGRQIRVSEAEARPPRGQF

SEQ ID NO: 1818 - protein, 216 aa, Arabidopsis thaliana
MVEVIYDKVTGRSRGFGFVTMSTAAEVEAAAQQFNGYEFEGRPLRVNAGPPPPKREESFSRGPRSGGYGSERGGGYGSERGGGYGSERGGGYGSERGGGYGSQRSGGGYGGSQRSSYGSGSGSGSGSGSGNRLYVGNLSWGVDDMALENLFNEQGKVVEARVIYDRDSGRSKGFGFVTLSSSQEVQKAINSLNGADLDGRQIRVSEAEARPPRGQF

SEQ ID NO: 1819 - DNA, 1317 bp, Arabidopsis thaliana
ataacaaaccaaacactactcttttctaaccaagagaaaggttttatatatgcagaatgaagtttgagagagcaaggccattcatagccattgttttcatacaatgtttgtacgctttgatgtctatagtagcaaaattagctttgaacaagggaatgagccctcacgtcttagttgcttaccgaatggcagttgcttccgctctcattacgcctttcgctctcatcctcgagaggaacacaagaccaaagttgaccttcaagattttgttacaaatagccatccttagtttatttgagcctgtggtcgaacaaaacctgtactactcagggatgaaacttaccactgccacattcacatcagctttgtgcaatgctcttcctgctatgacattcataatggcctgcgttttcaagctcgagaaggtgacaatcgaaagacgccacagccaggcaaagctggtgggaaccatggtggctattgggggagcaatgctcatgacattcgtgaaagggaatgtcattgagctgccttggacaagcaactcaaggggtcttaatgggcacacacacgctatgaggattccaaagcaggcggatatagcaagaggatcaattatgcttgtagcaagctgcttcagttggtcatgttacatcattttacaggcaaagattctggctcaatataaagctgagctctcgctaacagctcttatgtgcattatggggatgttggaggctactgttatgggattgatatgggaaaggaaaaacatgtcggtctggaaaatcaacccggacgtgacgcttttagcttcaatctacggaggactagtctcagggttagcatactatgttattggatgggcgtcaaaggagagagggcctgtgtttgtgagcgcgtttaacccgctcagcatggttctcgttgctattctgagcacctttgttttcttggaaaaagtgtacgtaggaagggttattgggtcagttgtcattgtcattgggatatatttggtattatggggtaaaagcaaggacaaaggagggatgcttcaaccaaacgctggatgcgcagagactgtggtaaagattgaccaacagaaggttccgacgcctgataataaccaagtagtatctatcagttaccatttaatgatcccgaaggcagcagctcggtctcaagagtgagtctaagatgccgattctgttccaggatctctatatatcgcaaaaaaaacatttttgatagtattggtttgccagaataagagcaagcaatgcgctacattaagtctcataaaagctaagaacttgg

SEQ ID NO: 1820 - protein, 377 aa, Arabidopsis thaliana
MKFERARPFIAIVFIQCLYALMSIVAKLALNKGMSPHVLVAYRMAVASALITPFALILERNTRPKLTFKILLQIAILSLFEPVVEQNLYYSGMKLTTATFTSALCNALPAMTFIMACVFKLEKVTIERRHSQAKLVGTMVAIGGAMLMTFVKGNVIELPWTSNSRGLNGHTHAMRIPKQADIARGSIMLVASCFSWSCYIILQAKILAQYKAELSLTALMCIMGMLEATVMGLIWERKNMSVWKINPDVTLLASIYGGLVSGLAYYVIGWASKERGPVFVSAFNPLSMVLVAILSTFVFLEKVYVGRVIGSVVIVIGIYLVLWGKSKDKGGMLQPNAGCAETVVKIDQQKVPTPDNNQVVSISYHLMIPKAAARSQE

SEQ ID NO: 1821 - protein, 356 aa, Arabidopsis thaliana
MSIVAKLALNKGMSPHVLVAYRMAVASALITPFALILERNTRPKLTFKILLQIAILSLFEPVVEQNLYYSGMKLTTATFTSALCNALPAMTFIMACVFKLEKVTIERRHSQAKLVGTMVAIGGAMLMTFVKGNVIELPWTSNSRGLNGHTHAMRIPKQADIARGSIMLVASCFSWSCYIILQAKILAQYKAELSLTALMCIMGMLEATVMGLIWERKNMSVWKINPDVTLLASIYGGLVSGLAYYVIGWASKERGPVFVSAFNPLSMVLVAILSTFVFLEKVYVGRVIGSVVIVIGIYLVLWGKSKDKGGMLQPNAGCAETVVKIDQQKVPTPDNNQVVSISYHLMIPKAAARSQE

SEQ ID NO: 1822 - protein, 344 aa, Arabidopsis thaliana
MSPHVLVAYRMAVASALITPFALILERNTRPKLTFKILLQIAILSLFEPVVEQNLYYSGMKLTTATFTSALCNALPAMTFIMACVFKLEKVTIERRHSQAKLVGTMVAIGGAMLMTFVKGNVIELPWTSNSRGLNGHTHAMRIPKQADIARGSIMLVASCFSWSCYIILQAKILAQYKAELSLTALMCIMGMLEATVMGLIWERKNMSVWKINPDVTLLASIYGGLVSGLAYYVIGWASKERGPVFVSAFNPLSMVLVAILSTFVFLEKVYVGRVIGSVVIVIGIYLVLWGKSKDKGGMLQPNAGCAETVVKIDQQKVPTPDNNQVVSISYHLMIPKAAARSQE

SEQ ID NO: 1823 - DNA, 1303 bp, Arabidopsis thaliana
attcattctcctttgtgttttctctttttggagattttaacttcagtttttgtctaattagggttttaatttaaattggagggaaattttagatgcagtgacgtagtttttgggtaaattttcgtcggattctgaattgtctccggcgacatggcttctaatctccccatgagccctcaattggagcagatccatggcgaaatccgtgaccatttccgagccctcgcgaatggtttccagaggttggataagattaaggattcaactagacaaagcaaacaacttgaagaacttactgacaagatgagagagtgtaaaagattggtcaaagagttcgaccgtgaactcaaggatgaggaagctagaaattctcctgaagtaaataagcaattgaacgatgagaaacaatctatgatcaaggagctcaattcttacgttgctctaagaaaaacgtatatgagtacccttggcaacaagaaagttgagctttttgatatgggagctggagttagtggcgaacctacagctgaggaaaatgttcaagtggcttcatctatgtcaaaccaggagcttgttgatgctggaatgaaaagaatggatgagactgatcaggccattgagcgctcaaaacaggttgtagaacaaacactcgaagttggaactcaaactgcagctaatttaaagggacagacggatcaaatgggacgcgtagttaaccacttggacactattcaattctcaatcaagaaggcctcccagctggtgaaagagatagggagacaggtggctaccgataaatgcataatggggttcctgtttctcattgtatgcggtgtagtagccataatcatagtgaagatcgtgaatccgaataacaaagacattagggacatcccaggattagctcctccagcgcaatcgaggaagctattgtacttgaggaatcaagactacatgtgagaatataaatctctatttgtatatttattcacgaggaatgaggaaattgcatcttgaggttcgatatttccttctaatttgttaacaatccatttcatggatgttagagagagggtttgtgcttgttggcattgtgtgctttgatagttgacgaggcttggggatgtttatcttcatgttcttttacttgttttaacccattcgtttgaatctgggtttgattggagggtgtgtatattttcagcttttgtctctatttctttttccttcttcttttttgtagcaacttatcacttcttttgtataaaattcagaccaatgttatactctctcacgttttcat

SEQ ID NO: 1824 - protein, 269 aa, Arabidopsis thaliana
MASNLPMSPQLEQIHGEIRDHFRALANGFQRLDKIKDSTRQSKQLEELTDKMRECKRLVKEFDRELKDEEARNSPEVNKQLNDEKQSMIKELNSYVALRKTYMSTLGNKKVELFDMGAGVSGEPTAEENVQVASSMSNQELVDAGMKRMDETDQAIERSKQVVEQTLEVGTQTAANLKGQTDQMGRVVNHLDTIQFSIKKASQLVKEIGRQVATDKCIMGFLFLIVCGVVAIIIVKIVNPNNKDIRDIPGLAPPAQSRKLLYLRNQDYM

SEQ ID NO: 1825 - protein, 263 aa, Arabidopsis thaliana
MSPQLEQIHGEIRDHFRALANGFQRLDKIKDSTRQSKQLEELTDKMRECKRLVKEFDRELKDEEARNSPEVNKQLNDEKQSMIKELNSYVALRKTYMSTLGNKKVELFDMGAGVSGEPTAEENVQVASSMSNQELVDAGMKRMDETDQAIERSKQVVEQTLEVGTQTAANLKGQTDQMGRVVNHLDTIQFSIKKASQLVKEIGRQVATDKCIMGFLFLIVCGVVAIIIVKIVNPNNKDIRDIPGLAPPAQSRKLLYLRNQDYM

SEQ ID NO: 1826 - protein, 218 aa, Arabidopsis thaliana
MRECKRLVKEFDRELKDEEARNSPEVNKQLNDEKQSMIKELNSYVALRKTYMSTLGNKKVELFDMGAGVSGEPTAEENVQVASSMSNQELVDAGMKRMDETDQAIERSKQVVEQTLEVGTQTAANLKGQTDQMGRVVNHLDTIQFSIKKASQLVKEIGRQVATDKCIMGFLFLIVCGVVAIIIVKIVNPNNKDIRDIPGLAPPAQSRKLLYLRNQDYM

SEQ ID NO: 1827 - DNA, 1184 bp, Arabidopsis thaliana
acacactttaacgcatttctcaaaattacgttgccaaagtctggtcagagctacaaatcaaatttgacagactgcaatttccaatccaacgactgcgaatgaagtttaatggcgactagatcgccttataagagacaaacgaagcgatccatgattcagtctcttccagcttcttcttctgcatcatctcgccgccgattcatttctcggaagaggttcgcgatgatgattcctcttgctctcctctccggcgccgttttcctattctttatgccattcaatagctggggccaatcatctggttcttctctggatctctcccataggatcaatgaaattgaaagtagttgctgagtttcctcatgatccggacgcctttactcagggtcttctttatgcgggaaacgatacactgttcgaatccactggtctatacgggaagtcttcagtgaggaaagtggatctacgaacaggaaaggttgaaattcttgaaaaaatggacaatacatattttggagagggtttaacactccttggagaaaggctctttcaagtcgcatggttgacgaacacgggtttcacatatgaccttcgcaacttaagtaaagtaaaaccatttaaacatcatatgaaagatggatggggactggctaccgatggaaaagcgttatttggaagtgatggcacttctacattatatcggatggaccctcaaacaatgaaagttactgataagcatatagtcagatataatggccgtgaggtacgttaccttaatgagctcgagtacataaacaacgaagtttgggcaaatgtgtggcagtctgattgtattgctagaatttcacccaaggacggatctctgcttggatggatactgctttcaaaattaagtcggggattgctgaaatctggacataggggtattgatgttttgaatggcatagcatgggacagtgacaagcaacgcctctttgtaacggggaaactgtggccaaagctgtaccaaatcaagctaaaacaagcatcagcaaagagccgaaattatatcgagcaacaatgcttggtatgaaaatattgtgcatggtaatggttataatgtatactggctataatttaccataatttctgaacattagcatttagcaaacttcaatgattgaagatgagaatcaaaacctcgc

SEQ ID NO: 1828 - protein, 246 aa, Arabidopsis thaliana
MKLKVVAEFPHDPDAFTQGLLYAGNDTLFESTGLYGKSSVRKVDLRTGKVEILEKMDNTYFGEGLTLLGERLFQVAWLTNTGFTYDLRNLSKVKPFKHHMKDGWGLATDGKALFGSDGTSTLYRMDPQTMKVTDKHIVRYNGREVRYLNELEYINNEVWANVWQSDCIARISPKDGSLLGWILLSKLSRGLLKSGHRGIDVLNGIAWDSDKQRLFVTGKLWPKLYQIKLKQASAKSRNYIEQQCLV

SEQ ID NO: 1829 - protein, 191 aa, Arabidopsis thaliana
MDNTYFGEGLTLLGERLFQVAWLTNTGFTYDLRNLSKVKPFKHHMKDGWGLATDGKALFGSDGTSTLYRMDPQTMKVTDKHIVRYNGREVRYLNELEYINNEVWANVWQSDCIARISPKDGSLLGWILLSKLSRGLLKSGHRGIDVLNGIAWDSDKQRLFVTGKLWPKLYQIKLKQASAKSRNYIEQQCLV

SEQ ID NO: 1830 - protein, 147 aa, Arabidopsis thaliana
MKDGWGLATDGKALFGSDGTSTLYRMDPQTMKVTDKHIVRYNGREVRYLNELEYINNEVWANVWQSDCIARISPKDGSLLGWILLSKLSRGLLKSGHRGIDVLNGIAWDSDKQRLFVTGKLWPKLYQIKLKQASAKSRNYIEQQCLV

SEQ ID NO: 1831 - DNA, 1407 bp, Arabidopsis thaliana
gcactttttcttctttgtctatctctctctctctctatctctaacctttgcttctccgtccttttctctgcttcagttttctcttcctaacaagcaaaacccgaaacagatcgaaccatttttttcctttagaaattaaacaacaaaaatcatttttttgtttgttttcggtttcacctaaccaaattgattctcttacctttttatatcacattgcatctgggtttccattagaaacaacaacaaacgaaaaaagaggcttctttcgtttcagagaggggttcaaaaatggcgacgaacattgggatgatggatagtgcttactttgttggaaggaatgagattctgagttggatcaatgaccgccttcatctcaatctctctcgtatcgaagaggctgcatcaggtgctgtgcaatgtcaaatgttggacatgacttttccaggagttgtgccaatgcacaaggttaactttgaagcaaagaacgagtacgaaatgatacaaaactacaaggtcatgcaagaagtcttcaccaaattgaaaattacaaagccattggaagtcaacaggcttgtcaaaggccgaccactagacaatttggagtttcttcaatggttgaaacgtttttgcgattcaataaatggcggcattatgaacgagaattataatccagtagaacgaagatcaagaggtgggagagagaaaagcgtaaagggatctagtaagatctcaaagtcattgcaaacaaacaatatgcatcatcctcctgtggctacttccaacaaaccagctggtcccaagcaagcaaaatcacatggaattggaggtgggagcaactcatcagccgaagtgcaagctctgtcaaaggaggtagaagatctcaaggtctcggttgatctcttggaaaaagaaagagatttttacttctctaagctccgggatatagagatactatgtcagactcctgaactcgatgatcttccgatagtggtagcggttaagaagatattatacgcaaccgatgcaaatgaatctgtgctagaagaagctcaagagtgcctaaaccagtctctagggcttgagggttatgaagaagaaggaaaagaggaggaagaagaagaagaagaagaagaagaagaagcagcagctgctgcagagacccaaacttaaagttgtgacaaataaaagtagagggcaacaatgatccattgccttgtcttagaagatagaatcacttggagaggatgtttgcacaatattcaatttaccctaaccggttttttggttttacagtgaactgaaccgaatttattccttcctaaacttgaaagattatctgatggattttcattgtatcacaaaaatgattttattaaatgttccccaataagtaaaattaaaaattac

SEQ ID NO: 1832 - protein, 293 aa, Arabidopsis thaliana
MATNIGMMDSAYFVGRNEILSWINDRLHLNLSRIEEAASGAVQCQMLDMTFPGVVPMHKVNFEAKNEYEMIQNYKVMQEVFTKLKITKPLEVNRLVKGRPLDNLEFLQWLKRFCDSINGGIMNENYNPVERRSRGGREKSVKGSSKISKSLQTNNMHHPPVATSNKPAGPKQAKSHGIGGGSNSSAEVQALSKEVEDLKVSVDLLEKERDFYFSKLRDIEILCQTPELDDLPIVVAVKKILYATDANESVLEEAQECLNQSLGLEGYEEEGKEEEEEEEEEEEEAAAAAETQT

SEQ ID NO: 1833 - protein, 287 aa, Arabidopsis thaliana
MMDSAYFVGRNEILSWINDRLHLNLSRIEEAASGAVQCQMLDMTFPGVVPMHKVNFEAKNEYEMIQNYKVMQEVFTKLKITKPLEVNRLVKGRPLDNLEFLQWLKRFCDSINGGIMNENYNPVERRSRGGREKSVKGSSKISKSLQTNNMHHPPVATSNKPAGPKQAKSHGIGGGSNSSAEVQALSKEVEDLKVSVDLLEKERDFYFSKLRDIEILCQTPELDDLPIVVAVKKILYATDANESVLEEAQECLNQSLGLEGYEEEGKEEEEEEEEEEEEAAAAAETQT

SEQ ID NO: 1834 - protein, 286 aa, Arabidopsis thaliana
MDSAYFVGRNEILSWINDRLHLNLSRIEEAASGAVQCQMLDMTFPGVVPMHKVNFEAKNEYEMIQNYKVMQEVFTKLKITKPLEVNRLVKGRPLDNLEFLQWLKRFCDSINGGIMNENYNPVERRSRGGREKSVKGSSKISKSLQTNNMHHPPVATSNKPAGPKQAKSHGIGGGSNSSAEVQALSKEVEDLKVSVDLLEKERDFYFSKLRDIEILCQTPELDDLPIVVAVKKILYATDANESVLEEAQECLNQSLGLEGYEEEGKEEEEEEEEEEEEAAAAAETQT

SEQ ID NO: 1835 - DNA, 1445 bp, Arabidopsis thaliana
aaaccaccaattctctcatccgtaccaaagaacaaaaaaaagataaaatggcggttcatattcacaaccctaactttttccacactcatcatctccgagcatctcttacttctgcctctgcatcaccttcctcatatctctttcatagacactctgcttcaaagtatcctagcttcctctgcaaatccaataacaaagatgactatctcattgatgctcctgtttctgttggagatggattctcttttagtggagggaagtattcggatcaaccgagtccatcagatgagtggttgaagcaagggaaatgggttaaagctcatagagttggcggctctggtgtagaagcaaaagatccgattttcggattaacaatgggagctagctctcaagcttcaaaagatcttttccgatggtttagtgtagaatccgggagtgtagatagtcctcctgttatactcatccatggattcccatctcaggcttattcttaccggaaaactattcccgttctttcaaagaactaccgcgccattgctttcgattggctaggatttggattttctgacaagcctcaggctggatatggattcaactatacaatggacgagtttgtttcttcgctggagtcattcattgacgaagtaactactagtaaggtgtcacttgtggtgcagggctacttctcagctgctgttgtaaaatatgcaagaaaccgaccagacaagatcaagaatctcatactcttgaatcctcctctcacaccagaacatgctaaacttccatcaacattgtctgtattcagcaactttttgcttggggaaattttctctcaggatcctctaagagcaagtgacaagcctttaacaagctgtggtccttacaaaatgaaagaagacgatgcaatggtttatcgaagaccttatcttacctcaggttcttctggttttgcacttaatgccataagcaggtccatgaagaaagaacttaagaaatatgcagaagagatgaggacatcactaatggataaaaactggaaaatcccgatcaccgtgtgctggggacaacgagataggtggttaagctatgaaggagttgaagagttctgcaagagttcgggacacaacctcgtcgaattaccaaatgctggccatcatgtacaagaagattgtggagaggaacttggaggaataatctcaagaatcataagcaaatctgctctattctaactggaaccactccacaagaatattgaaagaacgtaaagaaccatttgtataaactcagctttattcaaaacatactctagttccagtggtacattacatataagtcaccagtaagatttttgtgcttaactttgaggctctataaagtaggagattctccagttctctagtacaaatttgtaacatcctaaaaagaatgtagcttgatctacatgt

SEQ ID NO: 1836 - protein, 408 aa, Arabidopsis thaliana
TTNSLIRTKEQKKDKMAVHIHNPNFFHTHHLRASLTSASASPSSYLFHRHSASKYPSFLCKSNNKDDYLIDAPVSVGDGFSFSGGKYSDQPSPSDEWLKQGKWVKAHRVGGSGVEAKDPIFGLTMGASSQASKDLFRWFSVESGSVDSPPVILIHGFPSQAYSYRKTIPVLSKNYRAIAFDWLGFGFSDKPQAGYGFNYTMDEFVSSLESFIDEVTTSKVSLVVQGYFSAAVVKYARNRPDKIKNLILLNPPLTPEHAKLPSTLSVFSNFLLGEIFSQDPLRASDKPLTSCGPYKMKEDDAMVYRRPYLTSGSSGFALNAISRSMKKELKKYAEEMRTSLMDKNWKIPITVCWGQRDRWLSYEGVEEFCKSSGHNLVELPNAGHHVQEDCGEELGGIISRIISKSALF

SEQ ID NO: 1837 - protein, 393 aa, Arabidopsis thaliana
MAVHIHNPNFFHTHHLRASLTSASASPSSYLFHRHSASKYPSFLCKSNNKDDYLIDAPVSVGDGFSFSGGKYSDQPSPSDEWLKQGKWVKAHRVGGSGVEAKDPIFGLTMGASSQASKDLFRWFSVESGSVDSPPVILIHGFPSQAYSYRKTIPVLSKNYRAIAFDWLGFGFSDKPQAGYGFNYTMDEFVSSLESFIDEVTTSKVSLVVQGYFSAAVVKYARNRPDKIKNLILLNPPLTPEHAKLPSTLSVFSNFLLGEIFSQDPLRASDKPLTSCGPYKMKEDDAMVYRRPYLTSGSSGFALNAISRSMKKELKKYAEEMRTSLMDKNWKIPITVCWGQRDRWLSYEGVEEFCKSSGHNLVELPNAGHHVQEDCGEELGGIISRIISKSALF

SEQ ID NO: 1838 - protein, 284 aa, Arabidopsis thaliana
MGASSQASKDLFRWFSVESGSVDSPPVILIHGFPSQAYSYRKTIPVLSKNYRAIAFDWLGFGFSDKPQAGYGFNYTMDEFVSSLESFIDEVTTSKVSLVVQGYFSAAVVKYARNRPDKIKNLILLNPPLTPEHAKLPSTLSVFSNFLLGEIFSQDPLRASDKPLTSCGPYKMKEDDAMVYRRPYLTSGSSGFALNAISRSMKKELKKYAEEMRTSLMDKNWKIPITVCWGQRDRWLSYEGVEEFCKSSGHNLVELPNAGHHVQEDCGEELGGIISRIISKSALF

SEQ ID NO: 1839 - DNA, 1422 bp, Arabidopsis thaliana
aatttgttggtaaatggaaccactcatcagcccacaaccacgtttccgcctccaacccataccggaaaatccctcctcctcctcctcctccgcctccatcacaatccctcgctctatctcaaacacttccttcttccatgaaatctcccaagaacgtcttctccttcatcatcaagacctcgaacaatccgtacaagacgacaaagaagaccaagactcagactcagacgaaacaaatcgctttttatctcagacaagaccacttcaccgatctcgtacagctccagctatggtaatcatcaaagacttaagaaccaaacctccagaaaccaaaaaaccatcaccagtctctaaatccataatcagacaagcgattttcttgctaatcgtctacttaaccttaggcgtttcaatctactcattcaatcgtgaccactactcaggaatcgaaacccatcctgtagtcgacgctctctatttctgtatcgtcactatgtgtactattggttacggtgacatcgctccgttgactccatggacaaagatcttcgctgttgttttcgtcttgttcggattcgggttcttggatattttactcagtggtgttgttaactacgttttggatcttcaagagagtatgattctcaccggaatccaaacgaggcagcatcatcaacaccatcatcatcatagattctctgctaaagattatattattgattttgagaaagggaggatgaggataaggatgaaagtttgtttagcgttatgcgtcgtcgttttgtgtatcggtgttggtgctttggttttgcatttcgtcgaggaattgggttttgttgattcggtttatttgtcggttatgtcggtgactactgttggttatggtgatcgtgctttcaaaacgcttcaagggaggctttttgcggcggtttggttacttgtttcgactcttgcggtggcgcgtgcgtttttgtatttggcggaagcgaggattgatcgccggcatcggaaagctgttaaattggctttgaatagagaaatcactgttgatgatttgctcaaagctgatacttatcaacatggtttcatcagtaaatcagagtatatagtgttgaagcttaaggaaatggggaagatcactcagaaagacattgaccaagttgtgattcagttcgagaaacttgatcctaatcaaataggaaaaatcacattacctgatcttttgggggatcctttgtgacagaagaacattctctgtctctgcttttttaggttttcttcttattcaattatctttttttttttaattcctttttaaagaaaaataactgaatatatgtagcaacagtgattcatacaaagaattatctctcagtttataagagataatatgaaaatgtatatgctttatttttgctctct

SEQ ID NO: 1840 - protein, 408 aa, Arabidopsis thaliana
MEPLISPQPRFRLQPIPENPSSSSSSASITIPRSISNTSFFHEISQERLLLHHQDLEQSVQDDKEDQDSDSDETNRFLSQTRPLHRSRTAPAMVIIKDLRTKPPETKKPSPVSKSIIRQAIFLLIVYLTLGVSIYSFNRDHYSGIETHPVVDALYFCIVTMCTIGYGDIAPLTPWTKIFAVVFVLFGFGFLDILLSGVVNYVLDLQESMILTGIQTRQHHQHHHHHRFSAKDYIIDFEKGRMRIRMKVCLALCVVVLCIGVGALVLHFVEELGFVDSVYLSVMSVTTVGYGDRAFKTLQGRLFAAVWLLVSTLAVARAFLYLAEARIDRRHRKAVKLALNREITVDDLLKADTYQHGFISKSEYIVLKLKEMGKITQKDIDQVVIQFEKLDPNQIGKITLPDLLGDPL

SEQ ID NO: 1841 - protein, 316 aa, Arabidopsis thaliana
MVIIKDLRTKPPETKKPSPVSKSIIRQAIFLLIVYLTLGVSIYSFNRDHYSGIETHPVVDALYFCIVTMCTIGYGDIAPLTPWTKIFAVVFVLFGFGFLDILLSGVVNYVLDLQESMILTGIQTRQHHQHHHHHRFSAKDYIIDFEKGRMRIRMKVCLALCVVVLCIGVGALVLHFVEELGFVDSVYLSVMSVTTVGYGDRAFKTLQGRLFAAVWLLVSTLAVARAFLYLAEARIDRRHRKAVKLALNREITVDDLLKADTYQHGFISKSEYIVLKLKEMGKITQKDIDQVVIQFEKLDPNQIGKITLPDLLGDPL

SEQ ID NO: 1842 - protein, 248 aa, Arabidopsis thaliana
MCTIGYGDIAPLTPWTKIFAVVFVLFGFGFLDILLSGVVNYVLDLQESMILTGIQTRQHHQHHHHHRFSAKDYIIDFEKGRMRIRMKVCLALCVVVLCIGVGALVLHFVEELGFVDSVYLSVMSVTTVGYGDRAFKTLQGRLFAAVWLLVSTLAVARAFLYLAEARIDRRHRKAVKLALNREITVDDLLKADTYQHGFISKSEYIVLKLKEMGKITQKDIDQVVIQFEKLDPNQIGKITLPDLLGDPL

SEQ ID NO: 1843 - DNA, 1669 bp, Arabidopsis thaliana
cgatctcataacttagccattctaaaacccattcaccgtctctgtttcgttcgccgtgattcatagtcgtctcgtctcaccgtcaccatcaccgtcttcttcttccattgacaggatcttgtttagattctgcaatggctttcaggcaaactttatctataaggtccaggcttttcgctcgtcgtaaccaaccagtttatcatattatccctcgtgagagtgatcatgaaagggattcattctgtcaagaaacatctcagagaagttaccatagctttcttcaccaaagatccgttaacaattctgatttctccaaagtttctggaggaagcttacatttgcctcttgctcccacgtctggttttgctttctatcgttatatgtcaagtgcacctggtgttggttcagagaagattggtgtgatgtctgacattgcagaagtcataaccgactcaacattgcaagatgtgccagctcaggctgctgctgctgtcagtgaagttacacttgcagctgctgactctttcttccctatcgcggcccttcagcagtgcattgatatggtgcatacattcacaggctttgagtggtgggcatccattgttgtagcaaccattttgatccgatcatcaacagttcctctcttgatcaaacaaatgaaagacacaaccaagttagcgctgatgaggccacggttggagtccatccgggaggaaatgcaaaacaagggaatggactcggttacgatggcagaaggtcaaaaaaagatgaagaatttgtttaaagaatatggtgtcactccattcaccccaatgaaagggatgtttattcagggaccgctgttcatctgctttttccttgctattcgaaatatggcagagaaggtaccttcattccaaacaggaggtgcattatggtttaccgatctaacaactcccgacagcttatacatcttgccggttataacaggattgacattcttgataaccgttgagtgtaatgcacaagaaggcatggaagggaatccgatggctggcactgtaaaaactgtttgtcgggtttttgctctcctcacagtcccgatgacaatgagttttccacaggccatattttgttactggatcacatccaacctgttctctctcatgtatggacttgtgataaagcgtcctcaagtgaagaagatgttacgcatacctgatctgcctccacctcctccaggtcaacaaccttcatttgacctgttttcagctctcaagaaaatgaaagccatgacacaggaccatacacagaaccagatagaaccaccttcgccagtaaacccgaggctttcctcaacatcgctgagtcctgttagtaagaggctcaaggctttggagagccaagtaaagggaaggaagaagaatagcagcaagaagaagtgatttaaaacggtgcatactatttttgttaagagggccaaacgaaaaaaataataaagcttttgagtcgaaagtgaacacagaattttctcactgatgaaactactctgtgagctaaaaagctggaggcagctattgtaagtttgttttgaccaattatagaatagaagattgtttttatagaaacattttggataacatatacttttttatcttgttaagtaacagaacttgaacaacattggatc

SEQ ID NO: 1844 - protein, 429 aa, Arabidopsis thaliana
MAFRQTLSIRSRLFARRNQPVYHIIPRESDHERDSFCQETSQRSYHSFLHQRSVNNSDFSKVSGGSLHLPLAPTSGFAFYRYMSSAPGVGSEKIGVMSDIAEVITDSTLQDVPAQAAAAVSEVTLAAADSFFPIAALQQCIDMVHTFTGFEWWASIVVATILIRSSTVPLLIKQMKDTTKLALMRPRLESIREEMQNKGMDSVTMAEGQKKMKNLFKEYGVTPFTPMKGMFIQGPLFICFFLAIRNMAEKVPSFQTGGALWFTDLTTPDSLYILPVITGLTFLITVECNAQEGMEGNPMAGTVKTVCRVFALLTVPMTMSFPQAIFCYWITSNLFSLMYGLVIKRPQVKKMLRIPDLPPPPPGQQPSFDLFSALKKMKAMTQDHTQNQIEPPSPVNPRLSSTSLSPVSKRLKALESQVKGRKKNSSKKK

SEQ ID NO: 1845 - protein, 347 aa, Arabidopsis thaliana
MSSAPGVGSEKIGVMSDIAEVITDSTLQDVPAQAAAAVSEVTLAAADSFFPIAALQQCIDMVHTFTGFEWWASIVVATILIRSSTVPLLIKQMKDTTKLALMRPRLESIREEMQNKGMDSVTMAEGQKKMKNLFKEYGVTPFTPMKGMFIQGPLFICFFLAIRNMAEKVPSFQTGGALWFTDLTTPDSLYILPVITGLTFLITVECNAQEGMEGNPMAGTVKTVCRVFALLTVPMTMSFPQAIFCYWITSNLFSLMYGLVIKRPQVKKMLRIPDLPPPPPGQQPSFDLFSALKKMKAMTQDHTQNQIEPPSPVNPRLSSTSLSPVSKRLKALESQVKGRKKNSSKKK

SEQ ID NO: 1846 - protein, 333 aa, Arabidopsis thaliana
MSDIAEVITDSTLQDVPAQAAAAVSEVTLAAADSFFPIAALQQCIDMVHTFTGFEWWASIVVATILIRSSTVPLLIKQMKDTTKLALMRPRLESIREEMQNKGMDSVTMAEGQKKMKNLFKEYGVTPFTPMKGMFIQGPLFICFFLAIRNMAEKVPSFQTGGALWFTDLTTPDSLYILPVITGLTFLITVECNAQEGMEGNPMAGTVKTVCRVFALLTVPMTMSFPQAIFCYWITSNLFSLMYGLVIKRPQVKKMLRIPDLPPPPPGQQPSFDLFSALKKMKAMTQDHTQNQIEPPSPVNPRLSSTSLSPVSKRLKALESQVKGRKKNSSKKK

SEQ ID NO: 1847 - DNA, 1194 bp, Arabidopsis thaliana
aaaaccgacattgacctgacagtttcttacgccggcgagcgaactcgacgaagaagacaacttccttttgttgcacctgtgagtctgcgaccatggctatgcaatctggtattgggttatcgaagattttgattctagctggagcaggttatactagtacgattctggttaagaatgggaagatggcagatattttgggtgagcttcaggctttggttaagcgatttgagaaatctggagatcatgtagatgatgattctgatgccatgactactcagatgcaacgattagcaatggaggttcggcaattggcttcgtcgcggcagataactgttatgaatggagctcagggagctgattttacaccgtttattgtcccggcagcgacattgggagcattaggctatggctatatgtggttcaagggaatttcattctctgatatcatgtgtgtaacgaagcggaacatggaaaatgcagtgtcgaacttgaccaagcatttggataccgtttcagaagctattttgaatgctaagaagcacctgagccagcggcttcagaaggtggacgataagctagacttgcagaaagatctcttaaagggagtccaggataatgtgggtttggctcttgaggatcttgctaacattggagatgattttgacgcaatgcatagcatctttggtggtatgggtgggaaattagatagcattgagtacaagcagaatattgcgaacatgggtttgatatatctgtgcgactctttgggtggagaaaatcacaagatgccggatatattgatgcaggagaagcttcggctttcagggaagtcaaacacatgtatagtacttacaaccgaagaaacttcaagctcagagggtttaaaagaaagcgataagatacagctactagatgactgctaattcaaatggtgccaatatatcatcaagcaagaagccacgagtctgatagcattgacgagaatgaccctggatttggatagaaagaaggtataggattaataggagtgattattatgtattggtatttagaatagtgtgtcctttgaggcaagtaagaagattgagaaaaataaaaagaatgtgctttttttttccttcaattttttcgcatccaacaaaaaatgaaacctatattttttctaataatatactgcattatgcacaatttgtc

SEQ ID NO: 1848 - protein, 276 aa, Arabidopsis thaliana
MAMQSGIGLSKILILAGAGYTSTILVKNGKMADILGELQALVKRFEKSGDHVDDDSDAMTTQMQRLAMEVRQLASSRQITVMNGAQGADFTPFIVPAATLGALGYGYMWFKGISFSDIMCVTKRNMENAVSNLTKHLDTVSEAILNAKKHLSQRLQKVDDKLDLQKDLLKGVQDNVGLALEDLANIGDDFDAMHSIFGGMGGKLDSIEYKQNIANMGLIYLCDSLGGENHKMPDILMQEKLRLSGKSNTCIVLTTEETSSSEGLKESDKIQLLDDC

SEQ ID NO: 1849 - protein, 274 aa, Arabidopsis thaliana
MQSGIGLSKILILAGAGYTSTILVKNGKMADILGELQALVKRFEKSGDHVDDDSDAMTTQMQRLAMEVRQLASSRQITVMNGAQGADFTPFIVPAATLGALGYGYMWFKGISFSDIMCVTKRNMENAVSNLTKHLDTVSEAILNAKKHLSQRLQKVDDKLDLQKDLLKGVQDNVGLALEDLANIGDDFDAMHSIFGGMGGKLDSIEYKQNIANMGLIYLCDSLGGENHKMPDILMQEKLRLSGKSNTCIVLTTEETSSSEGLKESDKIQLLDDC

SEQ ID NO: 1850 - protein, 246 aa, Arabidopsis thaliana
MADILGELQALVKRFEKSGDHVDDDSDAMTTQMQRLAMEVRQLASSRQITVMNGAQGADFTPFIVPAATLGALGYGYMWFKGISFSDIMCVTKRNMENAVSNLTKHLDTVSEAILNAKKHLSQRLQKVDDKLDLQKDLLKGVQDNVGLALEDLANIGDDFDAMHSIFGGMGGKLDSIEYKQNIANMGLIYLCDSLGGENHKMPDILMQEKLRLSGKSNTCIVLTTEETSSSEGLKESDKIQLLDDC

SEQ ID NO: 1851 - DNA, 1950 bp, Arabidopsis thaliana
cttgctcagggtccttagcaaggcctagaggatcaaatggacctcctgggtgtagcttgtcctcgaaatccaatccgttggtgattctgtagtactcggctccaccgaggagaacaacctcagcaactacggcgagaacaaggttgatagggatgttcttgccaaagtagttcaatgtgtttccatcaagaagcaaagcaccagtcttaaaccagacagcttcagggccacagttagcgccatatttgtttaaagcttcaggaatgatgaaaccagctgctcctaacatagcccatctcgcatggatcaattcaaaagcttggtatttagcaaagttctcaggcttctttccaagaccaaatgggtcataaccataatctccagcaacttcaccgtttaagtactctgggatctctgatctatccaaaagaccatcaggcaagaaaattctcctgtcaggaccataccacttggcgagctcactagtccccccccccctcaaagatctctcaaagaatggcttccgcggctgttgcatcgatggttcttgaccctaaagcatcaccggccttgatggatctatccaccgcagacgaagaagatctctatggccgcctcaaatcgcttgaacgacaactagagttcaccgatatccaagaagaatatgtgaaagacgagcaaaagaatctcaaacgagagctgttacgagcacaagaagaggtcaaacgaattcaatccgtgcctttggtgataggtcagttcatggagatggtagatcagaacaacggcatcgtcggatctactactggctccaattactatgtcagaattctcagcacaatcaatagagaactcttaaagccttctgcttccgtcgctcttcaccgtcactccaacgcccttgttgatgttttgcctccggaggctgattctagcatctcccttctcagccaatctgagaagcctgacgtctcctacaatgatattggaggatgcgatattcagaaacaggaaattcgtgaggctgttgaattgcctcttacccaccacgagctttacaaacagattggtattgacccacctcgtggagtcttgctctatggacctcctggtactggaaagactatgttggctaaggctgttgccaatcacacaactgctgccttcattagggttgttggatccgagtttgtgcaaaagtatctcggcgagggacctcgtatggttcgtgatgtcttccgtcttgccaaggaaaatgctccagctatcatcttcattgatgaggtagatgccatcgctactgctaggtttgatgctcaaacaggagccgatagggaagttcagcgtattctcatggagcttcttaatcagatggatggatttgaccagaccgtgaatgtcaaggtcataatggcaacaaacagggcagacactctagatcctgctctcttacgtcctggaagacttgatcgtaagattgagttcccccttcctgatagacgtcaaaagaggcttgttttccaggtatgcacctccaaaatgaaccttagcgatgaggttgacttggaagactatgtttcacggcctgataaaattagcgctgctgagatagcagcaatttgccaggaagctggtatgcatgcggtgcgaaagaacagatatgtgatactacctaaggatttcgagaagggctaccgcgcaaatgttaagaagccagacacggactttgagttttacaagtgaagagaaagcagaagtggaaccagattatggctgttgttaaaattccagtgtgttttgagaattattaaggacatggaatcaaatttgcagttaaattaagaactaagttgcatctcctaatttctgtaactcgagttcacatttgtttttagtctatcagctttttacagtttaatgtataagaaaaactggggatggtgtccttag

SEQ ID NO: 1852 - protein, 408 aa, Arabidopsis thaliana
MASAAVASMVLDPKASPALMDLSTADEEDLYGRLKSLERQLEFTDIQEEYVKDEQKNLKRELLRAQEEVKRIQSVPLVIGQFMEMVDQNNGIVGSTTGSNYYVRILSTINRELLKPSASVALHRHSNALVDVLPPEADSSISLLSQSEKPDVSYNDIGGCDIQKQEIREAVELPLTHHELYKQIGIDPPRGVLLYGPPGTGKTMLAKAVANHTTAAFIRVVGSEFVQKYLGEGPRMVRDVFRLAKENAPAIIFIDEVDAIATARFDAQTGADREVQRILMELLNQMDGFDQTVNVKVIMATNRADTLDPALLRPGRLDRKIEFPLPDRRQKRLVFQVCTSKMNLSDEVDLEDYVSRPDKISAAEIAAICQEAGMHAVRKNRYVILPKDFEKGYRANVKKPDTDFEFYK

SEQ ID NO: 1853 - protein, 400 aa, Arabidopsis thaliana
MVLDPKASPALMDLSTADEEDLYGRLKSLERQLEFTDIQEEYVKDEQKNLKRELLRAQEEVKRIQSVPLVIGQFMEMVDQNNGIVGSTTGSNYYVRILSTINRELLKPSASVALHRHSNALVDVLPPEADSSISLLSQSEKPDVSYNDIGGCDIQKQEIREAVELPLTHHELYKQIGIDPPRGVLLYGPPGTGKTMLAKAVANHTTAAFIRVVGSEFVQKYLGEGPRMVRDVFRLAKENAPAIIFIDEVDAIATARFDAQTGADREVQRILMELLNQMDGFDQTVNVKVIMATNRADTLDPALLRPGRLDRKIEFPLPDRRQKRLVFQVCTSKMNLSDEVDLEDYVSRPDKISAAEIAAICQEAGMHAVRKNRYVILPKDFEKGYRANVKKPDTDFEFYK

SEQ ID NO: 1854 - protein, 389 aa, Arabidopsis thaliana
MDLSTADEEDLYGRLKSLERQLEFTDIQEEYVKDEQKNLKRELLRAQEEVKRIQSVPLVIGQFMEMVDQNNGIVGSTTGSNYYVRILSTINRELLKPSASVALHRHSNALVDVLPPEADSSISLLSQSEKPDVSYNDIGGCDIQKQEIREAVELPLTHHELYKQIGIDPPRGVLLYGPPGTGKTMLAKAVANHTTAAFIRVVGSEFVQKYLGEGPRMVRDVFRLAKENAPAIIFIDEVDAIATARFDAQTGADREVQRILMELLNQMDGFDQTVNVKVIMATNRADTLDPALLRPGRLDRKIEFPLPDRRQKRLVFQVCTSKMNLSDEVDLEDYVSRPDKISAAEIAAICQEAGMHAVRKNRYVILPKDFEKGYRANVKKPDTDFEFYK

SEQ ID NO: 1855 - DNA, 1721 bp, Arabidopsis thaliana
aatatgcgtttaccgatcttctcgattctccaattccaaaccctaacattttgattagtccttctgggtttccacagccttgagagattcggaaccaatgatgatgcgtgctgttataaggagagctgccagtaatggctcttctccttcgttattcgcaaaatcactgcagtcttctcgtgttgctgcatcttcccctagcttgctatcaggttcagaaacaggggcatatctgcatcgtggaaatcatgctcatagctttcataaccttgctttgccagcagggaactcgggcatctcgaggtcggcgagtttagtttcttcaaccctgcaaagatgggtcaggcctttttcagctgaaactggagataccgtggaagcagttgtgcctcatatgggggaatcaattactgatggcaccttggccacctttctgaagaaacctggtgagagagtccaggctgatgaggctattgcacaaattgaaactgataaggtgacaatagatattgctagcccagcaagtggtgtaatccaagagtttctagtcaacgaaggagatactgtagaaccaggaaccaaggtcgctattatatcaaagtctgaggatactgcatctcaggttaccccctctcagaagataccagagacaactgataccaaaccttctcctcctgctgaagataagcagaagcccagagtggaaagtgctcctgtagcagagaaacccaaagcaccatcctcaccacctccacccaaacagtctgctaaagaaccgcagcttcctcctaaggaaagagaaagacgggttccgatgacaagacttcggaaacgagttgcaacaagattgaaagactctcaaaatactttcgcgttgctgacaactttcaatgaagttgatatgacaaatttgatgaagctccgatcccaatacaaggatgcattttatgaaaagcatggagtgaagttggggcttatgtctggatttattaaagctgctgttagcgcccttcagcatcaaccagttgtaaatgcagttattgacggggatgatatcatatacagagactatgtggatatcagtatcgctgttggtacctctaagggacttgtagtaccagtcataagaggtgctgataaaatgaactttgccgagatagagaagacgataaactcacttgccaagaaggcaaatgaaggaaccatatccatagatgagatggctggcggatcattcaccgtttcaaatggcggtgtctatggaagtctcataagcactccgatcattaatcctcctcagtctgccatactcggcatgcactcgattgtgtcacgtccaatggtagtaggaggaagcgtagtgcctagaccaatgatgtatgtcgcacttacgtatgatcacaggctgattgatggtagagaggctgtgtacttcctgcgccgtgtcaaggatgttgtggaggatccacaaaggcttcttcttgacatataaaagatttggtttcgaggagtcacaaagtgtctggcttttgccagttatagacctgcagtgtctttaaaacgtttgggggtaacaacaatccttatctttcaagtttctttacagtttcccgagtattgcgggattggaagaataggcctcagtgtctacgttcttactttttacacagtttgatacagatatgttcaattttgactgaataagatacccttttgaggtt

SEQ ID NO: 1856 - protein, 464 aa, Arabidopsis thaliana
MMMRAVIRRAASNGSSPSLFAKSLQSSRVAASSPSLLSGSETGAYLHRGNHAHSFHNLALPAGNSGISRSASLVSSTLQRWVRPFSAETGDTVEAVVPHMGESITDGTLATFLKKPGERVQADEAIAQIETDKVTIDIASPASGVIQEFLVNEGDTVEPGTKVAIISKSEDTASQVTPSQKIPETTDTKPSPPAEDKQKPRVESAPVAEKPKAPSSPPPPKQSAKEPQLPPKERERRVPMTRLRKRVATRLKDSQNTFALLTTFNEVDMTNLMKLRSQYKDAFYEKHGVKLGLMSGFIKAAVSALQHQPVVNAVIDGDDIIYRDYVDISIAVGTSKGLVVPVIRGADKMNFAEIEKTINSLAKKANEGTISIDEMAGGSFTVSNGGVYGSLISTPIINPPQSAILGMHSIVSRPMVVGGSVVPRPMMYVALTYDHRLIDGREAVYFLRRVKDVVEDPQRLLLDI

SEQ ID NO: 1857 - protein, 463 aa, Arabidopsis thaliana
MMRAVIRRAASNGSSPSLFAKSLQSSRVAASSPSLLSGSETGAYLHRGNHAHSFHNLALPAGNSGISRSASLVSSTLQRWVRPFSAETGDTVEAVVPHMGESITDGTLATFLKKPGERVQADEAIAQIETDKVTIDIASPASGVIQEFLVNEGDTVEPGTKVAIISKSEDTASQVTPSQKIPETTDTKPSPPAEDKQKPRVESAPVAEKPKAPSSPPPPKQSAKEPQLPPKERERRVPMTRLRKRVATRLKDSQNTFALLTTFNEVDMTNLMKLRSQYKDAFYEKHGVKLGLMSGFIKAAVSALQHQPVVNAVIDGDDIIYRDYVDISIAVGTSKGLVVPVIRGADKMNFAEIEKTINSLAKKANEGTISIDEMAGGSFTVSNGGVYGSLISTPIINPPQSAILGMHSIVSRPMVVGGSVVPRPMMYVALTYDHRLIDGREAVYFLRRVKDVVEDPQRLLLDI

SEQ ID NO: 1858 - protein, 462 aa, Arabidopsis thaliana
MRAVIRRAASNGSSPSLFAKSLQSSRVAASSPSLLSGSETGAYLHRGNHAHSFHNLALPAGNSGISRSASLVSSTLQRWVRPFSAETGDTVEAVVPHMGESITDGTLATFLKKPGERVQADEAIAQIETDKVTIDIASPASGVIQEFLVNEGDTVEPGTKVAIISKSEDTASQVTPSQKIPETTDTKPSPPAEDKQKPRVESAPVAEKPKAPSSPPPPKQSAKEPQLPPKERERRVPMTRLRKRVATRLKDSQNTFALLTTFNEVDMTNLMKLRSQYKDAFYEKHGVKLGLMSGFIKAAVSALQHQPVVNAVIDGDDIIYRDYVDISIAVGTSKGLVVPVIRGADKMNFAEIEKTINSLAKKANEGTISIDEMAGGSFTVSNGGVYGSLISTPIINPPQSAILGMHSIVSRPMVVGGSVVPRPMMYVALTYDHRLIDGREAVYFLRRVKDVVEDPQRLLLDI

SEQ ID NO: 1859 - DNA, 1129 bp, Arabidopsis thaliana
gtacttgtacaccaacccaccaaaagagataaaagaggaaacaaaaactcgaaaagagagagatatatgggtgaggtggcttatatggacgaaggagacctagaagcaatagtcagaggctactccggctccggagacgcgttttccggcgaaagttccggtacgttttcaccttcgttttgcctaccgatggagacgtctagtttctacgaaccggagatggagacaagtggcttagatgagctcggtgaactttacaaacccttttaccctttctccacacaaacgatcctcacaagctcggtctctctccctgaagattcaaaacctttccgagatgacaagaaacaacgatcacatggttgtcttttatccaacggatcaagagctgatcatatccgaatttcagaatccaaatcaaagaaaagcaagaagaatcaacagaagagagttgttgagcaagtgaaagaagagaatctgttgtcggacgcatgggcgtggcgtaaatacgggcagaaacccatcaaaggatctccatacccaaggagttattacagatgcagtagctcaaaagggtgtttggcaagaaaacaagtcgaaagaaatcctcaaaacccggagaaattcaccataacatacactaataagcacaatcatgaactaccaacccggagaaactcattagccggttcgactcgagcaaaaacttcccaacccaaaccaaccttaaccaaaaaatccgaaaaagaagttgtttcttcccctacaagtaatcctatgatcccatccgctgatgaatcttctgttgcggttcaagaaatgagcgttgcggaaacgagtacgcaccaagcggctggagcaatcgagggccgccgcttgagtaacggtttaccatcggatttgatgtccgggagcggaacttttccaagttttaccggtgacttcgatgaactattgaatagccaagagttcttcagtgggtatttatggaattactagagagcattaggtgtatatatatatatatatatctatatatattcaaacttatattatagttttagccattgaggaaaatgtatatttatgtctagtctctggagattagagcgattttcgtcttgtttcc

SEQ ID NO: 1860 - protein, 332 aa, Arabidopsis thaliana
VLVHQPTKRDKRGNKNSKRERYMGEVAYMDEGDLEAIVRGYSGSGDAFSGESSGTFSPSFCLPMETSSFYEPEMETSGLDELGELYKPFYPFSTQTILTSSVSLPEDSKPFRDDKKQRSHGCLLSNGSRADHIRISESKSKKSKKNQQKRVVEQVKEENLLSDAWAWRKYGQKPIKGSPYPRSYYRCSSSKGCLARKQVERNPQNPEKFTITYTNKHNHELPTRRNSLAGSTRAKTSQPKPTLTKKSEKEVVSSPTSNPMIPSADESSVAVQEMSVAETSTHQAAGAIEGRRLSNGLPSDLMSGSGTFPSFTGDFDELLNSQEFFSGYLWNY

SEQ ID NO: 1861 - protein, 310 aa, Arabidopsis thaliana
MGEVAYMDEGDLEAIVRGYSGSGDAFSGESSGTFSPSFCLPMETSSFYEPEMETSGLDELGELYKPFYPFSTQTILTSSVSLPEDSKPFRDDKKQRSHGCLLSNGSRADHIRISESKSKKSKKNQQKRVVEQVKEENLLSDAWAWRKYGQKPIKGSPYPRSYYRCSSSKGCLARKQVERNPQNPEKFTITYTNKHNHELPTRRNSLAGSTRAKTSQPKPTLTKKSEKEVVSSPTSNPMIPSADESSVAVQEMSVAETSTHQAAGAIEGRRLSNGLPSDLMSGSGTFPSFTGDFDELLNSQEFFSGYLWNY

SEQ ID NO: 1862 - protein, 304 aa, Arabidopsis thaliana
MDEGDLEAIVRGYSGSGDAFSGESSGTFSPSFCLPMETSSFYEPEMETSGLDELGELYKPFYPFSTQTILTSSVSLPEDSKPFRDDKKQRSHGCLLSNGSRADHIRISESKSKKSKKNQQKRVVEQVKEENLLSDAWAWRKYGQKPIKGSPYPRSYYRCSSSKGCLARKQVERNPQNPEKFTITYTNKHNHELPTRRNSLAGSTRAKTSQPKPTLTKKSEKEVVSSPTSNPMIPSADESSVAVQEMSVAETSTHQAAGAIEGRRLSNGLPSDLMSGSGTFPSFTGDFDELLNSQEFFSGYLWNY

SEQ ID NO: 1863 - DNA, 2769 bp, Arabidopsis thaliana
attttggaataacgataaataaaaataaaaaaattccatttctcgagaagaagaagaatctgctctgctctcgtttctgtttttcgctctccggccaatctactaaatagttcggacgtgattctcgagataaaggagagaaagaagaagatggagatcgataaagcgatcggagaaagtgacgataagaggttgaagactaagtacaataacgccatcttcgtcattaaaagagctcttgctctttactctattgaagaggtcgcctttagtttcaatggaggaaaagactccactgtactgttgcaccttcttagagctggttattttttgcataaaaaagagcagacttgttctaatggtggtctatcaagttttccagtccggaccatttattttgagagcccttctgccttcactgaaatcaatgcttttacatacgatgctgctcaaacttacaatctgcaacttgatatcattcgccaggatttcaaatccgggttggaggcattattaaaggctaaccctatcagagctattttccttggcgtccgaattggtgatcctactgcggttggtcaagagcaattctctcctagttcacctggatggcctccctttatgagggtgaatcctatattggattggtcctacagagatgtttgggcgtttctcctaacttgcaaggtcaagtattgcagtctttatgaccagggatatacatcaattgggagcattcatgatacggttcccaactcattattgtctgttaacgacactagtagtaaagagaaattcaaacctgcttatttgctttctgatgggagattagaaagggcagggagagtcaagaaaattgcttcactgaaaaaagacgtagataccgaatcacagaaacacgaggtgcttttggcctcagtaattgctgtcggcgatgagattctgtctggcactgttgaggatcaattaggactgtctttgtgtaagaagttgacttctgtcggttggtcggtgcaacaaaccactgtccttcggaatgatatagattctgtatccgaggaagttgaccgccaaaggtctacgagtgatatggtattcatatatggaggagttggtcctttgcattcagatgttactttggccggtgttgctaaggcatttggagttcgcctggcacctgatgaagagtttgaggaataccttaggcatcttatcagcgaccagtgcacaggtgacaggaatgagatggctcagttaccggaaggaattacagaactactgcatcatgaaaagctttctgtgccattgattaagtgccgcaatgtgattgttcttgctgctacaaacactgaggagctcgagaaccggagccgttaattagcctctaaccgccgaagatgatggtcaactccaactagtcaatcggaattccaaatctctagacggagattctgatgccggaatgccatcagcttccgaggtaattttctctttgcctgtttgttgacatagacacacgcacgcttataggaaacgaaattgcgatccatcctcgaatgctacatccatcgctcttctctgttttatcgatcaaatcggaactaactgataggatagttaggctgatatgggagtcaaatcggtgaggttctctatctggttccttttcgttgttacggatctcgtgttttgtcgcacgctctcaggggatccagatccatgtgatgcaacgaaccagagagaatttcaaaaactcagatcggatcagatcaccgttctaatcaatggttactcagaataccggattcctcttctgcaaaccatcgtggcctcttattcttcatcctcgatcgtatcctccatcttagtcctatggggtaaccctagcacacctgatcaactacttgaccagttgtatcagaatctgactcagtattcgcctggttctgcttccatctctctaattcagcaatcttcgagcagcctcaacgctagattcctccctcgttcctctgtagacactcgtgctgttttgatatgtgatgatgacgtcgagattgaccagagatcgttggagtttgcgttttcagtgtggaagtcgaatcctgatcgccttgtaggaacgtttgtgaggtcacacggtttcgatttgcaggggaaagagtggatatacactgttcatccagataaatactcgattgtgttgaccaagttcatgatgatgaaacaggattatctgtttgagtatagctgcaagggaggtgtggagatggaggagatgaggatgattgtggaccaaatgcgtaactgcgaggatatactgatgaattttgtagctgcagataggttaagggcagggccaatcatggttggagctgagagagttagggattggggagatgcgcgtaacgaagaagtagaagagagagtaagagacgtgggattgagcagtagaagagtggaacataggaagagaagagggaattgcattagggagtttcatagagttatggggaagatgccattgatgtatagttatggtaaagttgtcaactctgttggggaacaaggattgtgtcgtaaagccggcaaacttgtcttttgtgatcgagattgaccgttttttttttgtgtgtgtgtcaaaatatcgacactaataggatgtgtaagctcatcatcgtgtaatagaaattggcaactagcagcaagttaacaacatggaaaccaagttttgaaccaagcagtaaaaagtgtaaatttgagtttcgc

SEQ ID NO: 1864 - protein, 408 aa, Arabidopsis thaliana
MEIDKAIGESDDKRLKTKYNNAIFVIKRALALYSIEEVAFSFNGGKDSTVLLHLLRAGYFLHKKEQTCSNGGLSSFPVRTIYFESPSAFTEINAFTYDAAQTYNLQLDIIRQDFKSGLEALLKANPIRAIFLGVRIGDPTAVGQEQFSPSSPGWPPFMRVNPILDWSYRDVWAFLLTCKVKYCSLYDQGYTSIGSIHDTVPNSLLSVNDTSSKEKFKPAYLLSDGRLERAGRVKKIASLKKDVDTESQKHEVLLASVIAVGDEILSGTVEDQLGLSLCKKLTSVGWSVQQTTVLRNDIDSVSEEVDRQRSTSDMVFIYGGVGPLHSDVTLAGVAKAFGVRLAPDEEFEEYLRHLISDQCTGDRNEMAQLPEGITELLHHEKLSVPLIKCRNVIVLAATNTEELENRSR

SEQ ID NO: 1865 - protein, 329 aa, Arabidopsis thaliana
MGVKSVRFSIWFLFVVTDLVFCRTLSGDPDPCDATNQREFQKLRSDQITVLINGYSEYRIPLLQTIVASYSSSSIVSSILVLWGNPSTPDQLLDQLYQNLTQYSPGSASISLIQQSSSSLNARFLPRSSVDTRAVLICDDDVEIDQRSLEFAFSVWKSNPDRLVGTFVRSHGFDLQGKEWIYTVHPDKYSIVLTKFMMMKQDYLFEYSCKGGVEMEEMRMIVDQMRNCEDILMNFVAADRLRAGPIMVGAERVRDWGDARNEEVEERVRDVGLSSRRVEHRKRRGNCIREFHRVMGKMPLMYSYGKVVNSVGEQGLCRKAGKLVFCDRD

SEQ ID NO: 1866 - protein, 251 aa, Arabidopsis thaliana
MRVNPILDWSYRDVWAFLLTCKVKYCSLYDQGYTSIGSIHDTVPNSLLSVNDTSSKEKFKPAYLLSDGRLERAGRVKKIASLKKDVDTESQKHEVLLASVIAVGDEILSGTVEDQLGLSLCKKLTSVGWSVQQTTVLRNDIDSVSEEVDRQRSTSDMVFIYGGVGPLHSDVTLAGVAKAFGVRLAPDEEFEEYLRHLISDQCTGDRNEMAQLPEGITELLHHEKLSVPLIKCRNVIVLAATNTEELENRSR

SEQ ID NO: 1867 - DNA, 919 bp, Arabidopsis thaliana
aatccatatatatccttctccattagcttttgttcttctgttccaattccaattccttctgaaatattcatcgcaattcgtatcggtttaaagtaaaaaagcaatgggaggtggtaaagacaagcatcatgatgagcaagagaaaggatttcatggttttccaggaggtggacattacccacctgctcaaggaggttaccctcctcaaggttacccaccacaacaagggtatcctccagctggaggctacccacctgccggatatcctcctggtgcttaccctgctgcgcccggtggttatcctcctgcacctggaggttaccctcctgctggctatcctgcacctggagctcaccattcaggacattctggtggtggactcggaggcatgatagcaggtgcagctggtgcagccgcagcagcttatggagctcaccatgttggtcacgcctctcacaacccttacgggcatgctgtaggacatggagggtatggccatgcccctgctcatggctttggccatggtggtcatggtaaattcaagcacggaaagcatggaggcaaattcaagcacggaaagcatggaaagcacgggaaacatggcatgtttggaggaggaggcaaattcaagaagtggaagtaatctcaaaaaccccacctttgatcctctcctccagtatagtctcattacctgaccgatgtttctaataatcccccttcaaacatatttcattttaactatgtcggtttagagattactggttgaggaaataattggagagtgctagtataaaccttatggtatctgcagcagaggtttctttaatctctcaatagtagatgctttgaaacttatctataatttggtattgtaatgacagtttgtgtttggttttttcttcagtatcttctttgtttg

SEQ ID NO: 1868 - protein, 179 aa, Arabidopsis thaliana
MGGGKDKHHDEQEKGFHGFPGGGHYPPAQGGYPPQGYPPQQGYPPAGGYPPAGYPPGAYPAAPGGYPPAPGGYPPAGYPAPGAHHSGHSGGGLGGMIAGAAGAAAAAYGAHHVGHASHNPYGHAVGHGGYGHAPAHGFGHGGHGKFKHGKHGGKFKHGKHGKHGKHGMFGGGGKFKKWK

SEQ ID NO: 1869 - DNA, 1699 bp, Arabidopsis thaliana
atataatccaaacaccaaaaacaaaatggagaaattgctcgtgatctctttgctactactgatctcaacatcagttacaacttcacaatccgtgaccgatccaatagctttcctccgatgtctcgatagacaaccaacggacccaacaagtcctaactccgccgttgcttacatcccaacaaactcttctttcaccactgtcctccgcagccgtatacctaacctccgtttcgacaaacccactactccaaaacccatctccgtggtggctgccgccacgtggacacacatacaagctgctgtaggatgcgcacgtgagctctctctccaagtcaggatcagaagtggtggccacgacttcgaaggactctcttacacttccaccgtccctttctttgttctcgacatgttcggttttaaaaccgtggacgtaaatctcaccgagagaacggcttgggttgattctggtgctaccctcggagagctttactatagaatctctgagaagagcaatgttcttggatttccggcgggtttgtctaccacattgggcgttggtggacactttagcggcggaggatacggtaatctgatgagaaagtatggtttgtcggtggataacgttttcggctccgggatcgttgattcgaacggaaatatcttcaccgatcgggtttcgatgggggaagaccgtttttgggcgattcgtggaggtggtgcagcgagctacggtgttgtcctcggctacaagatccagctagtaccggtgcctgagaaagttacggtttttaaagtcggaaaaactgtcggagaaggagccgttgatcttataatgaagtggcagagttttgctcatagtacggatcggaatttgttcgtgaggttaactttgactttagtcaacggtacgaagcctggtgagaatacggttttagcgactttcattgggatgtatttaggccggtcggataagctgttgaccgtgatgaaccgggatttcccggagttgaagctgaagaaaaccgattgtaccgagatgagatggatcgattcggttctgttttgggacgattatccggttggtacaccgacttctgtgctactaaatccgctagtcgcaaaaaagttgttcatgaaacgaaaatcggactacgtgaagcgtctgatttcgagaaccgatctcggtttgatactcaagaaattggtagaggttgagaaagttaaaatgaattggaatccgtatggaggaaggatgggtgagatcccgagttcgaggacaccattcccacatagagcaggcaatttgttcaacattgagtatatcatagactggtcagaagctggagataatgtggagaagaaatatttggcactcgcgaatgaattttatagattcatgaccccgtacgtgtctagtaatccgagggaggcgtttttgaattaccgtgatcttgacatagggtcaagtgttaagtctacgtaccaggaaggtaaaatctacggggctaaatatttcaaggagaatttcgagagattagtggatattaaaaccacgattgatgcggaaaacttttggaaaaacgaacaaagcattccggttagaagataatacgtacgagatgaatgttgtgagttgtgaagttatgatcctgtgacatgaaaagaaaagaaagaaatgtattaaaatctttggtttgat

SEQ ID NO: 1870 - protein, 535 aa, Arabidopsis thaliana
YNPNTKNKMEKLLVISLLLLISTSVTTSQSVTDPIAFLRCLDRQPTDPTSPNSAVAYIPTNSSFTTVLRSRIPNLRFDKPTTPKPISVVAAATWTHIQAAVGCARELSLQVRIRSGGHDFEGLSYTSTVPFFVLDMFGFKTVDVNLTERTAWVDSGATLGELYYRISEKSNVLGFPAGLSTTLGVGGHFSGGGYGNLMRKYGLSVDNVFGSGIVDSNGNIFTDRVSMGEDRFWAIRGGGAASYGVVLGYKIQLVPVPEKVTVFKVGKTVGEGAVDLIMKWQSFAHSTDRNLFVRLTLTLVNGTKPGENTVLATFIGMYLGRSDKLLTVMNRDFPELKLKKTDCTEMRWIDSVLFWDDYPVGTPTSVLLNPLVAKKLFMKRKSDYVKRLISRTDLGLILKKLVEVEKVKMNWNPYGGRMGEIPSSRTPFPHRAGNLFNIEYIIDWSEAGDNVEKKYLALANEFYRFMTPYVSSNPREAFLNYRDLDIGSSVKSTYQEGKIYGAKYFKENFERLVDIKTTIDAENFWKNEQSIPVRR

SEQ ID NO: 1871 - protein, 527 aa, Arabidopsis thaliana
MEKLLVISLLLLISTSVTTSQSVTDPIAFLRCLDRQPTDPTSPNSAVAYIPTNSSFTTVLRSRIPNLRFDKPTTPKPISVVAAATWTHIQAAVGCARELSLQVRIRSGGHDFEGLSYTSTVPFFVLDMFGFKTVDVNLTERTAWVDSGATLGELYYRISEKSNVLGFPAGLSTTLGVGGHFSGGGYGNLMRKYGLSVDNVFGSGIVDSNGNIFTDRVSMGEDRFWAIRGGGAASYGVVLGYKIQLVPVPEKVTVFKVGKTVGEGAVDLIMKWQSFAHSTDRNLFVRLTLTLVNGTKPGENTVLATFIGMYLGRSDKLLTVMNRDFPELKLKKTDCTEMRWIDSVLFWDDYPVGTPTSVLLNPLVAKKLFMKRKSDYVKRLISRTDLGLILKKLVEVEKVKMNWNPYGGRMGEIPSSRTPFPHRAGNLFNIEYIIDWSEAGDNVEKKYLALANEFYRFMTPYVSSNPREAFLNYRDLDIGSSVKSTYQEGKIYGAKYFKENFERLVDIKTTIDAENFWKNEQSIPVRR

SEQ ID NO: 1872 - protein, 400 aa, Arabidopsis thaliana
MFGFKTVDVNLTERTAWVDSGATLGELYYRISEKSNVLGFPAGLSTTLGVGGHFSGGGYGNLMRKYGLSVDNVFGSGIVDSNGNIFTDRVSMGEDRFWAIRGGGAASYGVVLGYKIQLVPVPEKVTVFKVGKTVGEGAVDLIMKWQSFAHSTDRNLFVRLTLTLVNGTKPGENTVLATFIGMYLGRSDKLLTVMNRDFPELKLKKTDCTEMRWIDSVLFWDDYPVGTPTSVLLNPLVAKKLFMKRKSDYVKRLISRTDLGLILKKLVEVEKVKMNWNPYGGRMGEIPSSRTPFPHRAGNLFNIEYIIDWSEAGDNVEKKYLALANEFYRFMTPYVSSNPREAFLNYRDLDIGSSVKSTYQEGKIYGAKYFKENFERLVDIKTTIDAENFWKNEQSIPVRR

SEQ ID NO: 1873 - DNA, 1627 bp, Arabidopsis thaliana
gtttctaactttttcttatgtaacccacccacatgcttgttcttctttctatcatcttcttacacgactacgacttgtctttctttacccttttttttttttgttttgtttaaagtttctctctttgtgggttcttgttgttagagaaatcagctgccccagatcagagcttggttttggatttaggattgtttgttaggttttacaatggactccccacaatctgttgtttcaccattcaagattggtgagtcagagaatgagaactcaaattctgtgcagagttctggaaaccaatcgaatggcataaattccaatgggaaagattctaaaagttgtggccggcaagaccttgttggtgctcttgaggtttatgtccatcaggcaagggatatccataacatttgtatatatcacaagcaagacgtttatgccaagctttgccttacaagtgatcctgataagtctgtctcgaccaaaatcatcaatggcggtgggaggaatccggtttttgatgacaatgttaagcttgatgtcagggttctggacacttccctcaaatgtgagatttacatgatgagcagggtgaagaattatcttgaggaccagctgcttggttttactctggttcctatgtcggaactgctcttcaagaatgggaaactcgagaaagagttctctctttcttccactgatctctaccattcgccagctggttttgttcaattgtcactctcctattatggatcctaccctgacgtgatggctattccctctatgccttcgtctgtttctattgatgaaactaccaaggatccagaagggtctgaatcagttccgggtgagttggataagatagagtttccagatcctaatgttgctaatgaaaatgagaagatggtttccgagtattttgggatctcttgttccactattgactcagaaacttctgacagcttggttacttccgatgctgagaatcatgtgactaattctgtcacttctatactgaagcaagattcacctgagagcagcaatgcaacaaatggagctgcttctcctcacgcttcagctcactccgccacagaaacaccaaaccatgaacatctctctgtcgtgaactccaaagcgagttcccaggagtcagagagcgaggcttctggtgagacatctgaggagaagactgtgaaatccgtcctcactgtgaaggttgagccagagtcaaaggtggtgcagcaggatatagccgacatgtacatgaaaagcatgcaacagtttacagattcactggctaagatgaagcttcctctggacattgacagcccaacaaaatcagaaaattcaagctctgattctcagaagctgccaacaccaaagagcaacaacggatcccgtgtgttctatgggagcaggcctttcttctgagcatctcttttaccaagttcagagaaagaacgcaggtcacccttagacttttctaatgaagaaagactaatcctaatgatgtaattttataatgtactatttcatgttgtatctcccatctggtcagcttgatgctttagttgatgtgagttattattacgtatcactagcctttactctattagaactatgtacgcattat

SEQ ID NO: 1874 - protein, 405 aa, Arabidopsis thaliana
MDSPQSVVSPFKIGESENENSNSVQSSGNQSNGINSNGKDSKSCGRQDLVGALEVYVHQARDIHNICIYHKQDVYAKLCLTSDPDKSVSTKIINGGGRNPVFDDNVKLDVRVLDTSLKCEIYMMSRVKNYLEDQLLGFTLVPMSELLFKNGKLEKEFSLSSTDLYHSPAGFVQLSLSYYGSYPDVMAIPSMPSSVSIDETTKDPEGSESVPGELDKIEFPDPNVANENEKMVSEYFGISCSTIDSETSDSLVTSDAENHVTNSVTSILKQDSPESSNATNGAASPHASAHSATETPNHEHLSVVNSKASSQESESEASGETSEEKTVKSVLTVKVEPESKVVQQDIADMYMKSMQQFTDSLAKMKLPLDIDSPTKSENSSSDSQKLPTPKSNNGSRVFYGSRPFF

SEQ ID NO: 1875 - protein, 283 aa, Arabidopsis thaliana
MMSRVKNYLEDQLLGFTLVPMSELLFKNGKLEKEFSLSSTDLYHSPAGFVQLSLSYYGSYPDVMAIPSMPSSVSIDETTKDPEGSESVPGELDKIEFPDPNVANENEKMVSEYFGISCSTIDSETSDSLVTSDAENHVTNSVTSILKQDSPESSNATNGAASPHASAHSATETPNHEHLSVVNSKASSQESESEASGETSEEKTVKSVLTVKVEPESKVVQQDIADMYMKSMQQFTDSLAKMKLPLDIDSPTKSENSSSDSQKLPTPKSNNGSRVFYGSRPFF

SEQ ID NO: 1876 - protein, 282 aa, Arabidopsis thaliana
MSRVKNYLEDQLLGFTLVPMSELLFKNGKLEKEFSLSSTDLYHSPAGFVQLSLSYYGSYPDVMAIPSMPSSVSIDETTKDPEGSESVPGELDKIEFPDPNVANENEKMVSEYFGISCSTIDSETSDSLVTSDAENHVTNSVTSILKQDSPESSNATNGAASPHASAHSATETPNHEHLSVVNSKASSQESESEASGETSEEKTVKSVLTVKVEPESKVVQQDIADMYMKSMQQFTDSLAKMKLPLDIDSPTKSENSSSDSQKLPTPKSNNGSRVFYGSRPFF

SEQ ID NO: 1877 - DNA, 1134 bp, Arabidopsis thaliana
acaacaataaacactcatcgattaaatcttcttcaccggaaaaaatgccttcgatgccagaggaaccaatcctaacaccaacaccagatcgattctgtatgttcccaatccaatacccacagatttgggagatgtacaagaaagccgaagcatccttctggacagccgaagaagtcgatctctctcaagacaatcgcgactgggaaaactcactaaccaacgacgaacgtcacttcattaaacacgtcctcgccttcttcgccgcatcagacggaatcgttctcgagaatctctcaactagattcatgtccgatgttcagatctcagaagctcgtgccttctacggattccaaatcgcgattgagaatattcactccgagatgtatagtctccttctcgacacgtatatcaaagacaacaaagagagagatcatctttttcgtgcaatcgaaaccattccttgtgacgaaaaaagcagaatgggctatgaaatggatcaacggatctcaaagcttcgctgagagaatcgtagcgtttgcttgcgttgaaggtatattcttctccggtagcttttgttcgatattctggttgaagaaacgaggtttaatgcctggactcactttttcaaacgaattgatttcgagagacgaaggtcttcactgtgatttcgcttgtttgatatatagtcttcttagaactaagtttgatgaagatcgtttgaaagcgattgtttgtgatgctgttgagattgagagagagtttgtttgtgacgcgctttcttgtgccttggttgggatgaatcgtgagttgatgagtcagtacattgagttcgttgctgataggttgttggctgcgcttgggtgtggtaaggtgtatggtgtgactaatccttttgattggatggaattgatttcgcttcagggtaagaccaacttttttgagaagagagttggtgagtatcagaaagcttctgttatgtctagtgttcatggaaacgctgcgtttaatgatgatcatgtcttcaagcttgacgaggatttttagattttgcttacttgctttatttttagttttgtaattttcagtataatgaaaaacagatgaagtttaatttgataatggacatttaattcc

SEQ ID NO: 1878 - protein, 243 aa, Arabidopsis thaliana
MFRSQKLVPSTDSKSRLRIFTPRCIVSFSTRISKTTKREIIFFVQSKPFLVTKKAEWAMKWINGSQSFAERIVAFACVEGIFFSGSFCSIFWLKKRGLMPGLTFSNELISRDEGLHCDFACLIYSLLRTKFDEDRLKAIVCDAVEIEREFVCDALSCALVGMNRELMSQYIEFVADRLLAALGCGKVYGVTNPFDWMELISLQGKTNFFEKRVGEYQKASVMSSVHGNAAFNDDHVFKLDEDF

SEQ ID NO: 1879 - protein, 185 aa, Arabidopsis thaliana
MKWINGSQSFAERIVAFACVEGIFFSGSFCSIFWLKKRGLMPGLTFSNELISRDEGLHCDFACLIYSLLRTKFDEDRLKAIVCDAVEIEREFVCDALSCALVGMNRELMSQYIEFVADRLLAALGCGKVYGVTNPFDWMELISLQGKTNFFEKRVGEYQKASVMSSVHGNAAFNDDHVFKLDEDF

SEQ ID NO: 1880 - protein, 172 aa, Arabidopsis thaliana
NNKHSSIKSSSPEKMPSMPEEPILTPTPDRFCMFPIQYPQIWEMYKKAEASFWTAEEVDLSQDNRDWENSLTNDERHFIKHVLAFFAASDGIVLENLSTRFMSDVQISEARAFYGFQIAIENIHSEMYSLLLDTYIKDNKERDHLFRAIETIPCDEKSRMGYEMDQRISKLR

SEQ ID NO: 1881 - DNA, 1551 bp, Arabidopsis thaliana
cttgtccgaaggcaactgtttgatatttttctctaacagatctgtggatcttaacacttctctaatgcttataatgacgagatctaagcatgagaaggaagagataagaagctcatgacaagaatctgaagaaaattaaatttgtttttcacttatcgccgccattgttgttctacactgagcttagacagttgacacctgtaatccaaaattcaaaagtttatcactgcaacatactcaggctttttacttaattatcatagctctgataaagtatgagagtagcgttacaatggaggttgacgaagacattgagttacaaaaacatcaagaacaacaaagcagaaagctacaaagattctcagaggacaacactggactaatgaggaattggaacaatccatcgtctcgtatcattagggtttcacgagcttctggtggcaaagatagacatagcaaagtgttaacatcaaaaggtttaagagatcgaagaatacgtctctcagttgctacagcaatccagttctatgatcttcaagatcgtcttggatttgatcagccaagtaaagctgttgaatggttaatcaatgcagcttctgattcaatcactgatcttcctttgcttaacacaaattttgatcatcttgatcagaatcagaatcagaccaaatctgcttgtagtagtggaacatctgagagttcgctgttgtcgttatcaagaacagagattcgtgggaaagcaagagagagagctagagaaagaacagctaaagacagagataaagatttgcagaatgctcatagctcattcactcagcttctcactggtggttttgaccaacaaccgagtaaccggaattggaccggtggttctgattgctttaacccggttcagctgcaaataccaaactcttcctctcaagagccaatgaatcacccattctcctttgtacctgattacaactttggaatctcttcttcttcttctgccattaatggtggttacagtagtagggggacccttcagtccaattcacaatctctctttctgaataacaacaacaacattactcaaaggtcatcgatttcttcgtcttcttcttcctcttctccaatggatagtcaaagcatttcctttttcatggctacacctccacctcttgaccaccataaccaccagcttccggagacttttgatggtcggctatatctttattacggcgaaggaaaccggagctctgatgacaaggcaaaggaaaggagatagtaaaaacaaaatgcttcctttcatctctcgccaatcttggagtggaagtgtaatttgtgggaagacgatgtttgtgcagccctgagcatgtatatgaatcctccattgcaatcataagccaggttgattgtatgttcagaccgcgaggaattgtttttgtttgatgagaaacatgtgttatgtaatgaatcatatatatgtctctatatgtgttcatgttcattgtcataaactttgtccgaaactcggaccaatgttttcaggtcatcctcattctgttggct

SEQ ID NO: 1882 - protein, 294 aa, Arabidopsis thaliana
MRNWNNPSSRIIRVSRASGGKDRHSKVLTSKGLRDRRIRLSVATAIQFYDLQDRLGFDQPSKAVEWLINAASDSITDLPLLNTNFDHLDQNQNQTKSACSSGTSESSLLSLSRTEIRGKARERARERTAKDRDKDLQNAHSSFTQLLTGGFDQQPSNRNWTGGSDCFNPVQLQIPNSSSQEPMNHPFSFVPDYNFGISSSSSAINGGYSSRGTLQSNSQSLFLNNNNNITQRSSISSSSSSSSPMDSQSISFFMATPPPLDHHNHQLPETFDGRLYLYYGEGNRSSDDKAKERR

SEQ ID NO: 1883 - protein, 324 aa, Arabidopsis thaliana
MEVDEDIELQKHQEQQSRKLQRFSEDNTGLMRNWNNPSSRIIRVSRASGGKDRHSKVLTSKGLRDRRIRLSVATAIQFYDLQDRLGFDQPSKAVEWLINAASDSITDLPLLNTNFDHLDQNQNQTKSACSSGTSESSLLSLSRTEIRGKARERARERTAKDRDKDLQNAHSSFTQLLTGGFDQQPSNRNWTGGSDCFNPVQLQIPNSSSQEPMNHPFSFVPDYNFGISSSSSAINGGYSSRGTLQSNSQSLFLNNNNNITQRSSISSSSSSSSPMDSQSISFFMATPPPLDHHNHQLPETFDGRLYLYYGEGNRSSDDKAKERR

SEQ ID NO: 1884 - DNA, 1661 bp, Arabidopsis thaliana
atttgtgtaatcatatgaaaagaaaagtaaggaattttccattactctctctcacttctctctctctaattctcaccaagaacccagaattgagaataagaatctatagatcattatgctcacctctctgctcttgtttaagtgatgagctgaatctaacaaacgttcacacgtgttaacacccacacgtgcgacttcttctttattctcttcaaagcctcttcttgaactagaagtttcttttgaacatgtatagtccaaatactctagttgctttagagtcattgccaaacttgaacttgttttatccttcttctctttcattagcttgagcaagctgaagcttctttgtgctttctccaagctccactttaaagttgaatcatactcaaacatttactgacagaggactgattcatagaatatttaacatcataagatgatcttctcaataataatggcggttcttttggcccaagcttcaagtttgccaaagaagactgtccagagttcggatggggatattgtagactgcttcgacgtgagagatcagccttcattggatcacccactattgcagaatcatgaaattcagggcgcacccgccacaggattaccatatatgatcaacaaagcgggaaaaagaagagtttggcaggtttggaaccaaaacggcaccagctgtcctgacgaaactatacccataagacgtagcgtggtcggggctaaaagatttaagaaaaaacattggacagatgttcgagtcaatcgccgaacagttccatacgccgctgaggagggacacgagtacgcgattggagaggtggtatatctgcggggaatatatggaacagtggcaactatgaacgtttggaatccatctgtagaacatggaacaaacgaatttagtttgtcccaaatttggctcgtcgctggacattacaacgattccgacctcaacacagtagaggctggttggcaggttttcccggatcattatcatgacagccagccacgacttttcgtctattggacgaaggacacatatcagaagacagggtgtctcaacctcgagtgccctggttttgttcaagtcactagcgagtttgccattggcagtgcattctctcctacatcttcttacggcggcagccagtacgacatcacgatgtacatatggaaggatactaaagatggcaactggtggctgagcattgactcctcagtgattgggtattggccggcgaggcttttcacgcatttagctcacgggccggcgacgttggtacagtggggaggcgagattgtaaactctcgcagctatggccagcacactaccacacagatgggctcgggacattttgcagaggaaggcttcggcaaagcaggtagcttccgaaacctgaaaattattgactacctctcgtacatgcaaccagtccaagagttcatcctgcaaacgaagaaccccacatgttatactgccataaagggatacagcgaggagtgggggagtcatttctactacggcggaccgggatataacgccctgtgtccatagtgtttggacattaggataaacttatttctttatgatatatgataaaactagagtttggagtgtttaatgacgttaaataaaaaactagagtttggatttc

SEQ ID NO: 1885 - protein, 373 aa, Arabidopsis thaliana
MIFSIIMAVLLAQASSLPKKTVQSSDGDIVDCFDVRDQPSLDHPLLQNHEIQGAPATGLPYMINKAGKRRVWQVWNQNGTSCPDETIPIRRSVVGAKRFKKKHWTDVRVNRRTVPYAAEEGHEYAIGEVVYLRGIYGTVATMNVWNPSVEHGTNEFSLSQIWLVAGHYNDSDLNTVEAGWQVFPDHYHDSQPRLFVYWTKDTYQKTGCLNLECPGFVQVTSEFAIGSAFSPTSSYGGSQYDITMYIWKDTKDGNWWLSIDSSVIGYWPARLFTHLAHGPATLVQWGGEIVNSRSYGQHTTTQMGSGHFAEEGFGKAGSFRNLKIIDYLSYMQPVQEFILQTKNPTCYTAIKGYSEEWGSHFYYGGPGYNALCP

SEQ ID NO: 1886 - protein, 367 aa, Arabidopsis thaliana
MAVLLAQASSLPKKTVQSSDGDIVDCFDVRDQPSLDHPLLQNHEIQGAPATGLPYMINKAGKRRVWQVWNQNGTSCPDETIPIRRSVVGAKRFKKKHWTDVRVNRRTVPYAAEEGHEYAIGEVVYLRGIYGTVATMNVWNPSVEHGTNEFSLSQIWLVAGHYNDSDLNTVEAGWQVFPDHYHDSQPRLFVYWTKDTYQKTGCLNLECPGFVQVTSEFAIGSAFSPTSSYGGSQYDITMYIWKDTKDGNWWLSIDSSVIGYWPARLFTHLAHGPATLVQWGGEIVNSRSYGQHTTTQMGSGHFAEEGFGKAGSFRNLKIIDYLSYMQPVQEFILQTKNPTCYTAIKGYSEEWGSHFYYGGPGYNALCP

SEQ ID NO: 1887 - protein, 312 aa, Arabidopsis thaliana
MINKAGKRRVWQVWNQNGTSCPDETIPIRRSVVGAKRFKKKHWTDVRVNRRTVPYAAEEGHEYAIGEVVYLRGIYGTVATMNVWNPSVEHGTNEFSLSQIWLVAGHYNDSDLNTVEAGWQVFPDHYHDSQPRLFVYWTKDTYQKTGCLNLECPGFVQVTSEFAIGSAFSPTSSYGGSQYDITMYIWKDTKDGNWWLSIDSSVIGYWPARLFTHLAHGPATLVQWGGEIVNSRSYGQHTTTQMGSGHFAEEGFGKAGSFRNLKIIDYLSYMQPVQEFILQTKNPTCYTAIKGYSEEWGSHFYYGGPGYNALCP

SEQ ID NO: 1888 - DNA, 2215 bp, Arabidopsis thaliana
aataaccgccaatttccttcctctctaaatctctccgatgatgctcggtggaaagtcctccgccggaggccgtacaagccttagagtcgccgtcgctggcgacaaaggaaccggtaaatccagcctgatctctgccgtcgcctccgagactttcccggataatgtccctcgcgtccttcctccgattactctccctgccgacgctttccctgactatatacctatcaccatcgtcgatactccctcaagtattgacaatcggattaagctcattgaagaattcaggaaggctgatgtggtccttctcacttatgcttgtgatcagccttcaactcttgatcgcttgagttcttattggctccctgagctccggcgtttagagatcaaagcacctgtgattgtggtgggctgcaagcttgatttacgtgatgaacgatctcccgccagactagaggatattatgtcaccaatcatgaaggagtaccgagagatagaaacctgcattgagtgttctgcattgacccttatacaggtccctgatgttttctattttgcatcaaaagcggtccttcatccaacatttcccttgtttgatcaagaaaaacaatgtttgaaaccccgcctccgcagggcagttcaaagaatattcaacctttgtgatcatgatttggatggtgcccttaatgacgcagagttgaatgatttccaggtaaattgttttggtgccccacttgaccctgttgaacttatgggagttaagaaagtggtacaagaaaggcaaccagatggagtaactgaccttggtcttacacttccgggtttcctttttcttttctctctattcatcgagagaggtcgccctgagacagcatgggctatcctacggaaatgtggttacaatgattctttagaactccatgctgagttactacccgttccagctaagcagtctcctgatcagagcatcgagctaacaaacgaagctatggactttctgagtggaatcttccagttatatgaccttgataatgatggagcgttacagccagctgagctagatgatttatttcaaacagctccagatagtccttggcttgaggatccttataaagaagctgcagagaaaacgccaggcggaagtttgacaatcaatgggtttctgtctgagtgggctctaatgacacttctagatcctcgaaaaagtttggcaaacctgacatatatcggttatggtcacgacccagcttcaacattttctgttactaggaaaagatcagtggatcgtaagaaacagcgaacagaaaggaatgtgtttcagtgctttgtatttggccctaaaaaatctagaaagtctgcactcctcgattctttcttaggaaggaaattttcaaacagctataaggcaacaataggtgaacgatatgcagcaaatgtcattgatcagcctgggggttctaagaaaaccctcatattgcgggaaataccagaggacagagttaaaaagtttctgacaaacaaggaatcgttggcagcatgtgatgttgctgtggttgtctatgacagttcggacgtatactcatggagaaaggcgagggaaatactgatggaggtagcaaggaggggagaagagagaggttacgggaccccttgtcttctggttgcggccaaagatgatttggatccatatccaatgtcagtgcaggagtctgatagggtttgcatggaattggggatagacatccctgtgtcattaagcatgaaacttggggagccaaatagtctcttctcaagaatcgtgagtacagcagagaaccctcacatgagcattccagagacagagtcaggaagaagaagcaggaatatccgccaactcgtgaatagctcacttctatttgtctcagtgggtacagctgttgggtttgccggattagcagcttaccgtgcttattccgcaaggaagaatgcttgaagctttttgcccccaaaaaaaacttagtaataaaacacttgatgtttttctttagcgattcatctgctttgtatagaataaaggtaaccctcgttgatggcttcaaatctccgctccgtcacacctgaattttggagtttttagatacaattattatgtgtgtgggttggatttttttctcatcttcgaggaatctttcttattctttgtttctttttttcattgatgatataccattttatcaac

SEQ ID NO: 1889 - protein, 643 aa, Arabidopsis thaliana
MMLGGKSSAGGRTSLRVAVAGDKGTGKSSLISAVASETFPDNVPRVLPPITLPADAFPDYIPITIVDTPSSIDNRIKLIEEFRKADVVLLTYACDQPSTLDRLSSYWLPELRRLEIKAPVIVVGCKLDLRDERSPARLEDIMSPIMKEYREIETCIECSALTLIQVPDVFYFASKAVLHPTFPLFDQEKQCLKPRLRRAVQRIFNLCDHDLDGALNDAELNDFQVNCFGAPLDPVELMGVKKVVQERQPDGVTDLGLTLPGFLFLFSLFIERGRPETAWAILRKCGYNDSLELHAELLPVPAKQSPDQSIELTNEAMDFLSGIFQLYDLDNDGALQPAELDDLFQTAPDSPWLEDPYKEAAEKTPGGSLTINGFLSEWALMTLLDPRKSLANLTYIGYGHDPASTFSVTRKRSVDRKKQRTERNVFQCFVFGPKKSRKSALLDSFLGRKFSNSYKATIGERYAANVIDQPGGSKKTLILREIPEDRVKKFLTNKESLAACDVAVVVYDSSDVYSWRKAREILMEVARRGEERGYGTPCLLVAAKDDLDPYPMSVQESDRVCMELGIDIPVSLSMKLGEPNSLFSRIVSTAENPHMSIPETESGRRSRNIRQLVNSSLLFVSVGTAVGFAGLAAYRAYSARKNA

SEQ ID NO: 1890 - protein, 642 aa, Arabidopsis thaliana
MLGGKSSAGGRTSLRVAVAGDKGTGKSSLISAVASETFPDNVPRVLPPITLPADAFPDYIPITIVDTPSSIDNRIKLIEEFRKADVVLLTYACDQPSTLDRLSSYWLPELRRLEIKAPVIVVGCKLDLRDERSPARLEDIMSPIMKEYREIETCIECSALTLIQVPDVFYFASKAVLHPTFPLFDQEKQCLKPRLRRAVQRIFNLCDHDLDGALNDAELNDFQVNCFGAPLDPVELMGVKKVVQERQPDGVTDLGLTLPGFLFLFSLFIERGRPETAWAILRKCGYNDSLELHAELLPVPAKQSPDQSIELTNEAMDFLSGIFQLYDLDNDGALQPAELDDLFQTAPDSPWLEDPYKEAAEKTPGGSLTINGFLSEWALMTLLDPRKSLANLTYIGYGHDPASTFSVTRKRSVDRKKQRTERNVFQCFVFGPKKSRKSALLDSFLGRKFSNSYKATIGERYAANVIDQPGGSKKTLILREIPEDRVKKFLTNKESLAACDVAVVVYDSSDVYSWRKAREILMEVARRGEERGYGTPCLLVAAKDDLDPYPMSVQESDRVCMELGIDIPVSLSMKLGEPNSLFSRIVSTAENPHMSIPETESGRRSRNIRQLVNSSLLFVSVGTAVGFAGLAAYRAYSARKNA

SEQ ID NO: 1891 - protein, 502 aa, Arabidopsis thaliana
MSPIMKEYREIETCIECSALTLIQVPDVFYFASKAVLHPTFPLFDQEKQCLKPRLRRAVQRIFNLCDHDLDGALNDAELNDFQVNCFGAPLDPVELMGVKKVVQERQPDGVTDLGLTLPGFLFLFSLFIERGRPETAWAILRKCGYNDSLELHAELLPVPAKQSPDQSIELTNEAMDFLSGIFQLYDLDNDGALQPAELDDLFQTAPDSPWLEDPYKEAAEKTPGGSLTINGFLSEWALMTLLDPRKSLANLTYIGYGHDPASTFSVTRKRSVDRKKQRTERNVFQCFVFGPKKSRKSALLDSFLGRKFSNSYKATIGERYAANVIDQPGGSKKTLILREIPEDRVKKFLTNKESLAACDVAVVVYDSSDVYSWRKAREILMEVARRGEERGYGTPCLLVAAKDDLDPYPMSVQESDRVCMELGIDIPVSLSMKLGEPNSLFSRIVSTAENPHMSIPETESGRRSRNIRQLVNSSLLFVSVGTAVGFAGLAAYRAYSARKNA

SEQ ID NO: 1892 - DNA, 1605 bp, Arabidopsis thaliana
gtcgtcgtccacaagaacaaccaaatttgtttccgtcttctgctaacatatcctctttttcatctgggaaccctaatttcttgactaacttagggttttatttatccatttgagatactctgtaattgaaaggttgaatttttagaagagacatgggaggttcgtcggagacaaagatcttacaagaactcatactttacgcggcgagcgctgctttcagctgcttggttctctttgcgggtcttcgtcatctcgatcctaatcgtgaggcttctaaaaaagctctcgagcataagaaggaaatctctaaacgtttgggtcgtcctcttgttcagaccaatccatacgaggatgtaattgcatgtgatgtgataaatccagaccacattgatgtggagtttggttctattggagggttggagaccatcaagcaggctttgtatgagcttgtgattttaccactgaaaagacctgagctttttgcttacgggaagcttcttggacctcaaaaaggtgtcttgctctatggacctcctggtactggaaagactatgcttgctaaggctattgccaaagagtcaggagctgttttcattaatgttagggtttcaaacctgatgagcaagtggtttggagatgctcagaagcttgtttctgctgtgtttagcttggcctacaaactccaacctgctatcatttttattgatgaggttgagagctttcttggtcagcgccgttcaacagatcatgaagctatggccaacatgaagactgagtttatggctttatgggatggattctctactgatccgcatgcaagggttatggttcttgctgcaactaacagaccgtcagagcttgatgaagcaatattaaggcgtcttcctcaggcctttgagattggaatacctgatcgccgggagagagctgagatattgaaagtgactctgaaaggagagagggtggaacctgatattgactttgatcacatagctcgcttatgcgaaggctataccggatcagacatttttgagctatgcaagaaagcagcttacttccctatcagagaaatcctagatgcagagagaaaggggaaaccatgtttggaccctaggccattatcacagttagatttggagaaggttcttgcaacgtcaaagaagacacaagttgcagcaggcgagtactcattgagctcgcagtcctcggcttggagaggctcaagggaaccagatgaggtccaggcagcgataagtgggatctcgaagcttctagtttctcagatcattaacctacagtcagaatctcaggattcatggcagcgggatcccgaagaagattcccgatgaaattccggatcacttttataaacgttctggtgttttcattggaagtttagaatttgtcacacacttcagtttattctgtaaaacttttcttttctttttggtaggatcatttgataacttatgactgtactaaaaagtctctcaagtttctacattactgaatctctcttgttcataatatggccactgttctcactcatgggttacttaagtgttaactctttcttcactttacttaatcgttaatggaaccttg

SEQ ID NO: 1893 - protein, 398 aa, Arabidopsis thaliana
MGGSSETKILQELILYAASAAFSCLVLFAGLRHLDPNREASKKALEHKKEISKRLGRPLVQTNPYEDVIACDVINPDHIDVEFGSIGGLETIKQALYELVILPLKRPELFAYGKLLGPQKGVLLYGPPGTGKTMLAKAIAKESGAVFINVRVSNLMSKWFGDAQKLVSAVFSLAYKLQPAIIFIDEVESFLGQRRSTDHEAMANMKTEFMALWDGFSTDPHARVMVLAATNRPSELDEAILRRLPQAFEIGIPDRRERAEILKVTLKGERVEPDIDFDHIARLCEGYTGSDIFELCKKAAYFPIREILDAERKGKPCLDPRPLSQLDLEKVLATSKKTQVAAGEYSLSSQSSAWRGSREPDEVQAAISGISKLLVSQIINLQSESQDSWQRDPEEDSR

SEQ ID NO: 1894 - protein, 265 aa, Arabidopsis thaliana
MLAKAIAKESGAVFINVRVSNLMSKWFGDAQKLVSAVFSLAYKLQPAIIFIDEVESFLGQRRSTDHEAMANMKTEFMALWDGFSTDPHARVMVLAATNRPSELDEAILRRLPQAFEIGIPDRRERAEILKVTLKGERVEPDIDFDHIARLCEGYTGSDIFELCKKAAYFPIREILDAERKGKPCLDPRPLSQLDLEKVLATSKKTQVAAGEYSLSSQSSAWRGSREPDEVQAAISGISKLLVSQIINLQSESQDSWQRDPEEDSR

SEQ ID NO: 1895 - protein, 243 aa, Arabidopsis thaliana
MSKWFGDAQKLVSAVFSLAYKLQPAIIFIDEVESFLGQRRSTDHEAMANMKTEFMALWDGFSTDPHARVMVLAATNRPSELDEAILRRLPQAFEIGIPDRRERAEILKVTLKGERVEPDIDFDHIARLCEGYTGSDIFELCKKAAYFPIREILDAERKGKPCLDPRPLSQLDLEKVLATSKKTQVAAGEYSLSSQSSAWRGSREPDEVQAAISGISKLLVSQIINLQSESQDSWQRDPEEDSR

SEQ ID NO: 1896 - DNA, 2086 bp, Arabidopsis thaliana
ggattttctatctctctctctctctctctctctcttcttcacacacacagagacatcatcctcttcacacccttttcttttgcacaatcgcattcactatctcttctctctcttttgtgtcacatccttctcttctcttctaagttctaatcttgtactatcttgttctaccatggcttcttctgaaacaagaatgaacaaggcaagagaaaaagaagaagccatagcaaatggagtgaagttgagagcacttcaagcgagtcttatgcagatgaagtcaagcccatcttccaattacagtctcagaaacccttcttcctcttctgctgcttcacctgcttctcgtcctctccctaacctctctgctcatgattaccctgttttcactcctagctatgaagatgagcctgtgtctgcatttcatcacaagaatctcactttatctgagacttgggatgaagatggtgttggtttagtagatggagatacttatctctctgattcttacaaaacctcaacttcaagaaagactgtgatgatgcctcatcaagattctcatcatcatgtttacactatgtcggacgctctcagatctccaccgttacatttttatacaaccggtagaagcaactgtggctcggtcgactttagatcggtctcttcttgcaatgactacaataaacaaaaaggtttcgacacgaagagcttgaagagctctaatcttgttgtgcccttgacggattcgcactctgctgttgtttcttctcagccaagaaaccgtggaggtagagtaatgtcttggttattccctaagttaaagaagaaacaaaagagtaattcgatctttaattcacctagtataactgagaagtcagaggaagtttctgaggtgttgaaggattctggttctggtgttgagaagttgaagagagaattgatggaagcaaacagaagtagggatgctgcgttaacacaagtctcagagatgaaatcttcattgggagagttaagtgagaagcttcagtacttggaaagttactgtgacaatttaaagaaagctttgagagaagcaacagaagtagtgtcacaggagaatagtggtggaagaagctcagggaaaaagaactcagagatgccagtgagtgaagaagtgatggttgaagggttcttgcagattgtatcagaagcaagattatcgataaagcagttcttgaaaacattagtttcagagattgatgaagaagactcgactctaattggtaacatcaacactctccttcaacctcacaacttatcattcacttctaagtactccaagatcattcagtaccacttagaagcaatcataagccaatcagtataccaagactttgagaactgcgtattccagaagaacggtaagccgaaactgcttgatccggaacaagatcgacaagcgaacttctcgtcctttgcttccttgagaaacttgagctggaacgaggtattgaaaaagggtacaaaatactacagtgatgagttcagtagattctgcgatgagaagatgagtttgatcattacaacattgaattggacaagaccttggtcagaacaaatgcttcaagcattctttgtggctgcaaaatgtgtatggttgcttcatttgcttgccttctcgttcaatccagcgttagggatattgagagttgaggagaacagagagtttgaatcaagttttatggaagatatgggtgcagataggcagagatcagcattgtcccgtggaccggcacgggttaaggttatggtaatgcctgggttttatgttttagatagggttttgagatgtaaggttctttgcaggtacaagtcattgggctgaactgaagagagtcacactcactctagtctaatcaaaattgattggttcttaattaacttttcttattgttaatctcttgtgtttcttctacctaggcttttttttactggtctttttacactttgttaagaattattataggtttttaaatattgtcaaatactacttgtcaaggagattttgtatttttacatttttgtattgatggaaaagtattgaatatgt

SEQ ID NO: 1897 - protein, 619 aa, Arabidopsis thaliana
DFLSLSLSLSLFFTHTETSSSSHPFLLHNRIHYLFSLFCVTSFSSLLSSNLVLSCSTMASSETRMNKAREKEEAIANGVKLRALQASLMQMKSSPSSNYSLRNPSSSSAASPASRPLPNLSAHDYPVFTPSYEDEPVSAFHHKNLTLSETWDEDGVGLVDGDTYLSDSYKTSTSRKTVMMPHQDSHHHVYTMSDALRSPPLHFYTTGRSNCGSVDFRSVSSCNDYNKQKGFDTKSLKSSNLVVPLTDSHSAVVSSQPRNRGGRVMSWLFPKLKKKQKSNSIFNSPSITEKSEEVSEVLKDSGSGVEKLKRELMEANRSRDAALTQVSEMKSSLGELSEKLQYLESYCDNLKKALREATEVVSQENSGGRSSGKKNSEMPVSEEVMVEGFLQIVSEARLSIKQFLKTLVSEIDEEDSTLIGNINTLLQPHNLSFTSKYSKIIQYHLEAIISQSVYQDFENCVFQKNGKPKLLDPEQDRQANFSSFASLRNLSWNEVLKKGTKYYSDEFSRFCDEKMSLIITTLNWTRPWSEQMLQAFFVAAKCVWLLHLLAFSFNPALGILRVEENREFESSFMEDMGADRQRSALSRGPARVKVMVMPGFYVLDRVLRCKVLCRYKSLG

SEQ ID NO: 1898 - protein, 562 aa, Arabidopsis thaliana
MASSETRMNKAREKEEAIANGVKLRALQASLMQMKSSPSSNYSLRNPSSSSAASPASRPLPNLSAHDYPVFTPSYEDEPVSAFHHKNLTLSETWDEDGVGLVDGDTYLSDSYKTSTSRKTVMMPHQDSHHHVYTMSDALRSPPLHFYTTGRSNCGSVDFRSVSSCNDYNKQKGFDTKSLKSSNLVVPLTDSHSAVVSSQPRNRGGRVMSWLFPKLKKKQKSNSIFNSPSITEKSEEVSEVLKDSGSGVEKLKRELMEANRSRDAALTQVSEMKSSLGELSEKLQYLESYCDNLKKALREATEVVSQENSGGRSSGKKNSEMPVSEEVMVEGFLQIVSEARLSIKQFLKTLVSEIDEEDSTLIGNINTLLQPHNLSFTSKYSKIIQYHLEAIISQSVYQDFENCVFQKNGKPKLLDPEQDRQANFSSFASLRNLSWNEVLKKGTKYYSDEFSRFCDEKMSLIITTLNWTRPWSEQMLQAFFVAAKCVWLLHLLAFSFNPALGILRVEENREFESSFMEDMGADRQRSALSRGPARVKVMVMPGFYVLDRVLRCKVLCRYKSLG

SEQ ID NO: 1899 - protein, 555 aa, Arabidopsis thaliana
MNKAREKEEAIANGVKLRALQASLMQMKSSPSSNYSLRNPSSSSAASPASRPLPNLSAHDYPVFTPSYEDEPVSAFHHKNLTLSETWDEDGVGLVDGDTYLSDSYKTSTSRKTVMMPHQDSHHHVYTMSDALRSPPLHFYTTGRSNCGSVDFRSVSSCNDYNKQKGFDTKSLKSSNLVVPLTDSHSAVVSSQPRNRGGRVMSWLFPKLKKKQKSNSIFNSPSITEKSEEVSEVLKDSGSGVEKLKRELMEANRSRDAALTQVSEMKSSLGELSEKLQYLESYCDNLKKALREATEVVSQENSGGRSSGKKNSEMPVSEEVMVEGFLQIVSEARLSIKQFLKTLVSEIDEEDSTLIGNINTLLQPHNLSFTSKYSKIIQYHLEAIISQSVYQDFENCVFQKNGKPKLLDPEQDRQANFSSFASLRNLSWNEVLKKGTKYYSDEFSRFCDEKMSLIITTLNWTRPWSEQMLQAFFVAAKCVWLLHLLAFSFNPALGILRVEENREFESSFMEDMGADRQRSALSRGPARVKVMVMPGFYVLDRVLRCKVLCRYKSLG

SEQ ID NO: 1900 - DNA, 1150 bp, Arabidopsis thaliana
aaggtttaaattaaaatttgaatttatttttctccagagacagagagagatggagttgagtatcagtggcaatgcgctcaagaccttggctaggtctataatctgcctcgcacgcgtcggtaacgagctcgttgtccaagcttcgccgacacagctggcattgcgcactttgaatgcttcacgttctgcctatcagtgtatcacatttcagtcaagtttctttgatgtatatactgtttctggtcctcaagctcatttcagtgtacttttgaaggctgtttgttctgttcttaggacccctctcgcgagcattgatcacatgagtatgcagttgccagatcatgatgcatctaaggtcaaatggactttgcagtgttacagtggtatgaagaaaacatattggattacttgcaatgtggaaccagatatacagcatttgtcccttgataggggtagatttccgagtaccttagtcatgcatcctcgaaatctgagcaagttgcttggaaacttccagtcatccctccaagagattacaattattgctacagaccaaacttctttcccctccgatgctgcaagtgacataggtggaaaagctgttgagtttcggagctatgtggatcctaccaaagatggtgactctttgttacatacacagctatggattgatccatcagaagaatttttgcagtatactcacgcaggtgatcctgttgacatcacattttccttgaaggaactaaaggcatttcttgcattctgcgagggctgtgaagccgatattcatctttttttcgaaaaagctggcgaaccaatactgatggctccaaaattcggtctgggtgatgggtcaagctccagttttgatgcaacactcgttcttgcgacaatgcttgtgtctcaacttcaggaagggattcttcagaacctcctgaagcagcaaactccataggtggccatgctgccgagcaagtaggatcacagcctcaagaacggtctaggcaaaatacctctgagcacccatctgatcacacacgagtatggtctgaactttcaggaactgccactaagagcgtgatcggtactgaggataggccacaggctcagggacaaccagacttggatatccaaagaattaggaatatgg

SEQ ID NO: 1901 - protein, 317 aa, Arabidopsis thaliana
RFKLKFEFIFLQRQREMELSISGNALKTLARSIICLARVGNELVVQASPTQLALRTLNASRSAYQCITFQSSFFDVYTVSGPQAHFSVLLKAVCSVLRTPLASIDHMSMQLPDHDASKVKWTLQCYSGMKKTYWITCNVEPDIQHLSLDRGRFPSTLVMHPRNLSKLLGNFQSSLQEITIIATDQTSFPSDAASDIGGKAVEFRSYVDPTKDGDSLLHTQLWIDPSEEFLQYTHAGDPVDITFSLKELKAFLAFCEGCEADIHLFFEKAGEPILMAPKFGLGDGSSSSFDATLVLATMLVSQLQEGILQNLLKQQTP

SEQ ID NO: 1902 - protein, 301 aa, Arabidopsis thaliana
MELSISGNALKTLARSIICLARVGNELVVQASPTQLALRTLNASRSAYQCITFQSSFFDVYTVSGPQAHFSVLLKAVCSVLRTPLASIDHMSMQLPDHDASKVKWTLQCYSGMKKTYWITCNVEPDIQHLSLDRGRFPSTLVMHPRNLSKLLGNFQSSLQEITIIATDQTSFPSDAASDIGGKAVEFRSYVDPTKDGDSLLHTQLWIDPSEEFLQYTHAGDPVDITFSLKELKAFLAFCEGCEADIHLFFEKAGEPILMAPKFGLGDGSSSSFDATLVLATMLVSQLQEGILQNLLKQQTP

SEQ ID NO: 1903 - protein, 211 aa, Arabidopsis thaliana
MSMQLPDHDASKVKWTLQCYSGMKKTYWITCNVEPDIQHLSLDRGRFPSTLVMHPRNLSKLLGNFQSSLQEITIIATDQTSFPSDAASDIGGKAVEFRSYVDPTKDGDSLLHTQLWIDPSEEFLQYTHAGDPVDITFSLKELKAFLAFCEGCEADIHLFFEKAGEPILMAPKFGLGDGSSSSFDATLVLATMLVSQLQEGILQNLLKQQTP

SEQ ID NO: 1904 - DNA, 1581 bp, Arabidopsis thaliana
aaaaccctaatctctgtactctctcttcctcaatccctcccatgaccaccgcagtttcgccgccgccgccgcaggagcagcaacttgttcacgcttcgcagacttcaagagtgagtcccaagacagtggagagcgccctcaatggtcttatcaattggagaagcgacaaatcaaagacagagaagcctcaacttctcgaagaagacgagctcgtctaccttttcgttactttgaagaagattccacagaagacccgtacgaatgcttaccgtatccctttacctcatcctcttatcaacccgacggtcgattcgccggagatttgtctcatcatcgacgacagacctaaaagtggtctcaccaaagatgatgcgatgaagaagatcaaatctgagaatattccaatcaccaaggttattaagctttcgaaactgaagagtgattacaaggcgttcgaagcgaagaggaaactctgcgactcttacgacatgtttttcactgatcggaggatcattcctctgctgccgagggtgattgggaagaagttctttacgagcaagaagattccggtggcgcttgatttgaagcacaggaactggaaacatcagatagagaaagcttgtggatctgctatgttcttcataaggactgggacgtgtagtgtcattaaggttgggaaattgtctatggatatttgtgaaattactgagaatgtgatggcgacattgaatggactagttgagttcttgcctaataagtggacgtacgttaggtctttgcatttgaagttgtctgagagtttagctttgcctatatatcagtctgttcctgatttgaagcttaaaatcgatgcttttgggtctggaaagagtgttgttcaggaggagaaggaaggtgaagttgaagaagttgttgctgttgatggtggagagaagagtgttacagggaagggaaagaagaagaaaggtaggattcacgaggttaggtatatggatagtaatgtagctgaggtgcttgatgaggatgagattggtggtgacgaggataataatgagattgttgagtctgaggagaagaagatgaagaagaggaagaaggaggtaagtgaagttgcagagagtgagaagccgatgaagaaagctgccaaagggaagttgaaacctgatgttgagaaaccgatgaagaaagctgccaaagggaagtcgaaacccgatgttgagaaacctatgcagaaagctgcggtcaaggggaaagttaaaccagatgttgtgaagctggagaagagcaaggacggcttaaaggcgaaaaagacaacaatggttgcgaaagacgaatctggtggtggattgaagccgaagagaaagagtgtgcttaggaaatgaggcagaggaaggtcttgagtgtttgcttttgagtatgatttatgttttattttctatcgtagttcttattacatttttgagccatttcatatcttgtactacttctatgaaacattgaactggtgaatgtgggtttgatggttttgtggaggaaacatactactgttcaccttttaactttttaaaggtttttctttcc

SEQ ID NO: 1905 - protein, 459 aa, Arabidopsis thaliana
NPNLCTLSSSIPPMTTAVSPPPPQEQQLVHASQTSRVSPKTVESALNGLINWRSDKSKTEKPQLLEEDELVYLFVTLKKIPQKTRTNAYRIPLPHPLINPTVDSPEICLIIDDRPKSGLTKDDAMKKIKSENIPITKVIKLSKLKSDYKAFEAKRKLCDSYDMFFTDRRIIPLLPRVIGKKFFTSKKIPVALDLKHRNWKHQIEKACGSAMFFIRTGTCSVIKVGKLSMDICEITENVMATLNGLVEFLPNKWTYVRSLHLKLSESLALPIYQSVPDLKLKIDAFGSGKSVVQEEKEGEVEEVVAVDGGEKSVTGKGKKKKGRIHEVRYMDSNVAEVLDEDEIGGDEDNNEIVESEEKKMKKRKKEVSEVAESEKPMKKAAKGKLKPDVEKPMKKAAKGKSKPDVEKPMQKAAVKGKVKPDVVKLEKSKDGLKAKKTTMVAKDESGGGLKPKRKSVLRK

SEQ ID NO: 1906 - protein, 446 aa, Arabidopsis thaliana
MTTAVSPPPPQEQQLVHASQTSRVSPKTVESALNGLINWRSDKSKTEKPQLLEEDELVYLFVTLKKIPQKTRTNAYRIPLPHPLINPTVDSPEICLIIDDRPKSGLTKDDAMKKIKSENIPITKVIKLSKLKSDYKAFEAKRKLCDSYDMFFTDRRIIPLLPRVIGKKFFTSKKIPVALDLKHRNWKHQIEKACGSAMFFIRTGTCSVIKVGKLSMDICEITENVMATLNGLVEFLPNKWTYVRSLHLKLSESLALPIYQSVPDLKLKIDAFGSGKSVVQEEKEGEVEEVVAVDGGEKSVTGKGKKKKGRIHEVRYMDSNVAEVLDEDEIGGDEDNNEIVESEEKKMKKRKKEVSEVAESEKPMKKAAKGKLKPDVEKPMKKAAKGKSKPDVEKPMQKAAVKGKVKPDVVKLEKSKDGLKAKKTTMVAKDESGGGLKPKRKSVLRK

SEQ ID NO: 1907 - protein, 335 aa, Arabidopsis thaliana
MKKIKSENIPITKVIKLSKLKSDYKAFEAKRKLCDSYDMFFTDRRIIPLLPRVIGKKFFTSKKIPVALDLKHRNWKHQIEKACGSAMFFIRTGTCSVIKVGKLSMDICEITENVMATLNGLVEFLPNKWTYVRSLHLKLSESLALPIYQSVPDLKLKIDAFGSGKSVVQEEKEGEVEEVVAVDGGEKSVTGKGKKKKGRIHEVRYMDSNVAEVLDEDEIGGDEDNNEIVESEEKKMKKRKKEVSEVAESEKPMKKAAKGKLKPDVEKPMKKAAKGKSKPDVEKPMQKAAVKGKVKPDVVKLEKSKDGLKAKKTTMVAKDESGGGLKPKRKSVLRK

SEQ ID NO: 1908 - DNA, 1325 bp, Arabidopsis thaliana
cggtatgcctagcgatatttttcaacgccattgacgacgctttatataccactgtgactgttcttttagttttgagtatgttaatgatcgcgaggaaagctttggcctcggcgcatactaaggcgtttcgtttggcaacaagggatgtacattgctttagttccatcttagtgtctcctcctctcgtgtcacttgacttgcctgaaaattggattccttactctgatcctccacctcctgtttcctttgagactgaacagaagactgtggtgatagatggtaatgttatcgctgaggaaatcagaacaaagattattagtgaagtggggaagatgaaaaaggctgttggaaaagtccctggtcttgctgttgttttggttggtgaacaaagagactcgcaaacttatgttcgcaacaaaattaaagcttgtgaagaaactggcattaaatctgttttggctgaattaccagaggattgtactgaaggacagattatcagtgtattgagaaaattcaatgaagacacgtctattcacggaattcttgtgcaacttcctttaccccaacatcttaatgaatcaaaaatcttgaatatggtgagattggagaaagatgttgatgggtttcatccattaaacgtggggaatcttgcaatgagagggagggaaccgctgtttgtatcttgcactcctaagggctgtgtggagttgttgataagaacgggtgttgaaatagcaggaaaaaatgctgtggtcataggcagaagcaacatcgttggactaccaatgtctttattattgcaggcatgacgcgacagtaagcacggtgcatgcgtttacaaaggatccagagcacattactaggaaggcggatatcgttatagcagcagcgggtatacctaatttagttcgtggaagttggcttaagcctggagcagttgtcattgatgttggaacaactccagtcgaggatagtagctgtgagtttggttaccgtcttgtcggggatgtatgttacgaggaagcgttaggtgttgcctcggctatcactcccgtaccgggaggagttggacctatgacgatcaccatgctactatgcaatactttggaggctgctaagcggatcttcctctgagtatggtatctctgtctattactaaatatattttgtaatgttagataggagactccatgctgttcgagttattaacgatctcttttgaattattgtataatagacctggcgattgtgatgccatggtttatcctaactcatcagcatctttagcatcaagttcaactaaacaagtattcatgttttcgttt

SEQ ID NO: 1909 - protein, 268 aa, Arabidopsis thaliana
VCLAIFFNAIDDALYTTVTVLLVLSMLMIARKALASAHTKAFRLATRDVHCFSSILVSPPLVSLDLPENWIPYSDPPPPVSFETEQKTVVIDGNVIAEEIRTKIISEVGKMKKAVGKVPGLAVVLVGEQRDSQTYVRNKIKACEETGIKSVLAELPEDCTEGQIISVLRKFNEDTSIHGILVQLPLPQHLNESKILNMVRLEKDVDGFHPLNVGNLAMRGREPLFVSCTPKGCVELLIRTGVEIAGKNAVVIGRSNIVGLPMSLLLQA

SEQ ID NO: 1910 - protein, 243 aa, Arabidopsis thaliana
MLMIARKALASAHTKAFRLATRDVHCFSSILVSPPLVSLDLPENWIPYSDPPPPVSFETEQKTVVIDGNVIAEEIRTKIISEVGKMKKAVGKVPGLAVVLVGEQRDSQTYVRNKIKACEETGIKSVLAELPEDCTEGQIISVLRKFNEDTSIHGILVQLPLPQHLNESKILNMVRLEKDVDGFHPLNVGNLAMRGREPLFVSCTPKGCVELLIRTGVEIAGKNAVVIGRSNIVGLPMSLLLQA

SEQ ID NO: 1911 - protein, 241 aa, Arabidopsis thaliana
MIARKALASAHTKAFRLATRDVHCFSSILVSPPLVSLDLPENWIPYSDPPPPVSFETEQKTVVIDGNVIAEEIRTKIISEVGKMKKAVGKVPGLAVVLVGEQRDSQTYVRNKIKACEETGIKSVLAELPEDCTEGQIISVLRKFNEDTSIHGILVQLPLPQHLNESKILNMVRLEKDVDGFHPLNVGNLAMRGREPLFVSCTPKGCVELLIRTGVEIAGKNAVVIGRSNIVGLPMSLLLQA

SEQ ID NO: 1912 - DNA, 1148 bp, Arabidopsis thaliana
aaccaccgagatattacaattcacaggtttctagctattttatatagttattgtaaaccaaaagaaaaagatttttggtgatagatcaatctcttgcgttcatttttcttctctttggtacgaaaatacaaagatggagatcaaagtcaaagcaaaagatgtagagtcgacaatgatgtcaactaaagaggaggatgagatcaagaagatgaaagagtgtgtggtgattcagaaggcagatgaggaggttactaaaggacaagaaactatgaagattttggatggttcaagacaaaaccaagatgaaacaagacaagctgattctaagaatattgactcaccatcatcatcatcacttgagatgaagaagaagttggaaattgaccaaaaatttacgagtcaaaacgaagaaaacaccaaaaaggaagaggagaagaagaaagagaccaacaataacaatctttctaacatgaagcataagaagacgagttcacacgtatgggactgtgggagcactctctacgactcgttcgagctcaactcgttcaaacgtcaactcgactcagccatctctgcttcctccgccagaactatgtccatgtctcacctccctgaccgccgtatcccttctctcagctcactttcgccggagtactctcctcctcttcctcctccaccgacaacttcttcttcctcctcctccggtggaaagaaacactcgaacaagatctctcgttctctacagagattcttgaagtcagtgttcaaacctaaacagcaccaaagcttaaccactccttcttcgccggtctacaaggcggtgggtcacggcggtggcgataaagatcgatactacgtcgtttacgacaaatcgggttcgttgacaactattccagagtcaacggagaaagaagtgagccccgagatcaactctcttgttaggaagaccgtgtccgagagattcccggcgagtagagtcgttggtatttcatgtgcatgattataatattaatctaagtcgtatatttgatataaattaataaatataaacatgttatatgacttatgagattagagttattttttttttccctttttgtttttataaaatatacattttggaaatgaataatcgtgttgaaccttgg

SEQ ID NO: 1913 - protein, 288 aa, Arabidopsis thaliana
MEIKVKAKDVESTMMSTKEEDEIKKMKECVVIQKADEEVTKGQETMKILDGSRQNQDETRQADSKNIDSPSSSSLEMKKKLEIDQKFTSQNEENTKKEEEKKKETNNNNLSNMKHKKTSSHVWDCGSTLYDSFELNSFKRQLDSAISASSARTMSMSHLPDRRIPSLSSLSPEYSPPLPPPPTTSSSSSSGGKKHSNKISRSLQRFLKSVFKPKQHQSLTTPSSPVYKAVGHGGGDKDRYYVVYDKSGSLTTIPESTEKEVSPEINSLVRKTVSERFPASRVVGISCA

SEQ ID NO: 1914 - protein, 275 aa, Arabidopsis thaliana
MMSTKEEDEIKKMKECVVIQKADEEVTKGQETMKILDGSRQNQDETRQADSKNIDSPSSSSLEMKKKLEIDQKFTSQNEENTKKEEEKKKETNNNNLSNMKHKKTSSHVWDCGSTLYDSFELNSFKRQLDSAISASSARTMSMSHLPDRRIPSLSSLSPEYSPPLPPPPTTSSSSSSGGKKHSNKISRSLQRFLKSVFKPKQHQSLTTPSSPVYKAVGHGGGDKDRYYVVYDKSGSLTTIPESTEKEVSPEINSLVRKTVSERFPASRVVGISCA

SEQ ID NO: 1915 - protein, 274 aa, Arabidopsis thaliana
MSTKEEDEIKKMKECVVIQKADEEVTKGQETMKILDGSRQNQDETRQADSKNIDSPSSSSLEMKKKLEIDQKFTSQNEENTKKEEEKKKETNNNNLSNMKHKKTSSHVWDCGSTLYDSFELNSFKRQLDSAISASSARTMSMSHLPDRRIPSLSSLSPEYSPPLPPPPTTSSSSSSGGKKHSNKISRSLQRFLKSVFKPKQHQSLTTPSSPVYKAVGHGGGDKDRYYVVYDKSGSLTTIPESTEKEVSPEINSLVRKTVSERFPASRVVGISCA

SEQ ID NO: 1916 - DNA, 1534 bp, Arabidopsis thaliana
ataataattatatctttaaaaaaaaaacagaaaaattctttgctttgcaacaaaggcagacagacaaaaggctaattcggagctctcctccacatcttcttccaaaacacaaacaaacccccaaatttccagaaaaatcagatcattctttcatcaatctcgtcttctttaatcataggtgggaattcatcagctcaaaaacgctgtacccgatcgttttacgactcaaaccagagaagctgattcttttccgatcattccaatttccatttcttccttgggaggtgatcgatcggttttacaccaaattagccgtcgaaaggggtgcttctttgatctaatttcgatggcgggattagagaaaaacgctgatttctcagggaagacgacgaaatcggctacaacgacgtcgtttttcaacaggtcgcttacaattcacggaagaacagtggtggattcgggccccaaatcccacaatctcaatccttctctcaatcgtaccacctccattaccaaattctacacccccgtagaatcgatgggaacttctcttaaaggcaaagtcaaaaacctttgtagattattcgagacttccaaacccgttaaacctgccttagctgagattcctcagaagcagaaatccggtaaatcccttttacccgaatcgcggatatcgcctttttcgagcttaaacaactcggtcatccgtcttcccgggacagaggacaggattgtggtgtattttactagcttgagagggattagacggacgtatgaggattgctatgctgtcagaatgatatttagagggtttcgggtttggatcgatgagcgcgacgtctccatggatatcgcttataggaaagagttgcagattgcaatgggagagaagtctgtgtctttgcctcaagttttcattatgggcaagtatgttggtggtgctgatgtgatcaagagtttgtttgagattggtgagcttgctaagattcttaaagagtttccaatgagacaaccagggtttgtttgccattgctgtggggacattagatttgttccgtgttccaattgtagtggcagcaagaaactgtttgatgaggatgaagatagggtcaagagatgtcctgaatgcaatgagaatggattgatacgttgtcctgattgctcttcttgagatatatcatcaatgaacctgaaaaaaccattaaagaaaagaagaaaaaagaggtatttatttctcttttgatgtttccattgttgtgtagaacagtgaatgatgctgccacaagtatccgaaaatctcttttggatcagcagcatttcactttgggttttttaaggtttgcgatcaacggtaatgggaatgccggtgatcgtggatttagtttatgtatgtgtttgctactaagggctaaatgtaattgtgtaatcaaaatgtctgaaacgggtagtaagcattttgactcttgtgtgtcaatgttgtgaaagacaactgtgttcttatgctatatatttgattgtaaatatttcgtgtgtt

SEQ ID NO: 1917 - protein, 274 aa, Arabidopsis thaliana
MAGLEKNADFSGKTTKSATTTSFFNRSLTIHGRTVVDSGPKSHNLNPSLNRTTSITKFYTPVESMGTSLKGKVKNLCRLFETSKPVKPALAEIPQKQKSGKSLLPESRISPFSSLNNSVIRLPGTEDRIVVYFTSLRGIRRTYEDCYAVRMIFRGFRVWIDERDVSMDIAYRKELQIAMGEKSVSLPQVFIMGKYVGGADVIKSLFEIGELAKILKEFPMRQPGFVCHCCGDIRFVPCSNCSGSKKLFDEDEDRVKRCPECNENGLIRCPDCSS

SEQ ID NO: 1918 - protein, 210 aa, Arabidopsis thaliana
MGTSLKGKVKNLCRLFETSKPVKPALAEIPQKQKSGKSLLPESRISPFSSLNNSVIRLPGTEDRIVVYFTSLRGIRRTYEDCYAVRMIFRGFRVWIDERDVSMDIAYRKELQIAMGEKSVSLPQVFIMGKYVGGADVIKSLFEIGELAKILKEFPMRQPGFVCHCCGDIRFVPCSNCSGSKKLFDEDEDRVKRCPECNENGLIRCPDCSS

SEQ ID NO: 1919 - DNA, 1731 bp, Arabidopsis thaliana
ctttttcacttcacttctctttctctctaaaccctaaaagaagaacgatgccggctccgacgacggagatcgaacccatcgaagcacagtcactgaaaaagctcagtctcaaatccctcaaacgatcacttgaactcttctctcccgtccatggccaattccctcctcctgacccggaagccaagcagattcgtctcagccataagatgaaagttgcgtttggaggtgtagaacctgttgtgagtcaacctccacgtcaacctgaccgcatcaatgagcagccaggaccttcaaatgctctttccctcgcagctcctgaagggtctaagagtacgcaaaagggtgcgacagagagtgctattgttgttggtccaactttactgcgtccaatactgcctaaaggcttgaactatacaggttcctcagggaagagcaccaccattatacctgcaaatgtatcttcatatcaaagaaatctgtcaactgctgcattaatggagagaataccaagtagatggccccggccagagtggcatgcaccatggaagaattacagggtcattcaggggcacttgggttgggtcagatctgttgcgtttgacccgagtaatgaatggttttgtactggttcagctgatcgtaccatcaagatatgggatgtagcaactggagttctgaagctaacacttactgggcatatcgagcaagtacgaggcctcgctgtaagcaatcgacatacctatatgttctctgctggtgatgacaagcaagtcaaatgctgggaccttgagcagaataaggttatccgatcttatcatggtcacttgagtggtgtctattgcttagctctgcacccaactttggatgttttattaactggggggcgagactctgtctgcagggtgtgggatattcgtaccaagatgcaaatttttgcactctcaggacatgacaacaccgtttgttctgtatttactcgtccaacagacccacaagttgtcaccggatcccatgacacgaccattaaattttgggaccttcgatatggaaaaacaatgtcaacgctaacacatcataagaaatctgtccgagcaatgaccctccatcctaaagagaatgcctttgcttctgcatcagctgacaacaccaagaaatttagccttccaaagggagagttctgccacaacatgctttcgcaacagaaaaccataattaatgcaatggctgtaaacgaggatggtgtgatggtcactggaggtgataatggaagtatatggttctgggactggaagagtggtcacagtttccaacagtcagaaactatcgtacagcctggttccctggagagtgaagcgggtatatatgcagcgtgttatgataatacaggttcaagattggtaacatgcgaggctgataagacgataaagatgtggaaagaagatgagaatgcaactccagaaactcatcctatcaatttcaaaccaccaaaggagattaggcgcttctaaataacttgtatctgtaactcaaagctcttgttggaatctcactaatctcttcatgattctgtttcctagatcaacttttgagaggggacctttgttttgtggtggggaggaaacaaaaggccatgtactttatgtattttaagggcatttgtaattttttctatcaacaataatagatcatgtattgttgtttatgttgagagaactttgttacttttatctc

SEQ ID NO: 1920 - protein, 501 aa, Arabidopsis thaliana
FSLHFSFSLNPKRRTMPAPTTEIEPIEAQSLKKLSLKSLKRSLELFSPVHGQFPPPDPEAKQIRLSHKMKVAFGGVEPVVSQPPRQPDRINEQPGPSNALSLAAPEGSKSTQKGATESAIVVGPTLLRPILPKGLNYTGSSGKSTTIIPANVSSYQRNLSTAALMERIPSRWPRPEWHAPWKNYRVIQGHLGWVRSVAFDPSNEWFCTGSADRTIKIWDVATGVLKLTLTGHIEQVRGLAVSNRHTYMFSAGDDKQVKCWDLEQNKVIRSYHGHLSGVYCLALHPTLDVLLTGGRDSVCRVWDIRTKMQIFALSGHDNTVCSVFTRPTDPQVVTGSHDTTIKFWDLRYGKTMSTLTHHKKSVRAMTLHPKENAFASASADNTKKFSLPKGEFCHNMLSQQKTIINAMAVNEDGVMVTGGDNGSIWFWDWKSGHSFQQSETIVQPGSLESEAGIYAACYDNTGSRLVTCEADKTIKMWKEDENATPETHPINFKPPKEIRRF

SEQ ID NO: 1921 - protein, 486 aa, Arabidopsis thaliana
MPAPTTEIEPIEAQSLKKLSLKSLKRSLELFSPVHGQFPPPDPEAKQIRLSHKMKVAFGGVEPVVSQPPRQPDRINEQPGPSNALSLAAPEGSKSTQKGATESAIVVGPTLLRPILPKGLNYTGSSGKSTTIIPANVSSYQRNLSTAALMERIPSRWPRPEWHAPWKNYRVIQGHLGWVRSVAFDPSNEWFCTGSADRTIKIWDVATGVLKLTLTGHIEQVRGLAVSNRHTYMFSAGDDKQVKCWDLEQNKVIRSYHGHLSGVYCLALHPTLDVLLTGGRDSVCRVWDIRTKMQIFALSGHDNTVCSVFTRPTDPQVVTGSHDTTIKFWDLRYGKTMSTLTHHKKSVRAMTLHPKENAFASASADNTKKFSLPKGEFCHNMLSQQKTIINAMAVNEDGVMVTGGDNGSIWFWDWKSGHSFQQSETIVQPGSLESEAGIYAACYDNTGSRLVTCEADKTIKMWKEDENATPETHPINFKPPKEIRRF

SEQ ID NO: 1922 - protein, 433 aa, Arabidopsis thaliana
MKVAFGGVEPVVSQPPRQPDRINEQPGPSNALSLAAPEGSKSTQKGATESAIVVGPTLLRPILPKGLNYTGSSGKSTTIIPANVSSYQRNLSTAALMERIPSRWPRPEWHAPWKNYRVIQGHLGWVRSVAFDPSNEWFCTGSADRTIKIWDVATGVLKLTLTGHIEQVRGLAVSNRHTYMFSAGDDKQVKCWDLEQNKVIRSYHGHLSGVYCLALHPTLDVLLTGGRDSVCRVWDIRTKMQIFALSGHDNTVCSVFTRPTDPQVVTGSHDTTIKFWDLRYGKTMSTLTHHKKSVRAMTLHPKENAFASASADNTKKFSLPKGEFCHNMLSQQKTIINAMAVNEDGVMVTGGDNGSIWFWDWKSGHSFQQSETIVQPGSLESEAGIYAACYDNTGSRLVTCEADKTIKMWKEDENATPETHPINFKPPKEIRRF

SEQ ID NO: 1923 - DNA, 1963 bp, Arabidopsis thaliana
gccggtcaagcgtatcaaatacccaatcacgcgaacttttctccgcctcttctccactccaaaattcttctccgtctttctcccgtcaccgtcgaataaagcctgagatctccgaattctgatcagcaactatgcattcaagtcatctccttctcgaggaaccgatcaggatgacttcaatcctcgaaccttctaaatcaagtttcttcccggctttgactaagattgttgggactctaggtccgaaatctcgatccgtcgaggtgattgctggttgtctcaaagctggaatgtccgtggctcgattcgatttctcttggtgcgatgctgattatcaccaggagacgctggagaatctgaagatagctgtgaagagcactaagaagctttgtgctgttatgctagacactgtaggacctgagttgcaagttattaacaagactgagaaagctatttctcttaaagctgatggccttgtaactttgactccgagtcaagatcaagaagcctcctctgaagtccttcccattaattttgatgggttagcgaaggcggttaagaaaggagacactatctttgttggacaatacctcttcactggtagtgaaacaacttcagtttggcttgaggttgaagaagttaaaggagatgatgtcatttgtatttcaaggaatgctgctactctgggtggtccgttattcacattgcacgtctctcaagttcacattgatatgccaaccctaactgagaaggataaggaggttataagtacatggggagttcagaataagatcgactttctctcattatcttattgtcgacatgcagaagatgttcgccaggcccgtgagttgcttaacagttgtggtgacctctctcaaacacaaatatttgcgaagattgagaatgaagagggactaacccactttgacgaaattctacaagaagcagatggcattattctttctcgtgggaatttgggtatcgatctacctccggaaaaggtgtttttgttccaaaaggctgctctttacaagtgtaacatggctggaaagcctgccgttcttactcgtgttgtagacagtatgacagacaatctgcggccaactcgtgcagaggcaactgatgttgctaatgctgttttagatggaagtgatgcaattcttcttggtgctgagactcttcgtggattgtaccctgttgaaaccatatcaactgttggtagaatctgttgtgaggcagagaaagttttcaaccaagatttgttctttaagaagactgtcaagtatgttggagaaccaatgactcacttggaatctattgcttcttctgctgtacgggcagcaatcaaggttaaggcatccgtaattatatgcttcacctcgtctggcagagcagcaaggttgattgccaaataccgtccaactatgcccgttctctctgttgtcattccccgacttacgacaaatcagctgaagtggagctttagcggagcctttgaggcaaggcagtcacttattgtcagaggtcttttccccatgcttgctgatcctcgtcaccctgcggaatcaacaagtgcaacaaatgagtcggttcttaaagtggctctagaccatgggaagcaagccggagtgatcaagtcacatgacagagttgtggtctgtcagaaagtgggagatgcgtccgtggtcaaaatcatcgagctagaggattagaagaagcagagtgagtcgttgtctcggtcttttttgttctgttactaatcaattttatttccttcactaaaactcttggtgccgtccaagaaaaatccttgcaatcattgtttctcgccggctatatgctagataccggagtgaaaatatatctcctgggcttttgttttcgtatttaggagattgatgtttccaagttatgatataaaccactttccactttatgcataatatctccatcccctagt

SEQ ID NO: 1924 - protein, 527 aa, Arabidopsis thaliana
MHSSHLLLEEPIRMTSILEPSKSSFFPALTKIVGTLGPKSRSVEVIAGCLKAGMSVARFDFSWCDADYHQETLENLKIAVKSTKKLCAVMLDTVGPELQVINKTEKAISLKADGLVTLTPSQDQEASSEVLPINFDGLAKAVKKGDTIFVGQYLFTGSETTSVWLEVEEVKGDDVICISRNAATLGGPLFTLHVSQVHIDMPTLTEKDKEVISTWGVQNKIDFLSLSYCRHAEDVRQARELLNSCGDLSQTQIFAKIENEEGLTHFDEILQEADGIILSRGNLGIDLPPEKVFLFQKAALYKCNMAGKPAVLTRVVDSMTDNLRPTRAEATDVANAVLDGSDAILLGAETLRGLYPVETISTVGRICCEAEKVFNQDLFFKKTVKYVGEPMTHLESIASSAVRAAIKVKASVIICFTSSGRAARLIAKYRPTMPVLSVVIPRLTTNQLKWSFSGAFEARQSLIVRGLFPMLADPRHPAESTSATNESVLKVALDHGKQAGVIKSHDRVVVCQKVGDASVVKIIELED

SEQ ID NO: 1925 - protein, 514 aa, Arabidopsis thaliana
MTSILEPSKSSFFPALTKIVGTLGPKSRSVEVIAGCLKAGMSVARFDFSWCDADYHQETLENLKIAVKSTKKLCAVMLDTVGPELQVINKTEKAISLKADGLVTLTPSQDQEASSEVLPINFDGLAKAVKKGDTIFVGQYLFTGSETTSVWLEVEEVKGDDVICISRNAATLGGPLFTLHVSQVHIDMPTLTEKDKEVISTWGVQNKIDFLSLSYCRHAEDVRQARELLNSCGDLSQTQIFAKIENEEGLTHFDEILQEADGIILSRGNLGIDLPPEKVFLFQKAALYKCNMAGKPAVLTRVVDSMTDNLRPTRAEATDVANAVLDGSDAILLGAETLRGLYPVETISTVGRICCEAEKVFNQDLFFKKTVKYVGEPMTHLESIASSAVRAAIKVKASVIICFTSSGRAARLIAKYRPTMPVLSVVIPRLTTNQLKWSFSGAFEARQSLIVRGLFPMLADPRHPAESTSATNESVLKVALDHGKQAGVIKSHDRVVVCQKVGDASVVKIIELED

SEQ ID NO: 1926 - protein, 474 aa, Arabidopsis thaliana
MSVARFDFSWCDADYHQETLENLKIAVKSTKKLCAVMLDTVGPELQVINKTEKAISLKADGLVTLTPSQDQEASSEVLPINFDGLAKAVKKGDTIFVGQYLFTGSETTSVWLEVEEVKGDDVICISRNAATLGGPLFTLHVSQVHIDMPTLTEKDKEVISTWGVQNKIDFLSLSYCRHAEDVRQARELLNSCGDLSQTQIFAKIENEEGLTHFDEILQEADGIILSRGNLGIDLPPEKVFLFQKAALYKCNMAGKPAVLTRVVDSMTDNLRPTRAEATDVANAVLDGSDAILLGAETLRGLYPVETISTVGRICCEAEKVFNQDLFFKKTVKYVGEPMTHLESIASSAVRAAIKVKASVIICFTSSGRAARLIAKYRPTMPVLSVVIPRLTTNQLKWSFSGAFEARQSLIVRGLFPMLADPRHPAESTSATNESVLKVALDHGKQAGVIKSHDRVVVCQKVGDASVVKIIELED

SEQ ID NO: 1927 - DNA, 1449 bp, Arabidopsis thaliana
aacaaacatttttggacatgaattgaaaattattataattaccagattttttatctatcgtcgaacttgggactgagaaagtagcagcttcgtttgcttcctctgatatttttctacactctctgtctctctctaaagatgaattgtcttcagaatcttcccagatgttcagtctcacctctgctgggattcgggtgcattcaaagagatcattcttcttcttcttcttctttgaagatgctaatatcgcctccgatcaaagccaatgatccaaaatctcgacttgttttacatgcagtatcagagtcaaaatccagctcagagatgagtggtgttgcaaaggatgaagagaaatctgatgaatatagccaagacatgactcaagctatgggtgctgttctaacttacaggcacgagttaggaatgaactacaactttattcgtccagatctaattgttggatcctgcttacagacccctgaagatgttgacaagcttcgtaaaattggagttaaaaccatattttgcttgcaacaagatccagacctggaatattttggagtagacataagcagcatccaagcctatgctaagaaatatagtgatattcagcatattcgctgtgaaattagagactttgatgcatttgatttgagaatgcgtcttccagccgtggttggtactctttacaaagctgttaagcgaaatggaggagttacatatgtgcactgcactgctggaatgggaagggctcctgctgttgcgttgacatacatgttctgggtgcaaggctataagcttatggaagctcataaattacttatgagcaaaaggtcgtgctttccgaagctggatgctatcagaaatgcaacaattgatattcttacaggactcaagaggaagactgttactctgacactgaaagataaggggttctccagagtagaaatttctggccttgacattggatggggacagaggatacctctaacactggacaagggaacaggattctggatcctaaagagagaactgcctgaaggacagtttgaatataaatacatcatagatggtgaatggacacacaatgaggccgaaccgtttataggacctaacaaagacggccataccaacaattacgctaaagtagtggacgatccaacaagtgtggatggtacaactcgggagagactatcgagcgaagaccctgagctgttggaggaagaacgctcgaaactaatccagttcttggagacttgttctgaggcagaagtttgagagttgagagcatccgactagactatgtgaatgtacaacttactagtaacaataaaatgcttcatgttagtaatacatacagttacgcttatagcagcaaaagaaaaaaacatgaagttagtagtactatgttcaagtataatatatagtttaaaatctttgttttttctt

SEQ ID NO: 1928 - protein, 379 aa, Arabidopsis thaliana
MNCLQNLPRCSVSPLLGFGCIQRDHSSSSSSLKMLISPPIKANDPKSRLVLHAVSESKSSSEMSGVAKDEEKSDEYSQDMTQAMGAVLTYRHELGMNYNFIRPDLIVGSCLQTPEDVDKLRKIGVKTIFCLQQDPDLEYFGVDISSIQAYAKKYSDIQHIRCEIRDFDAFDLRMRLPAVVGTLYKAVKRNGGVTYVHCTAGMGRAPAVALTYMFWVQGYKLMEAHKLLMSKRSCFPKLDAIRNATIDILTGLKRKTVTLTLKDKGFSRVEISGLDIGWGQRIPLTLDKGTGFWILKRELPEGQFEYKYIIDGEWTHNEAEPFIGPNKDGHTNNYAKVVDDPTSVDGTTRERLSSEDPELLEEERSKLIQFLETCSEAEV

SEQ ID NO: 1929 - protein, 346 aa, Arabidopsis thaliana
MLISPPIKANDPKSRLVLHAVSESKSSSEMSGVAKDEEKSDEYSQDMTQAMGAVLTYRHELGMNYNFIRPDLIVGSCLQTPEDVDKLRKIGVKTIFCLQQDPDLEYFGVDISSIQAYAKKYSDIQHIRCEIRDFDAFDLRMRLPAVVGTLYKAVKRNGGVTYVHCTAGMGRAPAVALTYMFWVQGYKLMEAHKLLMSKRSCFPKLDAIRNATIDILTGLKRKTVTLTLKDKGFSRVEISGLDIGWGQRIPLTLDKGTGFWILKRELPEGQFEYKYIIDGEWTHNEAEPFIGPNKDGHTNNYAKVVDDPTSVDGTTRERLSSEDPELLEEERSKLIQFLETCSEAEV

SEQ ID NO: 1930 - protein, 317 aa, Arabidopsis thaliana
MSGVAKDEEKSDEYSQDMTQAMGAVLTYRHELGMNYNFIRPDLIVGSCLQTPEDVDKLRKIGVKTIFCLQQDPDLEYFGVDISSIQAYAKKYSDIQHIRCEIRDFDAFDLRMRLPAVVGTLYKAVKRNGGVTYVHCTAGMGRAPAVALTYMFWVQGYKLMEAHKLLMSKRSCFPKLDAIRNATIDILTGLKRKTVTLTLKDKGFSRVEISGLDIGWGQRIPLTLDKGTGFWILKRELPEGQFEYKYIIDGEWTHNEAEPFIGPNKDGHTNNYAKVVDDPTSVDGTTRERLSSEDPELLEEERSKLIQFLETCSEAEV

SEQ ID NO: 1931 - DNA, 1526 bp, Arabidopsis thaliana
acctttcacttagcatcatcttcactttcccgcattttctctgcccagattttctctgattcttttgttgtttttttctgatggggagagatgaaacagagacgtacattacagtgccaagtttcttcaaatgtccgatatctcttgacgtgatgagatctccggttagtctctgtaccggcgtgacttatgatcgagccagtatccagagatggctcgatggtggtaacaacacttgtcccgctactatgcaacttctcaaaactaaagattttgttcctaacctcactcttcaacgtcttatcaatatctggtctgattcaatcggccgtcgtcacaacggtgattctccggttctgaatccgccgtctggtagagaagttccgacgaaggaagaagtgaatgtgttgttggagagattgatgagtctggagaatttgatgaagatcgttcgattcgtgaaggattcggattcgaacagagagtttctctcgaagaagatggagttcgtaccaatgctcgttgatattatacgcacgaagaagacgaagatcgagttagttataatggcgattaggattttggattcgattaaagtagatcgtgaacggttatcgaatctgatgttggcgaatgacggcggagattgtttaacggcgattctcttagcgattcaacgcgggaatctggaatcgaagatcgaatcggttcgggttttggattggatctccttcgacgttaaatcaaagcttatgatagcagaacgtgacggagttttaacagagatgatgaaatcgataagtatcactgagtcgtcagatccgagtttgatcgaagcgagtttatcgtttctaatcacaatctccaaatcaaaacgagtgagatcgaaactaatcgctgcaaaagcaatcacgaagatcaaagacattcttctgacggagacgttaacaaacgttgccgtgacggagaagtcgttgaagctgttagagactttatcgtcaaagcgagaagggagattggagatttgtggagacgacaatggtagatgtgtggaaggagtggtgaagaagctcttgaaagtatcgacgacggcgacggaacacgccgtgacgattttgtggtgtttgtgttatgttttcagggaagataagacggtggaagagacggtggagagaagtaacggagttacgaagctgttagtggtgatacagagcaattgttcggcgatggttagacaaatggcgaaagatttgattaaagtgttgaagtttaattcctctgctttggctgcttacgagaccaagactactcatattatgcctttttgattttttagtagtacattatgaataaatatgatataagtaaatcttattatcaaactattttgaacgtatagatgttgtaaatcttatgagaaattttgtcagttttactaatatttgcctcgtgttaattgagaattatacgatttaattactcatagcaacaatttgatacattaatagtttacacgatttagagcc

SEQ ID NO: 1932 - protein, 415 aa, Arabidopsis thaliana
MGRDETETYITVPSFFKCPISLDVMRSPVSLCTGVTYDRASIQRWLDGGNNTCPATMQLLKTKDFVPNLTLQRLINIWSDSIGRRHNGDSPVLNPPSGREVPTKEEVNVLLERLMSLENLMKIVRFVKDSDSNREFLSKKMEFVPMLVDIIRTKKTKIELVIMAIRILDSIKVDRERLSNLMLANDGGDCLTAILLAIQRGNLESKIESVRVLDWISFDVKSKLMIAERDGVLTEMMKSISITESSDPSLIEASLSFLITISKSKRVRSKLIAAKAITKIKDILLTETLTNVAVTEKSLKLLETLSSKREGRLEICGDDNGRCVEGVVKKLLKVSTTATEHAVTILWCLCYVFREDKTVEETVERSNGVTKLLVVIQSNCSAMVRQMAKDLIKVLKFNSSALAAYETKTTHIMPF

SEQ ID NO: 1933 - protein, 391 aa, Arabidopsis thaliana
MRSPVSLCTGVTYDRASIQRWLDGGNNTCPATMQLLKTKDFVPNLTLQRLINIWSDSIGRRHNGDSPVLNPPSGREVPTKEEVNVLLERLMSLENLMKIVRFVKDSDSNREFLSKKMEFVPMLVDIIRTKKTKIELVIMAIRILDSIKVDRERLSNLMLANDGGDCLTAILLAIQRGNLESKIESVRVLDWISFDVKSKLMIAERDGVLTEMMKSISITESSDPSLIEASLSFLITISKSKRVRSKLIAAKAITKIKDILLTETLTNVAVTEKSLKLLETLSSKREGRLEICGDDNGRCVEGVVKKLLKVSTTATEHAVTILWCLCYVFREDKTVEETVERSNGVTKLLVVIQSNCSAMVRQMAKDLIKVLKFNSSALAAYETKTTHIMPF

SEQ ID NO: 1934 - protein, 359 aa, Arabidopsis thaliana
MQLLKTKDFVPNLTLQRLINIWSDSIGRRHNGDSPVLNPPSGREVPTKEEVNVLLERLMSLENLMKIVRFVKDSDSNREFLSKKMEFVPMLVDIIRTKKTKIELVIMAIRILDSIKVDRERLSNLMLANDGGDCLTAILLAIQRGNLESKIESVRVLDWISFDVKSKLMIAERDGVLTEMMKSISITESSDPSLIEASLSFLITISKSKRVRSKLIAAKAITKIKDILLTETLTNVAVTEKSLKLLETLSSKREGRLEICGDDNGRCVEGVVKKLLKVSTTATEHAVTILWCLCYVFREDKTVEETVERSNGVTKLLVVIQSNCSAMVRQMAKDLIKVLKFNSSALAAYETKTTHIMPF

SEQ ID NO: 1935 - DNA, 1215 bp, Arabidopsis thaliana
tggttgttcaaagcatcaaataagtaaataaaaactcttttatgttcacctttttcactatcctctctttgtgtttcaaatcgtgggaacaaattatcacaatggaggcttctaaagaagctcatcaccttccaaactacatgaaagacgacaacgttagtcaagaaaccaagaacttgatcacttctctaccttcagacaaagatttcatgggttatggtctctacaactacaaaggttgttggtactatccaaacacactccaagccgttcttgacgtccaaaaacacttcaagccacgagatactgatataatcctcgcttctttgcccaaaggtggaaccacttggctcaaatccctaattttcgctgttgtacatagagaaaagtaccgcggaacccctcaaacacatcctttgctcttacaaaaccctcatgaccttgtcccatttcttgaggttgagttatacgctaatagccaaattccggatctcgcaaagtattcttctcctatgatcttttctacacacatgcacttacaagcattgcgtgaagccaccacaaaagcttgcaaaaccgtatatgtgtgtagaggtatcaaagatacgtttgtctccggctggcattatagaaacatgttgcatcgcaccaagatggatcaagccacttttgagctcatgtttgatgcttattgtagaggagttctcttatatggaccttattgggaacatgtattgagctattggaaagggagcttggaagcaaaggagaatgttcttttcatgaagtacgaagagataattgaggagcctcgtgttcaagtcaagagactcgccgagttcttggaatgtccattcaccaaggaagaagaagaaagtggatcggtggaggagatcttgaagttgtgtagtttacgaaatttaagcaatttggaggttaataagaatgggacaacgagaattggtgtagattctcaggtgttctttaggaaaggtgaagttggtgattggaagaatcatcttacgccacaaatggcgaaaacctttgatgagattattgactatagactaggagactccggtttgatatttcaataaggttgtgttgtgttttttttcttttgtcatccgaaaataaattaggactcaaacgagtcattcttgagaaatgttatgttgtattcttagctttgaaattccatgtttcttcttttta

SEQ ID NO: 1936 - protein, 351 aa, Arabidopsis thaliana
MFTFFTILSLCFKSWEQIITMEASKEAHHLPNYMKDDNVSQETKNLITSLPSDKDFMGYGLYNYKGCWYYPNTLQAVLDVQKHFKPRDTDIILASLPKGGTTWLKSLIFAVVHREKYRGTPQTHPLLLQNPHDLVPFLEVELYANSQIPDLAKYSSPMIFSTHMHLQALREATTKACKTVYVCRGIKDTFVSGWHYRNMLHRTKMDQATFELMFDAYCRGVLLYGPYWEHVLSYWKGSLEAKENVLFMKYEEIIEEPRVQVKRLAEFLECPFTKEEEESGSVEEILKLCSLRNLSNLEVNKNGTTRIGVDSQVFFRKGEVGDWKNHLTPQMAKTFDEIIDYRLGDSGLIFQ

SEQ ID NO: 1937 - protein, 331 aa, Arabidopsis thaliana
MEASKEAHHLPNYMKDDNVSQETKNLITSLPSDKDFMGYGLYNYKGCWYYPNTLQAVLDVQKHFKPRDTDIILASLPKGGTTWLKSLIFAVVHREKYRGTPQTHPLLLQNPHDLVPFLEVELYANSQIPDLAKYSSPMIFSTHMHLQALREATTKACKTVYVCRGIKDTFVSGWHYRNMLHRTKMDQATFELMFDAYCRGVLLYGPYWEHVLSYWKGSLEAKENVLFMKYEEIIEEPRVQVKRLAEFLECPFTKEEEESGSVEEILKLCSLRNLSNLEVNKNGTTRIGVDSQVFFRKGEVGDWKNHLTPQMAKTFDEIIDYRLGDSGLIFQ

SEQ ID NO: 1938 - protein, 318 aa, Arabidopsis thaliana
MKDDNVSQETKNLITSLPSDKDFMGYGLYNYKGCWYYPNTLQAVLDVQKHFKPRDTDIILASLPKGGTTWLKSLIFAVVHREKYRGTPQTHPLLLQNPHDLVPFLEVELYANSQIPDLAKYSSPMIFSTHMHLQALREATTKACKTVYVCRGIKDTFVSGWHYRNMLHRTKMDQATFELMFDAYCRGVLLYGPYWEHVLSYWKGSLEAKENVLFMKYEEIIEEPRVQVKRLAEFLECPFTKEEEESGSVEEILKLCSLRNLSNLEVNKNGTTRIGVDSQVFFRKGEVGDWKNHLTPQMAKTFDEIIDYRLGDSGLIFQ

SEQ ID NO: 1939 - DNA, 4025 bp, Arabidopsis thaliana
gaagaagaagaagaacagaagcgctctttgggtccctctctctctctctctttcttcaaatcatcgtctctcgtctctcttctctgctcgcgcgtctcaatcagttcaatctctacaatacacgtatgcatcaatacatgttggtaacgcaattgcagtgacggcggagtaattttgaccggaattatgttcaaaggatcgtcgaaacgtggcggtagaggaggaagtggtggtgggggcagtggaccttcccgtaaccgtaattcattccctcctcctacaaaccgacatccttctcccatcgggaggatgtcttctggtggtggtggtggtggctccgccgctccacgccagcggagtaattctactagcgttaaggcggctgcgtcgactacggtgtcgtcgcggacggttgaggaaacgtttaatcttgttccgagggagagttcttcggcttttggaatgattataaggttatctcctgatttggtggatgagatcaagcgtgtggaggcacaaggtggagctgccaagatcaagttcgatgcgtttcctaacaatagcactgagaatataattaatgttggtggaaaggagttcaaatttacttggtctggggagaaaggtgagttatgtgatatatatgaagaacatcaaagtggtgaagatggaaatggtttgctgattgaggctggatgtgcttggcgaaaattgaacgtcctacgaactctagatgagtcaaccacaagccatatgaagatgcgctcagttgaagctgaacagagaaccaaatcacgcaaggccattgttttagatcctgggaatccatcagtaacgaagcagttagctcatgctgaaggaagtccatggagaatgtcaaataaacagaagaaggaacctccacctaagaagcggaaagttgatccaccaccagttccagtcggaggtccaaagccttctttcagaccaggggcttctacccctactatgaaaaataggctatcagcttcacccggaccgtctcctagtaatcaatacaatacccctccatatgggattgggaatatggctaaaactcatgcagctaacgagaatgtcacaccagtccagacaaagggcagagtgaacatgatcgaaaaagaaccatcagcctggaaaaataatgtattaagggacacatctgggcgcgaagcaattaatgttaataaagaaattgacttgcagtcactgctcgttgatatcctaaaagaggctccaatgagcttgaaggctttagagaaagctgttggagataaagttcctaatcccgcaaagaagattgaaccaattttgaaaaggatcgcaaatttccaagctccaaggtatttcttaaaaccagaagcagagttggaaagctataaaaaacattcacctgatagcggaagctcacctgaacaccaacaattgctgccagtcactgagtgcagtcgcgatcagttacctgttccaggaagaaataacacagagaaattttctttgtgcgagcagaacggagaaggttcactagactgtttacctgtgcatctagtagagcaactgagtacgcaggaaaatgttgacattgagcatcattcacctggtatttttcatgaggaaaaacgatctgagaatagagaagcccaggctcgtagctctagtgatagtgacagtgatagtgataacagtgacagtgggagtgacagtaaaagtgcagctggaagtgacagtgggagcagcagtgatagtgaggcttcttctaacagtaaggacggttctgatgaggacgtggatatcatgagtgatggtgacagagagcctctactgacaacacagtcccttgaacaggatgcaattgatctcccaggtcatggttctagtgcagttgaaatcgagggtcataattctgatgctgttgacattgacggtcatgattctgatgcagttgatattgatggtcatgggtctgatacagttgatgtcgaggggaacagttcagatgagggtcatggttctgacgctgacagaaaaaaaaattctgataataactggaaaatggaaacaacaactggtaccagtcccactgcaaatggagaagttggcatttcagggcaggaacattttacttctggtcacgacaacctacgagaacgccaaaattttattggacagttgtttgatgacacagagaatacaacaaagaataactttaaaaatgacaaacgtgacatctccgagaggctggggaaagaccagaaccaaaaagcccttgattttgagcactacagtcagaaatcagcacatgagaaaaatagaaaatcccagagctgcaatcagttatctgccgtaagtaaagattcacagcattcagagctcaagtatgatgccgaacttcgcaacgcttctgccagtcaaacgatcgatccacttagaggacttctgaagtcatctattgaaaagtcgaatagacatggtaaatcaaacaaacattctgatgccttaggaaatgttcgtaaatctgacaaaggggaccattttccacttgaaatgctttctagtcgctcaggaaaggccttcagggacaatcagagagatgatgttcatttgaaaaataagtttccaaggaataaaaaagatggtgagtcagccattcgaccttcattacctaccgagacatccgatagaaagcccgatgaactggatggaagtgacaaggatcccaagaatgtttcaggcttgagcataggttcttctcccttagatagccagagaacatatttggcgaaattacctaagggaaatggacctgtcctccaaaaacaagtttcggaattggagttgggtgaactccctgagccattgggtgaagatacagcattgaagccgatcgaagagaaaacttcgtttaggcagtcaaatttaaaaccaagcacttcagagaaattgggtattgactcggataaacgaaggtctaaaaaatctgactcaaaaaaggcagctcctccacatacagtaaatggtagcaacgaacacgttgttgaagattcagaaagatcccaaaagtgggctttgcagtcacatgggcggaaccttacaggtacagatactgaaatcagctcacagaataaaaatttagaagatgcagcttataaatctagacaaaaagatagtagagcaagagtagggaacagtgtggaaggttatggagaaacaaacaaaaaaacgcctgttgtaaagcatggctccaaacgagcatccacatcccgctcttcaagggagagcaaaagacattcgtctgtctcaaattcaatcaatggacacaaagatgcaacttcaataccaggtggcagtgttgtccgggagaaacaaatgacatctttcggtgaagaagactcttcttatttgaaatacgagaaagcttctcctgagcttaagggacctattagtgatcatttgcagtataaagcctatatgcaggagtataatgataaatatgatagctaccactccattaacaagatattagagagccacagaaatgactttcaaaagttggggcaagaccttgggtttgcaaaaggaagggatgtggagagatataacaaaattgtggagcagataaaggaatcttattgcaaatatggggagagacacaaacgtttgaagaaagtatttgttgttctccacgaagaattgaagcacctgaaacaaagaatgagagactacgcatcatctcatggaaaagattgatggaaactggaaccaaaactctcctttggtggagtcatcttgttgaaacattagctctgtttttctttctttcttgtgaaattagaaatgattcataggcccaattttgtgtgagttgtacttaggaggacctttggtagattttattcttgttgcagttggtttagttggagcgctcgataaacgaatatgtacatacatgggtatcaagatcaatgtagattcttctggctctgctttaatttaactttgataagtcg

SEQ ID NO: 1940 - protein, 1192 aa, Arabidopsis thaliana
MFKGSSKRGGRGGSGGGGSGPSRNRNSFPPPTNRHPSPIGRMSSGGGGGGSAAPRQRSNSTSVKAAASTTVSSRTVEETFNLVPRESSSAFGMIIRLSPDLVDEIKRVEAQGGAAKIKFDAFPNNSTENIINVGGKEFKFTWSGEKGELCDIYEEHQSGEDGNGLLIEAGCAWRKLNVLRTLDESTTSHMKMRSVEAEQRTKSRKAIVLDPGNPSVTKQLAHAEGSPWRMSNKQKKEPPPKKRKVDPPPVPVGGPKPSFRPGASTPTMKNRLSASPGPSPSNQYNTPPYGIGNMAKTHAANENVTPVQTKGRVNMIEKEPSAWKNNVLRDTSGREAINVNKEIDLQSLLVDILKEAPMSLKALEKAVGDKVPNPAKKIEPILKRIANFQAPRYFLKPEAELESYKKHSPDSGSSPEHQQLLPVTECSRDQLPVPGRNNTEKFSLCEQNGEGSLDCLPVHLVEQLSTQENVDIEHHSPGIFHEEKRSENREAQARSSSDSDSDSDNSDSGSDSKSAAGSDSGSSSDSEASSNSKDGSDEDVDIMSDGDREPLLTTQSLEQDAIDLPGHGSSAVEIEGHNSDAVDIDGHDSDAVDIDGHGSDTVDVEGNSSDEGHGSDADRKKNSDNNWKMETTTGTSPTANGEVGISGQEHFTSGHDNLRERQNFIGQLFDDTENTTKNNFKNDKRDISERLGKDQNQKALDFEHYSQKSAHEKNRKSQSCNQLSAVSKDSQHSELKYDAELRNASASQTIDPLRGLLKSSIEKSNRHGKSNKHSDALGNVRKSDKGDHFPLEMLSSRSGKAFRDNQRDDVHLKNKFPRNKKDGESAIRPSLPTETSDRKPDELDGSDKDPKNVSGLSIGSSPLDSQRTYLAKLPKGNGPVLQKQVSELELGELPEPLGEDTALKPIEEKTSFRQSNLKPSTSEKLGIDSDKRRSKKSDSKKAAPPHTVNGSNEHVVEDSERSQKWALQSHGRNLTGTDTEISSQNKNLEDAAYKSRQKDSRARVGNSVEGYGETNKKTPVVKHGSKRASTSRSSRESKRHSSVSNSINGHKDATSIPGGSVVREKQMTSFGEEDSSYLKYEKASPELKGPISDHLQYKAYMQEYNDKYDSYHSINKILESHRNDFQKLGQDLGFAKGRDVERYNKIVEQIKESYCKYGERHKRLKKVFVVLHEELKHLKQRMRDYASSHGKD

SEQ ID NO: 1941 - protein, 1151 aa, Arabidopsis thaliana
MSSGGGGGGSAAPRQRSNSTSVKAAASTTVSSRTVEETFNLVPRESSSAFGMIIRLSPDLVDEIKRVEAQGGAAKIKFDAFPNNSTENIINVGGKEFKFTWSGEKGELCDIYEEHQSGEDGNGLLIEAGCAWRKLNVLRTLDESTTSHMKMRSVEAEQRTKSRKAIVLDPGNPSVTKQLAHAEGSPWRMSNKQKKEPPPKKRKVDPPPVPVGGPKPSFRPGASTPTMKNRLSASPGPSPSNQYNTPPYGIGNMAKTHAANENVTPVQTKGRVNMIEKEPSAWKNNVLRDTSGREAINVNKEIDLQSLLVDILKEAPMSLKALEKAVGDKVPNPAKKIEPILKRIANFQAPRYFLKPEAELESYKKHSPDSGSSPEHQQLLPVTECSRDQLPVPGRNNTEKFSLCEQNGEGSLDCLPVHLVEQLSTQENVDIEHHSPGIFHEEKRSENREAQARSSSDSDSDSDNSDSGSDSKSAAGSDSGSSSDSEASSNSKDGSDEDVDIMSDGDREPLLTTQSLEQDAIDLPGHGSSAVEIEGHNSDAVDIDGHDSDAVDIDGHGSDTVDVEGNSSDEGHGSDADRKKNSDNNWKMETTTGTSPTANGEVGISGQEHFTSGHDNLRERQNFIGQLFDDTENTTKNNFKNDKRDISERLGKDQNQKALDFEHYSQKSAHEKNRKSQSCNQLSAVSKDSQHSELKYDAELRNASASQTIDPLRGLLKSSIEKSNRHGKSNKHSDALGNVRKSDKGDHFPLEMLSSRSGKAFRDNQRDDVHLKNKFPRNKKDGESAIRPSLPTETSDRKPDELDGSDKDPKNVSGLSIGSSPLDSQRTYLAKLPKGNGPVLQKQVSELELGELPEPLGEDTALKPIEEKTSFRQSNLKPSTSEKLGIDSDKRRSKKSDSKKAAPPHTVNGSNEHVVEDSERSQKWALQSHGRNLTGTDTEISSQNKNLEDAAYKSRQKDSRARVGNSVEGYGETNKKTPVVKHGSKRASTSRSSRESKRHSSVSNSINGHKDATSIPGGSVVREKQMTSFGEEDSSYLKYEKASPELKGPISDHLQYKAYMQEYNDKYDSYHSINKILESHRNDFQKLGQDLGFAKGRDVERYNKIVEQIKESYCKYGERHKRLKKVFVVLHEELKHLKQRMRDYASSHGKD

SEQ ID NO: 1942 - protein, 1100 aa, Arabidopsis thaliana
MIIRLSPDLVDEIKRVEAQGGAAKIKFDAFPNNSTENIINVGGKEFKFTWSGEKGELCDIYEEHQSGEDGNGLLIEAGCAWRKLNVLRTLDESTTSHMKMRSVEAEQRTKSRKAIVLDPGNPSVTKQLAHAEGSPWRMSNKQKKEPPPKKRKVDPPPVPVGGPKPSFRPGASTPTMKNRLSASPGPSPSNQYNTPPYGIGNMAKTHAANENVTPVQTKGRVNMIEKEPSAWKNNVLRDTSGREAINVNKEIDLQSLLVDILKEAPMSLKALEKAVGDKVPNPAKKIEPILKRIANFQAPRYFLKPEAELESYKKHSPDSGSSPEHQQLLPVTECSRDQLPVPGRNNTEKFSLCEQNGEGSLDCLPVHLVEQLSTQENVDIEHHSPGIFHEEKRSENREAQARSSSDSDSDSDNSDSGSDSKSAAGSDSGSSSDSEASSNSKDGSDEDVDIMSDGDREPLLTTQSLEQDAIDLPGHGSSAVEIEGHNSDAVDIDGHDSDAVDIDGHGSDTVDVEGNSSDEGHGSDADRKKNSDNNWKMETTTGTSPTANGEVGISGQEHFTSGHDNLRERQNFIGQLFDDTENTTKNNFKNDKRDISERLGKDQNQKALDFEHYSQKSAHEKNRKSQSCNQLSAVSKDSQHSELKYDAELRNASASQTIDPLRGLLKSSIEKSNRHGKSNKHSDALGNVRKSDKGDHFPLEMLSSRSGKAFRDNQRDDVHLKNKFPRNKKDGESAIRPSLPTETSDRKPDELDGSDKDPKNVSGLSIGSSPLDSQRTYLAKLPKGNGPVLQKQVSELELGELPEPLGEDTALKPIEEKTSFRQSNLKPSTSEKLGIDSDKRRSKKSDSKKAAPPHTVNGSNEHVVEDSERSQKWALQSHGRNLTGTDTEISSQNKNLEDAAYKSRQKDSRARVGNSVEGYGETNKKTPVVKHGSKRASTSRSSRESKRHSSVSNSINGHKDATSIPGGSVVREKQMTSFGEEDSSYLKYEKASPELKGPISDHLQYKAYMQEYNDKYDSYHSINKILESHRNDFQKLGQDLGFAKGRDVERYNKIVEQIKESYCKYGERHKRLKKVFVVLHEELKHLKQRMRDYASSHGKD

SEQ ID NO: 1943 - DNA, 1821 bp, Arabidopsis thaliana
gtttcttctcggtttctccgtaagcattcagagttctgcaagtaagagaagaaggaagctatggatgtagagcaaaagaaaccgttaatcgaatcatcagatcgtaatctacctgatttcaaaaaatcagtgaagcttaaatatgtgaagcttggttaccattaccttatcactcatggaatgtaccttttcctctccccattagtacttgtaatcgctgcacagatttcaactttctctgtcaccgatcttcgtagcctctgggagcatcttcagtacaatcttatctcagtggttgtttgttctatgctgcttgttttcttaatgactatttacttcatgactcgaccacgtcctgtctacttggtgaacttctcgtgctttaaacccgatgagtcacgaaaatgcactaaaaagatctttatggatcgttctaaactcactggctctttcacagaggagaatcttgagttccagcgtaagattctacaacgttcggggctcggggaatcgacttacttacccgaggctgtacttaatgttccgcctaacccgtgtatgaaagaagctcgaaaagaggccgagactgttatgtttggagctattgatgagcttcttgcgaagacgaatgtgaacccgaaggatattgggatcttgattgttaactgtagtttgtttaacccgacaccttcgttatctgctatggttgttaatcactataagctccgcgggaatatacttagttacaacttgggaggaatgggttgcagtgctggtttgatttctattgatcttgctaaacatcttcttcactctattcccaacacttatgcaatggtgattagtatggagaacattacgttgaactggtatttcgggaatgaccggtcgaagcttgtttctaattgtctgtttagaatgggaggtgcagcgattcttctttcgaacaaaagatgggacagaagaagatcgaaatatgagcttgttgatacggttaggactcacaagggagctgatgataagtgttttggttgcataactcaagaagaggattccgcaagtaagattggtgttaccttgtcgaaagaacttatggctgttgcgggtgatgctctaaagacaaatattacgacgttaggaccactggttttaccgacatctgaacagcttctgttctttgcaacgttagtgggaagaaaactcttcaagatgaagatcaagccttacatcccagacttcaaactagcgtttgagcatttctgcatccacgcaggagggagagctgttcttgatgaattggagaagaacttgaaactcacagagtggcatatggagccctcgaggatgacactctaccgttttggtaacacgtccagttcttctttgtggtatgaattagcatatagtgaggccaaaggaaggatcaagaaaggtgatagaatttggcagatagcttttggttcggggttcaagtgcaacagctcggtttggagagcggtaaggtcggtaaaccctaagaaagagaagaacccatggatggatgaaattcatgagttcccagttgaagtccccaaggtctccacaatctagaaaccacttagtggcaaattttcagaagaggtttttgagttttcagcttttgatattttgtgtcttcccagtgaatttacctttttcttgatttgataatcagatacaccaaactggttaacaatatttttcttcttttttgcggaaaaacttgttgtagtcagtagcagaccgtcaatggtcggtccagcttgtgtttttggttgttgtgtctgcatatatatttccttt

SEQ ID NO: 1944 - protein, 509 aa, Arabidopsis thaliana
MDVEQKKPLIESSDRNLPDFKKSVKLKYVKLGYHYLITHGMYLFLSPLVLVIAAQISTFSVTDLRSLWEHLQYNLISVVVCSMLLVFLMTIYFMTRPRPVYLVNFSCFKPDESRKCTKKIFMDRSKLTGSFTEENLEFQRKILQRSGLGESTYLPEAVLNVPPNPCMKEARKEAETVMFGAIDELLAKTNVNPKDIGILIVNCSLFNPTPSLSAMVVNHYKLRGNILSYNLGGMGCSAGLISIDLAKHLLHSIPNTYAMVISMENITLNWYFGNDRSKLVSNCLFRMGGAAILLSNKRWDRRRSKYELVDTVRTHKGADDKCFGCITQEEDSASKIGVTLSKELMAVAGDALKTNITTLGPLVLPTSEQLLFFATLVGRKLFKMKIKPYIPDFKLAFEHFCIHAGGRAVLDELEKNLKLTEWHMEPSRMTLYRFGNTSSSSLWYELAYSEAKGRIKKGDRIWQIAFGSGFKCNSSVWRAVRSVNPKKEKNPWMDEIHEFPVEVPKVSTI

SEQ ID NO: 1945 - protein, 469 aa, Arabidopsis thaliana
MYLFLSPLVLVIAAQISTFSVTDLRSLWEHLQYNLISVVVCSMLLVFLMTIYFMTRPRPVYLVNFSCFKPDESRKCTKKIFMDRSKLTGSFTEENLEFQRKILQRSGLGESTYLPEAVLNVPPNPCMKEARKEAETVMFGAIDELLAKTNVNPKDIGILIVNCSLFNPTPSLSAMVVNHYKLRGNILSYNLGGMGCSAGLISIDLAKHLLHSIPNTYAMVISMENITLNWYFGNDRSKLVSNCLFRMGGAAILLSNKRWDRRRSKYELVDTVRTHKGADDKCFGCITQEEDSASKIGVTLSKELMAVAGDALKTNITTLGPLVLPTSEQLLFFATLVGRKLFKMKIKPYIPDFKLAFEHFCIHAGGRAVLDELEKNLKLTEWHMEPSRMTLYRFGNTSSSSLWYELAYSEAKGRIKKGDRIWQIAFGSGFKCNSSVWRAVRSVNPKKEKNPWMDEIHEFPVEVPKVSTI

SEQ ID NO: 1946 - protein, 427 aa, Arabidopsis thaliana
MLLVFLMTIYFMTRPRPVYLVNFSCFKPDESRKCTKKIFMDRSKLTGSFTEENLEFQRKILQRSGLGESTYLPEAVLNVPPNPCMKEARKEAETVMFGAIDELLAKTNVNPKDIGILIVNCSLFNPTPSLSAMVVNHYKLRGNILSYNLGGMGCSAGLISIDLAKHLLHSIPNTYAMVISMENITLNWYFGNDRSKLVSNCLFRMGGAAILLSNKRWDRRRSKYELVDTVRTHKGADDKCFGCITQEEDSASKIGVTLSKELMAVAGDALKTNITTLGPLVLPTSEQLLFFATLVGRKLFKMKIKPYIPDFKLAFEHFCIHAGGRAVLDELEKNLKLTEWHMEPSRMTLYRFGNTSSSSLWYELAYSEAKGRIKKGDRIWQIAFGSGFKCNSSVWRAVRSVNPKKEKNPWMDEIHEFPVEVPKVSTI

SEQ ID NO: 1947 - DNA, 1174 bp, Arabidopsis thaliana
agaagaagaagaaccctttcgtcgtcaaggtctagctttctcaaatcctctctctctcgtttctccgattccgatatcaccgtctcctccaccggaaaatccataacgcgattaggtttttagcctagttccttaatctctggttattgattctttcaatttctgatcgatgacattgtccaagcgattggctctattgggagctcaatctgcgattactctcgctaaacctcgaggtctcggttcctctctcgggttacttgatcgtcgtccatttccgtatcgtcaattttctgagctcacgaaagctaatgggagacgtgcttttctcgttgatacattggctctggtgaggagtcttgaagctcaaggagttccatcgaaacaagctgaggcaataacttctgctattactgaggttttgaatgatagcttggaaaatgtctctgagtcttttgtgtcgaaagcggaaatgcagaagattgaaatgattcaagattcaaatttatcgaaatttaaatctgaagtcaaaagttctcaggagcatcattttactgtattgcaacgtgagactgaaaaattgagaggcgatatagagaagatgcgaagtgagctaaggtacgaaattgataaggtcacagcgggacaacgcttggatttgaatcttgaaagaggccgaatacgtgatgagctagctaatcagaataccgaaacaacaaacctcacaaacaagcttgacagggaaattcatgcgttgagagctcaattagaagcttcaaaatacgaagtcatcaaatattgcataggtacacttgtgtcgatttcagcagtgggactcgccgtccttcgtatcatgatttaaagtacgatcccaacactcaacactgctctctgcttacaggcttaaaagccaaattgataacttgtcatttttatttgaatcccatcaatatgccatattatttttttctggcgatcagagaatattattgtttctgtgatctattttgccatcatcctttctaggtgtcagggtttgaaaatttgcaccgagaattatgttaatccaaggattattggtttcttccatttgcattattagttttctagctccttatatgatatgtcaatgactcaatgttacaaattgtcccaactgattttgtttctaagc

SEQ ID NO: 1948 - protein, 230 aa, Arabidopsis thaliana
MTLSKRLALLGAQSAITLAKPRGLGSSLGLLDRRPFPYRQFSELTKANGRRAFLVDTLALVRSLEAQGVPSKQAEAITSAITEVLNDSLENVSESFVSKAEMQKIEMIQDSNLSKFKSEVKSSQEHHFTVLQRETEKLRGDIEKMRSELRYEIDKVTAGQRLDLNLERGRIRDELANQNTETTNLTNKLDREIHALRAQLEASKYEVIKYCIGTLVSISAVGLAVLRIMI

SEQ ID NO: 1949 - protein, 129 aa, Arabidopsis thaliana
MQKIEMIQDSNLSKFKSEVKSSQEHHFTVLQRETEKLRGDIEKMRSELRYEIDKVTAGQRLDLNLERGRIRDELANQNTETTNLTNKLDREIHALRAQLEASKYEVIKYCIGTLVSISAVGLAVLRIMI

SEQ ID NO: 1950 - protein, 124 aa, Arabidopsis thaliana
MIQDSNLSKFKSEVKSSQEHHFTVLQRETEKLRGDIEKMRSELRYEIDKVTAGQRLDLNLERGRIRDELANQNTETTNLTNKLDREIHALRAQLEASKYEVIKYCIGTLVSISAVGLAVLRIMI

SEQ ID NO: 1951 - DNA, 1293 bp, Arabidopsis thaliana
ggaaccaattggttctgatttcagatttcgaatttttttaatttgaatccaaatggagaaagcagagaacgagaataagccatcggctgtatctgacgtcggagcatgggctatgaacgtaacgagctccgttgggatcatcatggctaataaacaactaatgtcatcatctggattaggcttcagcttcgcgacaactctcacgggatttcactttgctcttactgctctcgttggtatggtgtcgaatgcgactggtttatcagcatctaagcatgttcctctttgggagcttctttggttctcactcgttgctaatatctcaatcgctgctatgaattttagtcttatgttgaactctgttggcttctaccagatatcgaaattgagcatgattccagttgtttgtgtgatggaatgggttctacatagtaagcattactcgagagaagtgaaggcatctgtcatggttgttgttgtaggagttgggatttgtactgttactgatgtcaaagttaatgccaaaggtttcatttgtgcttgcactgccgttttctccacttctctccagcagatctcaataggttcactgcagaagaaatactcgatcggatcattcgagttgctgagtaagacagctccaatccaagccatttcactcctcatctttggtccatttgttgactatttcttgagtggcagattcatttcgacttacaagatgacttatagcgcaatgttatgcattcttctctcctgcgcattggcggttttctgcaacataagccaatatctctgcatcggaagattctctgctacctcattccaagttcttggccacatgaaaacagtctgtgtcttaacattaggatggcttatctttgattcggagatgacattcaagaacatagcagggatggtcttagccgtggtgggaatggtgatatacagttgggcagtcgagttagagaaacagagaaagtcgaaagtgataccgcatggtaaacacagtatgacagaagatgagattaaacttctcaaagaaggtatagaacatatggatttgaaagacatggagcttggaaataataaagcataaatatagctctattcaagagaaacgttttttggttatatttttggttactcatttcccccatcatgtactcttttcttttgccctttttttcgttctttgtctcaaagaacctttttagcctcttattgatgagctctcctctgcagagcacattcttttttctatagaaatatatgattcctctacttctttgc

SEQ ID NO: 1952 - protein, 348 aa, Arabidopsis thaliana
MEKAENENKPSAVSDVGAWAMNVTSSVGIIMANKQLMSSSGLGFSFATTLTGFHFALTALVGMVSNATGLSASKHVPLWELLWFSLVANISIAAMNFSLMLNSVGFYQISKLSMIPVVCVMEWVLHSKHYSREVKASVMVVVVGVGICTVTDVKVNAKGFICACTAVFSTSLQQISIGSLQKKYSIGSFELLSKTAPIQAISLLIFGPFVDYFLSGRFISTYKMTYSAMLCILLSCALAVFCNISQYLCIGRFSATSFQVLGHMKTVCVLTLGWLIFDSEMTFKNIAGMVLAVVGMVIYSWAVELEKQRKSKVIPHGKHSMTEDEIKLLKEGIEHMDLKDMELGNNKA

SEQ ID NO: 1953 - protein, 328 aa, Arabidopsis thaliana
MNVTSSVGIIMANKQLMSSSGLGFSFATTLTGFHFALTALVGMVSNATGLSASKHVPLWELLWFSLVANISIAAMNFSLMLNSVGFYQISKLSMIPVVCVMEWVLHSKHYSREVKASVMVVVVGVGICTVTDVKVNAKGFICACTAVFSTSLQQISIGSLQKKYSIGSFELLSKTAPIQAISLLIFGPFVDYFLSGRFISTYKMTYSAMLCILLSCALAVFCNISQYLCIGRFSATSFQVLGHMKTVCVLTLGWLIFDSEMTFKNIAGMVLAVVGMVIYSWAVELEKQRKSKVIPHGKHSMTEDEIKLLKEGIEHMDLKDMELGNNKA

SEQ ID NO: 1954 - protein, 318 aa, Arabidopsis thaliana
MANKQLMSSSGLGFSFATTLTGFHFALTALVGMVSNATGLSASKHVPLWELLWFSLVANISIAAMNFSLMLNSVGFYQISKLSMIPVVCVMEWVLHSKHYSREVKASVMVVVVGVGICTVTDVKVNAKGFICACTAVFSTSLQQISIGSLQKKYSIGSFELLSKTAPIQAISLLIFGPFVDYFLSGRFISTYKMTYSAMLCILLSCALAVFCNISQYLCIGRFSATSFQVLGHMKTVCVLTLGWLIFDSEMTFKNIAGMVLAVVGMVIYSWAVELEKQRKSKVIPHGKHSMTEDEIKLLKEGIEHMDLKDMELGNNKA

SEQ ID NO: 1955 - DNA, 1707 bp, Arabidopsis thaliana
caaattccatcatcgtcgccgcaacaatatcttttgctttctctctcattcttcaccagtaacaagcccatctctcgattcttcactctcaaggaaggagacgttttgaaaatcagaaatggtgaagatatgctgcataggagctggttatgtgggtggtccaaccatggcggtgatggctcttaagtgtcctgagattgaagtagtcgttgtggatatctctgaaccaaggatcaatgcttggaacagtgataggcttcctatttacgagccgggattggaagatgtggtgaaacaatgcagagggaaaaacctcttctttagcacagacgtggagaaacatgtatttgagagtgatattgtatttgtctcagttaacactccaaccaaaacacaaggtcttggtgctggcaaagctgctgatcttacttactgggagagtgctgctcggatgatcgctgatgtctccaaatctagcaaaatcgttgttgagaaatccacggttcctgtgaggacagcagaggctattgaaaagatactgacacataacagcaaaggcatagagtttcagattctctctaaccctgaatttcttgctgagggtactgcaattaaggatctttataacccagaccgtgtgttgattggtggtagggatactgcagcagggcaaaaggctattaaagctttaagagatgtttatgctcattgggttccagtggaacaaatcatttgcacgaacctgtggtccgctgagctctctaagcttgcagcaaatgcattcttagctcagaggatatcatctgtcaatgccatgtcagctctatgtgaggcaactggcgctgatgttacacaagttgcgcatgccgtgggtacagatactagaattggtccaaagttcttgaatgctagtgttggttttggtggatcatgtttccaaaaggacatcctaaatcttatctatatttgtgaatgcaacggcttgcccgaagcagctaattactggaaacaagtcgtaaaggtgaacgactatcagaaaatacggtttgcaaaccgggttgtttcttcaatgtttaacacagtctcgggcaagaaaatcgcgatcctcggttttgccttcaagaaggacacaggtgacacgagagagactccagcgattgatgtttgtaacagattagttgcagacaaggccaagctgagcatatacgacccacaagttcttgaagaacagatcagaagagatctttccatggctaggtttgactgggaccaccctgttcctcttcagcagattaaagctgaaggtatctcagagcaagtgaatgtcgtctcagatgcttacgaggcaactaaagatgcgcacggcctatgtgtcttaaccgaatgggatgagtttaaatccttggacttcaagaaaatctttgacaatatgcagaaaccagcttttgtgttcgatggtaggaatgttgttgatgcagtgaagctgcgtgagatcggtttcatcgtctactccattggtaaaccgcttgattcatggctcaaggatatgcctgctgtggcatgaaggtgccaacttcaaccaaactatatgtcttttctaaaatatagtatcttaagattccttataaattctgttgtaaccaagctgaaacaatgatatgtatttgctgaatctgccttagctggaatagtatatgaatttctttc

SEQ ID NO: 1956 - protein, 481 aa, Arabidopsis thaliana
MVKICCIGAGYVGGPTMAVMALKCPEIEVVVVDISEPRINAWNSDRLPIYEPGLEDVVKQCRGKNLFFSTDVEKHVFESDIVFVSVNTPTKTQGLGAGKAADLTYWESAARMIADVSKSSKIVVEKSTVPVRTAEAIEKILTHNSKGIEFQILSNPEFLAEGTAIKDLYNPDRVLIGGRDTAAGQKAIKALRDVYAHWVPVEQIICTNLWSAELSKLAANAFLAQRISSVNAMSALCEATGADVTQVAHAVGTDTRIGPKFLNASVGFGGSCFQKDILNLIYICECNGLPEAANYWKQVVKVNDYQKIRFANRVVSSMFNTVSGKKIAILGFAFKKDTGDTRETPAIDVCNRLVADKAKLSIYDPQVLEEQIRRDLSMARFDWDHPVPLQQIKAEGISEQVNVVSDAYEATKDAHGLCVLTEWDEFKSLDFKKIFDNMQKPAFVFDGRNVVDAVKLREIGFIVYSIGKPLDSWLKDMPAVA

SEQ ID NO: 1957 - protein, 465 aa, Arabidopsis thaliana
MAVMALKCPEIEVVVVDISEPRINAWNSDRLPIYEPGLEDVVKQCRGKNLFFSTDVEKHVFESDIVFVSVNTPTKTQGLGAGKAADLTYWESAARMIADVSKSSKIVVEKSTVPVRTAEAIEKILTHNSKGIEFQILSNPEFLAEGTAIKDLYNPDRVLIGGRDTAAGQKAIKALRDVYAHWVPVEQIICTNLWSAELSKLAANAFLAQRISSVNAMSALCEATGADVTQVAHAVGTDTRIGPKFLNASVGFGGSCFQKDILNLIYICECNGLPEAANYWKQVVKVNDYQKIRFANRVVSSMFNTVSGKKIAILGFAFKKDTGDTRETPAIDVCNRLVADKAKLSIYDPQVLEEQIRRDLSMARFDWDHPVPLQQIKAEGISEQVNVVSDAYEATKDAHGLCVLTEWDEFKSLDFKKIFDNMQKPAFVFDGRNVVDAVKLREIGFIVYSIGKPLDSWLKDMPAVA

SEQ ID NO: 1958 - protein, 462 aa, Arabidopsis thaliana
MALKCPEIEVVVVDISEPRINAWNSDRLPIYEPGLEDVVKQCRGKNLFFSTDVEKHVFESDIVFVSVNTPTKTQGLGAGKAADLTYWESAARMIADVSKSSKIVVEKSTVPVRTAEAIEKILTHNSKGIEFQILSNPEFLAEGTAIKDLYNPDRVLIGGRDTAAGQKAIKALRDVYAHWVPVEQIICTNLWSAELSKLAANAFLAQRISSVNAMSALCEATGADVTQVAHAVGTDTRIGPKFLNASVGFGGSCFQKDILNLIYICECNGLPEAANYWKQVVKVNDYQKIRFANRVVSSMFNTVSGKKIAILGFAFKKDTGDTRETPAIDVCNRLVADKAKLSIYDPQVLEEQIRRDLSMARFDWDHPVPLQQIKAEGISEQVNVVSDAYEATKDAHGLCVLTEWDEFKSLDFKKIFDNMQKPAFVFDGRNVVDAVKLREIGFIVYSIGKPLDSWLKDMPAVA

SEQ ID NO: 1959 - DNA, 1251 bp, Arabidopsis thaliana
aaagaaagaaagaaaaaaaagaagagaaacggccgaatcttcataaattccgccatctgttaagctcaatcgccgcctaaactccggcgactctctcgaagatatttggtgattgaggtgactcggaagagagtgagagagagagatggatgatagaggaggatcgttcgtagcagtgagaaggatttcacaaggtctagaacgaggaagtgtttatcattcttcttctgctgaggttgtagctggatcggcagcgtggttaggccgtggcctttcctgtgtttgtgttcagggtagagacggtgaccctcgtccttcatttgatctaacgcctgctcaggaggaatgcctgcagaggttgcaaagccgcattgatgttgcttatgacagctcaatacctcagcatcaggaagctctaaaggatctttggaaacttgcatttcctgaagaagagctacacggaattgtatctgatcagtggaaggaaatgggttggcagggaaaagatccatcgacagattttaggggtggtggttttatttctctcgaaaacttgttgtacttcgctaggaaattcccgaaatctttccacggccttctgcggaaacaggttggcgatcgttctgtgtgggaatacccctttgctgttgctggcatcaatataacattcatgctcatccagatgcttgaccttgaagcagtgaaaccacgaagtattgttggggaaacatttctaagattcctttcggtgaacgagtctgcgtttgaccttctttattgcattgccttcaagctaatggatcagcaatggctatccatgcgtgcttcatacatggagtttaacactgtgatgaaatcaacaaggcggcaactggagagagagattatgattgaagacattacaagtctcgaagatttgccatcatacagtcttctcagtcaatagcaaatagcttaccaaaaactactttgtaagtagaaagatctaacagctcagaaaccctatatcaaagctaaaacaacagcagagcaagtaagcaagcaaaaaagaagacaaggtttctctctctctcgctcttcactccatcttcctcgatattagtgttggttccatgaaatttgggttgttatttctatgaaaccagggtcagattttgtttcttatggggtcagattttctaacttgtggtgcttgtaaaacgttgttggttagttggtgttttgggctaataaatcatttggttacatttc

SEQ ID NO: 1960 - protein, 266 aa, Arabidopsis thaliana
MDDRGGSFVAVRRISQGLERGSVYHSSSAEVVAGSAAWLGRGLSCVCVQGRDGDPRPSFDLTPAQEECLQRLQSRIDVAYDSSIPQHQEALKDLWKLAFPEEELHGIVSDQWKEMGWQGKDPSTDFRGGGFISLENLLYFARKFPKSFHGLLRKQVGDRSVWEYPFAVAGINITFMLIQMLDLEAVKPRSIVGETFLRFLSVNESAFDLLYCIAFKLMDQQWLSMRASYMEFNTVMKSTRRQLEREIMIEDITSLEDLPSYSLLSQ

SEQ ID NO: 1961 - protein, 152 aa, Arabidopsis thaliana
MGWQGKDPSTDFRGGGFISLENLLYFARKFPKSFHGLLRKQVGDRSVWEYPFAVAGINITFMLIQMLDLEAVKPRSIVGETFLRFLSVNESAFDLLYCIAFKLMDQQWLSMRASYMEFNTVMKSTRRQLEREIMIEDITSLEDLPSYSLLSQ

SEQ ID NO: 1962 - DNA, 1271 bp, Arabidopsis thaliana
attttgtcgtttatggtttggaataatttccctgcagtttttttttcttcttaaagaacaaaaaaaaaacgggaacttgtaatgattggagctcgcgtcttttgtatcaccacgacagcactacgaagatcaccaatcttcttcttccccaagatcccgacccgacccgttttcagattatcaccagctactagacccatcgtcgccatgagcaccaccagcaaaaaccaagaggaactcgattccattttcaagcagaagcgggtcgtgcgctccactgtccgcaaatccctaaaagccatggacccttctctccgaacccaacaagatgaggcaattcagaagactgttcttgaagctccctggttcaaatcatgtaagggattgtgtgcttacattagctgcaaatctctcaatgaagtcgacacttctaaaatcctctctgagattctgcaacatccagattcaaatactcagaaaaagctatatgtcccttgggtggaggataagaacagtaacatgcgcatgttgcacatatctcatatggaagaccttgttgcaaactcaatgaacattttggaaccagctcctgttgatgcccaagggaatgaccgtgaagatgtgttgcaagcagatgaaccgatcgatttgttcatcttgccaggtcttgcgtttgacagatgtgggcgacgtttaggtcgtggaggtggctactacgacactttcttgaagagatatcaggaccgtgcaaaggagaagggttggagatatccacttatggttgcattgtcatactcgcctcaaattcttgaggatggaagtattcctgtaacacctaatgatgttctgatcgatgcccttgtgacaccttctggtgtggttcccatcacccctcgtgctaccgagagcatgtgagctcaggagcttgtgtttggagctgaccctcagataatccgaaggtcggcgcttgaaggctacattctggaagttgctaatttagtatcagcttctgtagttgccactcacttcagtttttttactaaactcgatttgagtcttgtatgataaaatatgaaagaagattagtccaatggtctctcacctgtttattccatatcaagttttgtcgggtaataacaatctttttaatcgcataaaatgatattggctcttgggttcttttgttgagcttctcatggaaatctatatgtactcaaatctttattcaatgtaaaaacaaaatcctgaaaacagcaaagtttttcttgtct

SEQ ID NO: 1963 - protein, 277 aa, Arabidopsis thaliana
MIGARVFCITTTALRRSPIFFFPKIPTRPVFRLSPATRPIVAMSTTSKNQEELDSIFKQKRVVRSTVRKSLKAMDPSLRTQQDEAIQKTVLEAPWFKSCKGLCAYISCKSLNEVDTSKILSEILQHPDSNTQKKLYVPWVEDKNSNMRMLHISHMEDLVANSMNILEPAPVDAQGNDREDVLQADEPIDLFILPGLAFDRCGRRLGRGGGYYDTFLKRYQDRAKEKGWRYPLMVALSYSPQILEDGSIPVTPNDVLIDALVTPSGVVPITPRATESM

SEQ ID NO: 1964 - protein, 235 aa, Arabidopsis thaliana
MSTTSKNQEELDSIFKQKRVVRSTVRKSLKAMDPSLRTQQDEAIQKTVLEAPWFKSCKGLCAYISCKSLNEVDTSKILSEILQHPDSNTQKKLYVPWVEDKNSNMRMLHISHMEDLVANSMNILEPAPVDAQGNDREDVLQADEPIDLFILPGLAFDRCGRRLGRGGGYYDTFLKRYQDRAKEKGWRYPLMVALSYSPQILEDGSIPVTPNDVLIDALVTPSGVVPITPRATESM

SEQ ID NO: 1965 - protein, 204 aa, Arabidopsis thaliana
MDPSLRTQQDEAIQKTVLEAPWFKSCKGLCAYISCKSLNEVDTSKILSEILQHPDSNTQKKLYVPWVEDKNSNMRMLHISHMEDLVANSMNILEPAPVDAQGNDREDVLQADEPIDLFILPGLAFDRCGRRLGRGGGYYDTFLKRYQDRAKEKGWRYPLMVALSYSPQILEDGSIPVTPNDVLIDALVTPSGVVPITPRATESM

SEQ ID NO: 1966 - DNA, 1439 bp, Arabidopsis thaliana
acagttcactctctcttgcctctccactcactcacagactacacaacacagacctaaaaaaatgtcttctctgcgtttgcgtttatgtcttcttctactcttacctatcacaattagctgcgtcacagtcactctcactgacctccccgcgtttcgtgaagctccggcgtttcgaaacggcagagaatgctccaaaacgacatggataccttcggatcacgaacacaacccatcaatcatccacatcgctatgactctcgacgcaatttacctccgtggctcagtcgccggcgtcttctccgttctccaacacgcttcttgtcctgaaaacatcgttttccacttcatcgccactcaccgtcgcagcgccgatctccgccgcataatctcctcaacattcccatacctaacctaccacatttaccattttgaccctaacctcgtccgcagcaaaatatcttcctctattcgtcgtgctttagaccaaccgttaaactacgctcggatctacctcgccgatctcctcccaatcgccgtccgccgcgtaatctacttcgactccgatctcgtagtcgtcgatgacgtggctaaactctggagaatcgatctacgtcggcacgtcgtcggagctccggagtactgtcacgcgaatttcactaactacttcacttcaagattctggtcgagtcaaggttacaaatcggcgttgaaagataggaaaccgtgttatttcaacaccggagtgatggtgattgatctcggaaaatggagagaaaggagagtcacggtgaagctagagacatggatgaggattcaaaaacgacatcgtatttacgaattgggatctttgcctccgtttctgctcgttttcgccggagatgttgagccggtggagcataggtggaatcagcatggtcttggtggtgataacttggaaggactttgccggaatttgcatccaggtccggtgagtttgttgcattggagcgggaaagggaaaccatggctaaggcttgactcgagacgaccgtgtccgttggattcgttatgggctccttatgatttgtttcgttattcaccgttgatctctgatagctgattgtaacatcggacggtggaggaaggcacgaccgtgttttgctgacgtggaataaagctattttgatcggtcgtaataaatacgttggtcaagccacgtgccagatgattgaagaggtggtaggttttgatcggacggtgtataaccattcatgtgataaagaattcccaggccaagtgtaatcgaaaagaagaaagtgaactagaagagttaagattgtgtaacggtaacgttccggagattggttcatatcgattgaaatgtattatgtgtttgaaattgattgtatggatctaattagtgtgacataatttacggaaaagtaaccacgtttttcaac

SEQ ID NO: 1967 - protein, 365 aa, Arabidopsis thaliana
QFTLSCLSTHSQTTQHRPKKMSSLRLRLCLLLLLPITISCVTVTLTDLPAFREAPAFRNGRECSKTTWIPSDHEHNPSIIHIAMTLDAIYLRGSVAGVFSVLQHASCPENIVFHFIATHRRSADLRRIISSTFPYLTYHIYHFDPNLVRSKISSSIRRALDQPLNYARIYLADLLPIAVRRVIYFDSDLVVVDDVAKLWRIDLRRHVVGAPEYCHANFTNYFTSRFWSSQGYKSALKDRKPCYFNTGVMVIDLGKWRERRVTVKLETWMRIQKRHRIYELGSLPPFLLVFAGDVEPVEHRWNQHGLGGDNLEGLCRNLHPGPVSLLHWSGKGKPWLRLDSRRPCPLDSLWAPYDLFRYSPLISDS

SEQ ID NO: 1968 - protein, 345 aa, Arabidopsis thaliana
MSSLRLRLCLLLLLPITISCVTVTLTDLPAFREAPAFRNGRECSKTTWIPSDHEHNPSIIHIAMTLDAIYLRGSVAGVFSVLQHASCPENIVFHFIATHRRSADLRRIISSTFPYLTYHIYHFDPNLVRSKISSSIRRALDQPLNYARIYLADLLPIAVRRVIYFDSDLVVVDDVAKLWRIDLRRHVVGAPEYCHANFTNYFTSRFWSSQGYKSALKDRKPCYFNTGVMVIDLGKWRERRVTVKLETWMRIQKRHRIYELGSLPPFLLVFAGDVEPVEHRWNQHGLGGDNLEGLCRNLHPGPVSLLHWSGKGKPWLRLDSRRPCPLDSLWAPYDLFRYSPLISDS

SEQ ID NO: 1969 - protein, 282 aa, Arabidopsis thaliana
MTLDAIYLRGSVAGVFSVLQHASCPENIVFHFIATHRRSADLRRIISSTFPYLTYHIYHFDPNLVRSKISSSIRRALDQPLNYARIYLADLLPIAVRRVIYFDSDLVVVDDVAKLWRIDLRRHVVGAPEYCHANFTNYFTSRFWSSQGYKSALKDRKPCYFNTGVMVIDLGKWRERRVTVKLETWMRIQKRHRIYELGSLPPFLLVFAGDVEPVEHRWNQHGLGGDNLEGLCRNLHPGPVSLLHWSGKGKPWLRLDSRRPCPLDSLWAPYDLFRYSPLISDS

SEQ ID NO: 1970 - DNA, 1159 bp, Arabidopsis thaliana
atctaagaagaggattcaggttgttgtaagtcctccaggcgcaagagttgagttcgtcggaactaattacacaggcgagcaagctgctatgcagacgaatacttatagagttggtgtttttaatagagaggctaaaactttgaggattcttcctgttgctcacaataagataatcagattggagcctagagttaaagctcaagaaacaaatgaggaagaagcttcaggaagtgctgtcgtcaaagaacttgaagaactaaaaacaggagaacgcgatcgttataatacaaaaaaagctgttactcgggataagaagaagcgtgccttatatatgggagatgatgctgcgactcagaaggtccttgatgggaaactaagtgagttagatgttaacacagctgctcttgaaggcaccagttctactgttgcacgcaacattcctccttacaataccgctgcaacgactgcaaatgaagcttatcccttagaaaagatcattgaaaagggggattggagttttcttgaagatatttactgacttctgcaacaggaaactgaagcagcaactgaggcttaccctgtatttgtccgcaacagattgtacagattgcgagatatcaaggacgatatgaaaaagcagacggtttgtggtgctgcaacgcttctcacccatctggttaagttcaaggacagaaactcaatgaatggttacgattccgctaaagaccacaagatgccagacatcttccgtcaaaaattcaacagcatgttcaaggattctgaatcagagaggatacctgttgacaagatcaaccttctgataagctacgttcttgtgctatcccttcacgtggataatttcatgaccgatccagaagacatagcaaaagatctgaggacaagcacagttgagctgaggaaacattttctacagcttggctgcaaattcctgaagcagaattctactacggttgctaccttaccgacccctctcaatttcccggaggttaaccggaggcgcagggcacgaaagtgatgacgattttgttctatctttacatatttgctgctattttaatgatatttctttgacggtctgttgagatattataaattgttctgtttcttgggtttaatgatatatgatgttttggcattt

SEQ ID NO: 1971 - protein, 178 aa, Arabidopsis thaliana
SKKRIQVVVSPPGARVEFVGTNYTGEQAAMQTNTYRVGVFNREAKTLRILPVAHNKIIRLEPRVKAQETNEEEASGSAVVKELEELKTGERDRYNTKKAVTRDKKKRALYMGDDAATQKVLDGKLSELDVNTAALEGTSSTVARNIPPYNTAATTANEAYPLEKIIEKGDWSFLEDIY

SEQ ID NO: 1972 - protein, 149 aa, Arabidopsis thaliana
MQTNTYRVGVFNREAKTLRILPVAHNKIIRLEPRVKAQETNEEEASGSAVVKELEELKTGERDRYNTKKAVTRDKKKRALYMGDDAATQKVLDGKLSELDVNTAALEGTSSTVARNIPPYNTAATTANEAYPLEKIIEKGDWSFLEDIY

SEQ ID NO: 1973 - protein, 135 aa, Arabidopsis thaliana
MKKQTVCGAATLLTHLVKFKDRNSMNGYDSAKDHKMPDIFRQKFNSMFKDSESERIPVDKINLLISYVLVLSLHVDNFMTDPEDIAKDLRTSTVELRKHFLQLGCKFLKQNSTTVATLPTPLNFPEVNRRRRARK

SEQ ID NO: 1974 - DNA, 1026 bp, Arabidopsis thaliana
aaattcctcctcattgttaaagtcgaaaaaaagggtaaagcagcaaaaccctaataaaatcacaacaaattaacacaaaaaaaccagatcttaaaactctctctacccaccaagaggatcaaccagtctcttccccttcagattctcctttccacagtgaatggatcaacaagaccatggacagtctggagctatgaactatggcacaaacccataccaaaccaacccgatgagcaccactgctgctactgtagcaggaggtgcggcacaaccaggccagctggcgttccaccagatccatcagcagcagcagcagcaacagctggcacagcagcttcaagcattttgggagaaccaattcaaagagattgagaagactaccgatttcaagaaccacagccttccccttgcgagaatcaagaaaatcatgaaagcggatgaagatgtccgtatgatctcggctgaggcgcctgtcgtgtttgcaagggcctgtgagatgttcatcctggagctgacactcaggtcgtggaaccacactgaggagaataagaggcggacgttgcagaagaacgatattgctgctgctgtgactagaaccgatatttttgatttccttgtggatattgttccccgggaggatctccgagatgaagtcttgggaagtattccgaggggcactgtcccggaagctgctgctgctggttacccgtatggatacttgcctgcaggaactgctccaataggaaatccgggaatggttatgggtaatcccggtggtgcgtatccacctaatccttatatgggtcaaccaatgtggcaacaacaggcacctgaccaacctgaccaggaaaattagcaagaaactgtgagtcttccagcttcttttaggcctaccttgtagtcttggggttttgtttctgttttcgaataatggtaacctttgtataacttatttcagtatcgtctcagtttggtactatgtcagttttggtattcttatcttattgaagtaaaaatgtgatagtg

SEQ ID NO: 1975 - protein, 231 aa, Arabidopsis thaliana
MDQQDHGQSGAMNYGTNPYQTNPMSTTAATVAGGAAQPGQLAFHQIHQQQQQQQLAQQLQAFWENQFKEIEKTTDFKNHSLPLARIKKIMKADEDVRMISAEAPVVFARACEMFILELTLRSWNHTEENKRRTLQKNDIAAAVTRTDIFDFLVDIVPREDLRDEVLGSIPRGTVPEAAAAGYPYGYLPAGTAPIGNPGMVMGNPGGAYPPNPYMGQPMWQQQAPDQPDQEN

SEQ ID NO: 1976 - protein, 220 aa, Arabidopsis thaliana
MNYGTNPYQTNPMSTTAATVAGGAAQPGQLAFHQIHQQQQQQQLAQQLQAFWENQFKEIEKTTDFKNHSLPLARIKKIMKADEDVRMISAEAPVVFARACEMFILELTLRSWNHTEENKRRTLQKNDIAAAVTRTDIFDFLVDIVPREDLRDEVLGSIPRGTVPEAAAAGYPYGYLPAGTAPIGNPGMVMGNPGGAYPPNPYMGQPMWQQQAPDQPDQEN

SEQ ID NO: 1977 - protein, 208 aa, Arabidopsis thaliana
MSTTAATVAGGAAQPGQLAFHQIHQQQQQQQLAQQLQAFWENQFKEIEKTTDFKNHSLPLARIKKIMKADEDVRMISAEAPVVFARACEMFILELTLRSWNHTEENKRRTLQKNDIAAAVTRTDIFDFLVDIVPREDLRDEVLGSIPRGTVPEAAAAGYPYGYLPAGTAPIGNPGMVMGNPGGAYPPNPYMGQPMWQQQAPDQPDQEN

SEQ ID NO: 1978 - DNA, 1237 bp, Arabidopsis thaliana
atctttcgaatcaaaacgatctgaagaagaagaagaagaagaagaatcaaaatctggatcagaaacaagggaggagaagatgttgcccacaacttccagatctcgttcttcatcttcttcatcccgagctaatccaatgttccttcagtactttcgtcgtatcgttaagtggcagcaaatggatgttgaatatactttctggcaaatgcttaacctttgtacatctccgaaagttgtctatcaacacactaagtatcacaaacaaactaagaaccaatgggcacgtgatgaccctgcgtttattgtgatctgtagcctgcttcttgttgttgcaactgtagcctattgtgtcacgtatgaccatagtagctctcatgccgtcgtcgtagtcgtttcagttttgttcacccatttcttaatcaccggagcagttatagctacatgctgttggtttttgacaaattcttaccttcgcgaggagactccaaacagtcatgtggtggaacaacgcgttgaatggctgtatacatttgatgttcactgcaactcgttctttccaatgtttgtgctgctctacgtcgtacattacttcttatcaccgctcctgatagcacacggattcatccctttactgctatcgaatctgcttttcatggtcggggcttcgtactaccattatcttaacttcctaggatatgacgtgcttccatttttggagcgaacaacattcttcctctacccaatcggagttgtcattgtcctgtctcctattcttatcttaagcggattcaacccgtcaagatatttcatgaacatgtacttcagccaaaggttataaaaaaaacagccacatcagtggaatccttagggcttttgcactgcacatacatcattaaagtaaggaacaagaagattgagagagtaatgattttcccttttttacccgtaacagatcatcgtaatgctcagtttctggtacaacttcaaaaggctacttaatagaccagtaacattttctaaacatgacccctcttagcaagtgctctgttaaatgtagtggtttttttggcatctttcttttgcggtcattcatacgttacgtgttgcgactgtcattgagtcataagtacaaaatcatgatctcgcagattctggaaagttgtactaaaggaaggaccggtcagatatttgatctgatgatcatctctctaaggttaatgacttatgttatctttgg

SEQ ID NO: 1979 - protein, 278 aa, Arabidopsis thaliana
SFESKRSEEEEEEEESKSGSETREEKMLPTTSRSRSSSSSSRANPMFLQYFRRIVKWQQMDVEYTFWQMLNLCTSPKVVYQHTKYHKQTKNQWARDDPAFIVICSLLLVVATVAYCVTYDHSSSHAVVVVVSVLFTHFLITGAVIATCCWFLTNSYLREETPNSHVVEQRVEWLYTFDVHCNSFFPMFVLLYVVHYFLSPLLIAHGFIPLLLSNLLFMVGASYYHYLNFLGYDVLPFLERTTFFLYPIGVVIVLSPILILSGFNPSRYFMNMYFSQRL

SEQ ID NO: 1980 - protein, 252 aa, Arabidopsis thaliana
MLPTTSRSRSSSSSSRANPMFLQYFRRIVKWQQMDVEYTFWQMLNLCTSPKVVYQHTKYHKQTKNQWARDDPAFIVICSLLLVVATVAYCVTYDHSSSHAVVVVVSVLFTHFLITGAVIATCCWFLTNSYLREETPNSHVVEQRVEWLYTFDVHCNSFFPMFVLLYVVHYFLSPLLIAHGFIPLLLSNLLFMVGASYYHYLNFLGYDVLPFLERTTFFLYPIGVVIVLSPILILSGFNPSRYFMNMYFSQRL

SEQ ID NO: 1981 - protein, 233 aa, Arabidopsis thaliana
MFLQYFRRIVKWQQMDVEYTFWQMLNLCTSPKVVYQHTKYHKQTKNQWARDDPAFIVICSLLLVVATVAYCVTYDHSSSHAVVVVVSVLFTHFLITGAVIATCCWFLTNSYLREETPNSHVVEQRVEWLYTFDVHCNSFFPMFVLLYVVHYFLSPLLIAHGFIPLLLSNLLFMVGASYYHYLNFLGYDVLPFLERTTFFLYPIGVVIVLSPILILSGFNPSRYFMNMYFSQRL

SEQ ID NO: 1982 - DNA, 1265 bp, Arabidopsis thaliana
attttaagataagaataaaactaaataaggaaaaagaaggataattaggtcatcttcaccttcctcgttgtctcctcacactgtaaaagacttgaagctcatataaaatctcaagcttctatctatttcttctttcatcatcatcatcatcactctctcttcttcttctctctattccatggctttagtacgtgaacgtcgtcagctaaatctccgtcttcctcttcctccaatctccgaccgccgcttctccacctcttcctcctcagccaccaccaccaccgtcgctggctgtaacggaatctccgcttgtgatctcgagaaactcaacgttctcggatgcggaaacggcgggattgtttacaaagtccgtcataaaaccacatcggagatctacgctttgaaaacagttaacggcgacatggatccgattttcacaagacagttgatgcgagagatggagattctccgccgtacagattcaccgtacgtcgttaagtgtcacggaatcttcgagaaacctgtcgtcggtgaagtatcgattctaatggagtatatggacggcggaaccctagaatcactacgcggcggtgtaacggagcaaaaactcgccggattcgctaaacagatcttaaaaggattaagctatttacacgctcttaagatcgttcatcgtgatatcaaaccggcgaatcttcttctcaattcgaaaaacgaagttaaaatcgctgatttcggagttagtaagatcttagtccgatcattagattcgtgtaattcgtatgttggtacttgtgcttatatgagtccggagaggtttgattcggaatcttccggtggaagctctgatatctacgccggagatatctggagtttcggattgatgatgcttgagcttctcgttggtcattttcctttgcttccgccgggacagagacctgattgggcgacgttgatgtgcgcggtgtgttttggagaaccgccgcgagcgccggaggggtgttctgaagagtttaggagcttcgttgagtgttgtctccgtaaagattcgagtaagcgatggacggcgccgcagcttcttgctcatccttttctccgggaagatctttgattcgattccttttgtaacagaatctggaatcttaaaagttggaatattagatttgaaattattttaatttttgtagagttttctggagatatttatgatcgtgatttttgtacatataatatactccagaatgttaggggaaaatcgttcttgt

SEQ ID NO: 1983 - protein, 310 aa, Arabidopsis thaliana
MALVRERRQLNLRLPLPPISDRRFSTSSSSATTTTVAGCNGISACDLEKLNVLGCGNGGIVYKVRHKTTSEIYALKTVNGDMDPIFTRQLMREMEILRRTDSPYVVKCHGIFEKPVVGEVSILMEYMDGGTLESLRGGVTEQKLAGFAKQILKGLSYLHALKIVHRDIKPANLLLNSKNEVKIADFGVSKILVRSLDSCNSYVGTCAYMSPERFDSESSGGSSDIYAGDIWSFGLMMLELLVGHFPLLPPGQRPDWATLMCAVCFGEPPRAPEGCSEEFRSFVECCLRKDSSKRWTAPQLLAHPFLREDL

SEQ ID NO: 1984 - protein, 229 aa, Arabidopsis thaliana
MDPIFTRQLMREMEILRRTDSPYVVKCHGIFEKPVVGEVSILMEYMDGGTLESLRGGVTEQKLAGFAKQILKGLSYLHALKIVHRDIKPANLLLNSKNEVKIADFGVSKILVRSLDSCNSYVGTCAYMSPERFDSESSGGSSDIYAGDIWSFGLMMLELLVGHFPLLPPGQRPDWATLMCAVCFGEPPRAPEGCSEEFRSFVECCLRKDSSKRWTAPQLLAHPFLREDL

SEQ ID NO: 1985 - protein, 220 aa, Arabidopsis thaliana
MREMEILRRTDSPYVVKCHGIFEKPVVGEVSILMEYMDGGTLESLRGGVTEQKLAGFAKQILKGLSYLHALKIVHRDIKPANLLLNSKNEVKIADFGVSKILVRSLDSCNSYVGTCAYMSPERFDSESSGGSSDIYAGDIWSFGLMMLELLVGHFPLLPPGQRPDWATLMCAVCFGEPPRAPEGCSEEFRSFVECCLRKDSSKRWTAPQLLAHPFLREDL

SEQ ID NO: 1986 - DNA, 1138 bp, Arabidopsis thaliana
tctacaagtttttgatttcagagtccaccgttgagcctgttcaattaaatcgttgaatctcgcggtgcgttttactttgattctttcgaattttttttatatggatgttgccgcgatggcgagatgtgtgggaaggtgctacgtttcgccggcgttcggtgagtctgaatcgcaccggttatcggagcggcggtttctgaaattgtctagctccacgaattcggatcccgccggtagtaaaagtttgaagcttcgcgggaaaattcatcggagaatgagctacttccgtccgatcatggcaaaagatgaatccatttcatcgcggtccggtgaaacgaagcaaatcaatggaaagcaaaagaacattgtctggcatgattgtcccgttactaaatccgacaggcaagaattaattaagcaaaagggatgtgtgatttggattactggcttaagtggttcaggtaaaagtagtctggcatgtgctcttagtcgagctttgcacaatcgtggaaagctttcgtatatacttgatggtgacaatgttcgacatggtttaaacagcgatcttagtttcgaagcagatgatcgagctgaaaacattcgaagagttggtgaagtggctaaactgtttgcagattctggtattatctgtattgcaagtttaatatctccttaccggatagaacgagctgcctgccgtgcattattaccacaaggagatttcattgaggtatttatggatgtgccactccatgtttgtgaagctagagatccaaagggcttatacaaacgtgcacgcgctggtaaaatcaaaggttttacaggagtagatgatccatatgaagcgcctttggattgcgagattgtgatacaaaacagtagagacaaggggctttcttcttcatcttcatcttcatcttcaccttcatcttcgtcttcttctctgtgtgaaatggcagatattgttgtgtcgtacttggaccaaaatggatacctgaagaaacactccacaaaatcacgtaattgtatgtaaatgtaatattaatatcattgttgtaacgtttcttaaacctattttacctatggacgattaaattgtgaaaacataaatgtaattcacaatctgcaaagagttggc

SEQ ID NO: 1987 - protein, 310 aa, Arabidopsis thaliana
MDVAAMARCVGRCYVSPAFGESESHRLSERRFLKLSSSTNSDPAGSKSLKLRGKIHRRMSYFRPIMAKDESISSRSGETKQINGKQKNIVWHDCPVTKSDRQELIKQKGCVIWITGLSGSGKSSLACALSRALHNRGKLSYILDGDNVRHGLNSDLSFEADDRAENIRRVGEVAKLFADSGIICIASLISPYRIERAACRALLPQGDFIEVFMDVPLHVCEARDPKGLYKRARAGKIKGFTGVDDPYEAPLDCEIVIQNSRDKGLSSSSSSSSSPSSSSSSLCEMADIVVSYLDQNGYLKKHSTKSRNCM

SEQ ID NO: 1988 - protein, 305 aa, Arabidopsis thaliana
MARCVGRCYVSPAFGESESHRLSERRFLKLSSSTNSDPAGSKSLKLRGKIHRRMSYFRPIMAKDESISSRSGETKQINGKQKNIVWHDCPVTKSDRQELIKQKGCVIWITGLSGSGKSSLACALSRALHNRGKLSYILDGDNVRHGLNSDLSFEADDRAENIRRVGEVAKLFADSGIICIASLISPYRIERAACRALLPQGDFIEVFMDVPLHVCEARDPKGLYKRARAGKIKGFTGVDDPYEAPLDCEIVIQNSRDKGLSSSSSSSSSPSSSSSSLCEMADIVVSYLDQNGYLKKHSTKSRNCM

SEQ ID NO: 1989 - protein, 252 aa, Arabidopsis thaliana
MSYFRPIMAKDESISSRSGETKQINGKQKNIVWHDCPVTKSDRQELIKQKGCVIWITGLSGSGKSSLACALSRALHNRGKLSYILDGDNVRHGLNSDLSFEADDRAENIRRVGEVAKLFADSGIICIASLISPYRIERAACRALLPQGDFIEVFMDVPLHVCEARDPKGLYKRARAGKIKGFTGVDDPYEAPLDCEIVIQNSRDKGLSSSSSSSSSPSSSSSSLCEMADIVVSYLDQNGYLKKHSTKSRNCM

SEQ ID NO: 1990 - DNA, 1250 bp, Arabidopsis thaliana
aaaagcaaatttaaacaacatagcgagagttcatgaatataactaagatgaaactcttctatgtgatcctattttttatcagttctttacagatttcaaactccatcgatttcaattatccgtctgcttttaatttcggagattccaattctgataccggtgatcttgttgctggccttggcattcgtctagaccttcctaacggacaaaattccttcaaaacttcatcccaaagattctgcgatggacgtcttgttatagattttctaatggatgaaatggacctgccatttttaaatccatatttggattcattaggtttaccaaatttcaaaaaagggtgtaactttgcagcagcaggatccacaattcttcccgcaaacccgacctcggtctctcctttctcctttgatcttcaaatctctcaattcatccggttcaaatctagggccattgaattactttctaaaacaggaaggaaatatgaaaagtacttaccaccaattgattattattcaaaaggattatacatgattgacataggccaaaatgatatagctggtgccttctactccaagactcttgaccaagttcttgcctctattccttccattcttgaaacttttgaagctggcctcaagaggctttatgaggaaggaggcagaaacatttggatacacaacacagggcctttaggatgtttagctcaaaatattgccaagtttgggacagattcaacaaaacttgatgagtttggttgcgttagttcccataaccaagcagctaagcttttcaatcttcaactccatgctatgtccaacaaatttcaagctcaataccctgatgcaaatgttacttacgttgacatcttctctattaaatctaatctcatcgctaattattcccgatttggcttcgaaaaaccgttaatggcgtgttgtggagtcggaggggcgccattaaattacgatagtcgcattacatgtggccaaactaaagtcttagatgggatatcagtaacagccaaagcttgcaacgatagttccgagtacataaactgggatggaattcattataccgaagccgcaaacgagttcgtctcatctcaaatcttaaccggaaaatattccgatccaccgttttcagatcaaatgccattttttctaaccttgaaattttaaacaatgccgttacaatcggatggtttcattcattctttagttttctgttattatttacttatattgttc

SEQ ID NO: 1991 - protein, 382 aa, Arabidopsis thaliana
MNITKMKLFYVILFFISSLQISNSIDFNYPSAFNFGDSNSDTGDLVAGLGIRLDLPNGQNSFKTSSQRFCDGRLVIDFLMDEMDLPFLNPYLDSLGLPNFKKGCNFAAAGSTILPANPTSVSPFSFDLQISQFIRFKSRAIELLSKTGRKYEKYLPPIDYYSKGLYMIDIGQNDIAGAFYSKTLDQVLASIPSILETFEAGLKRLYEEGGRNIWIHNTGPLGCLAQNIAKFGTDSTKLDEFGCVSSHNQAAKLFNLQLHAMSNKFQAQYPDANVTYVDIFSIKSNLIANYSRFGFEKPLMACCGVGGAPLNYDSRITCGQTKVLDGISVTAKACNDSSEYINWDGIHYTEAANEFVSSQILTGKYSDPPFSDQMPFFLTLKF

SEQ ID NO: 1992 - protein, 377 aa, Arabidopsis thaliana
MKLFYVILFFISSLQISNSIDFNYPSAFNFGDSNSDTGDLVAGLGIRLDLPNGQNSFKTSSQRFCDGRLVIDFLMDEMDLPFLNPYLDSLGLPNFKKGCNFAAAGSTILPANPTSVSPFSFDLQISQFIRFKSRAIELLSKTGRKYEKYLPPIDYYSKGLYMIDIGQNDIAGAFYSKTLDQVLASIPSILETFEAGLKRLYEEGGRNIWIHNTGPLGCLAQNIAKFGTDSTKLDEFGCVSSHNQAAKLFNLQLHAMSNKFQAQYPDANVTYVDIFSIKSNLIANYSRFGFEKPLMACCGVGGAPLNYDSRITCGQTKVLDGISVTAKACNDSSEYINWDGIHYTEAANEFVSSQILTGKYSDPPFSDQMPFFLTLKF

SEQ ID NO: 1993 - protein, 303 aa, Arabidopsis thaliana
MDEMDLPFLNPYLDSLGLPNFKKGCNFAAAGSTILPANPTSVSPFSFDLQISQFIRFKSRAIELLSKTGRKYEKYLPPIDYYSKGLYMIDIGQNDIAGAFYSKTLDQVLASIPSILETFEAGLKRLYEEGGRNIWIHNTGPLGCLAQNIAKFGTDSTKLDEFGCVSSHNQAAKLFNLQLHAMSNKFQAQYPDANVTYVDIFSIKSNLIANYSRFGFEKPLMACCGVGGAPLNYDSRITCGQTKVLDGISVTAKACNDSSEYINWDGIHYTEAANEFVSSQILTGKYSDPPFSDQMPFFLTLKF

SEQ ID NO: 1994 - DNA, 1394 bp, Arabidopsis thaliana
cgacaagattattgccgggaaacagaccgagaagattaagcgtaagattctcaacgaatgttggagaaggaatctgatttgactgcaatggagaaaccaaataacaagcacgcggctgattcgttttccagcgaggatttggtctcaccggtgaagaaggcaaagaagtcagaggaggtttccggcggaggagaagctgtagccgccgttggtaatagagaggtggaagaagataagcctagctttgtaagtgaagaaaagaaggagtttctggtcgaagctgatgttgctgaagacaaaggagctagacatactatggaagatgtttgggtggttttgcctgacgcttctttggatttcccagggacactaaggtgtgcgcattttgcaatttatgatgggcatggaggtcgtttagctgcagagtttgctaagaagcatcttcaccttaacgttctttcagctgggttaccacgtgagttgctggatgtcaaagttgctaaaaaggccattcttgaaggtttccggaaaactgatgagttgctcctgcaaaaaagtgtttcaggaggatggcaagatggagccacagcagtctgtgtctggatacttgatcaaaaggtttttgttgccaatatcggtgatgctaaggctgttttggcacgatcctctactaccaacgaattggggaatcatacagaagcaggtaatccactcaaagcaattgttttgacgagagagcacaaagcaatttatccacaggagcgctctcgcattcaaaagtcaggtggtgttataagctcaaatggacggttacaagggcgtcttgaggtttctagggcttttggtgatcgtcattttaagaagtttggtgtcagtgcaactccagacattcatgcttttgaattaactgagagagaaaacttcatgattcttggttgcgatggattgtgggaagtaagtgtttggaccaagtgatgctgttggatttgtccagaaacttttgaaggagggcttgcatgtaagcacggtaagtcgccgtcttgtgaaggaagctgtgaaagaacgtcgttgcaaagacaactgcacagcaatcgtgatagtcttcaagcgggtatgactaaagaagagcctgactgacatgtgggcatctgtttttctggctcgtatgtgttttataaacctgttgttggtatttggtaaaatctttttgagctgtcaatggatcaattaaattcctggggccaccatcgaaagaaaaatgagtttgaagattaaacagagctctctttgtaccgcaaagaattctagaagcaaaaagtagaaagctttataatcatagacttcatagtacagtatgatcagtttacaatgaataaaaagcctatgggacaacg

SEQ ID NO: 1995 - protein, 305 aa, Arabidopsis thaliana
MLEKESDLTAMEKPNNKHAADSFSSEDLVSPVKKAKKSEEVSGGGEAVAAVGNREVEEDKPSFVSEEKKEFLVEADVAEDKGARHTMEDVWVVLPDASLDFPGTLRCAHFAIYDGHGGRLAAEFAKKHLHLNVLSAGLPRELLDVKVAKKAILEGFRKTDELLLQKSVSGGWQDGATAVCVWILDQKVFVANIGDAKAVLARSSTTNELGNHTEAGNPLKAIVLTREHKAIYPQERSRIQKSGGVISSNGRLQGRLEVSRAFGDRHFKKFGVSATPDIHAFELTERENFMILGCDGLWEVSVWTK

SEQ ID NO: 1996 - protein, 295 aa, Arabidopsis thaliana
MEKPNNKHAADSFSSEDLVSPVKKAKKSEEVSGGGEAVAAVGNREVEEDKPSFVSEEKKEFLVEADVAEDKGARHTMEDVWVVLPDASLDFPGTLRCAHFAIYDGHGGRLAAEFAKKHLHLNVLSAGLPRELLDVKVAKKAILEGFRKTDELLLQKSVSGGWQDGATAVCVWILDQKVFVANIGDAKAVLARSSTTNELGNHTEAGNPLKAIVLTREHKAIYPQERSRIQKSGGVISSNGRLQGRLEVSRAFGDRHFKKFGVSATPDIHAFELTERENFMILGCDGLWEVSVWTK

SEQ ID NO: 1997 - protein, 219 aa, Arabidopsis thaliana
MEDVWVVLPDASLDFPGTLRCAHFAIYDGHGGRLAAEFAKKHLHLNVLSAGLPRELLDVKVAKKAILEGFRKTDELLLQKSVSGGWQDGATAVCVWILDQKVFVANIGDAKAVLARSSTTNELGNHTEAGNPLKAIVLTREHKAIYPQERSRIQKSGGVISSNGRLQGRLEVSRAFGDRHFKKFGVSATPDIHAFELTERENFMILGCDGLWEVSVWTK

SEQ ID NO: 1998 - DNA, 1340 bp, Arabidopsis thaliana
gtcttggtctccgacaggaccgactctgttctcgtgttcttttttccctgtcatttccagatttcataaagctaaaagaaatctaatttctttgtttaccagagacttaaactggtttctgtatcttttactgggttctttcagatatataaatggatcaaatcgttaacgtggatgagtttcaagagctggccaaacaggccctccctaagatgtactatgatttctacaatggaggagcagaggatcaacacactctcaatgaaaatgtccaagctttccgtagaatcatgtttaggcctagggttcttgttgatgtgagcaacatagatatgtctacaagtatgttgggttacccaatctcagctcccatcatgattgctccaacagcaatgcataagttggctcatcctaaaggagaaatcgccacagcgaaagctgcagctgcgtgtaacactatcatgatagtatcattcatgtctacttgcactattgaggaggttgcttccagttgtaacgctgttcggtttcttcaaatatatgtgtacaagagacgtgatgtaacagctcagattgtgaaaagagctgaaaaagctggattcaaggctatagttctaactgttgatgttcccagacttggtagaagggaagcagatataaagaacaaaatgatatccccacagctgaagaattttgaaggcttagtttcaaccgaagtccgacctaatgaaggttcaggggttgaagcctttgcctctagtgcatttgatgcttcgttaagctggaaggatatcgaatggttaagatctattacaaagttgccaattctggtcaaagggttactcacacgtgaagacgctcttaaggctgttgaagccggtgtagatggaatagtggtatccaaccacggggctcgccagctcgactattccccggctacgataactgttttagaagaggttgttcatgctgtgaaaggtaggattccggttttgcttgatggaggagtaagacgaggaacagatgttttcaaagcgctggcgctcggagcacaagctgttcttatagggaggcctatagtctatgggcttgcagctaagggtgaagatggagtgaaaaaagtgattgatatgctgaaaaatgagtttgagattactatggccctttctggctgtccaaccattgatgacgtaaccagaaaccatgttaggacagagaatgagagaattaaatctatgctctgatcctaaaaccaacagatctagtctcagagacttaatcagacagttggacaacagtatgaaatactgtcaatgcacataaataaaaagctctatttc

SEQ ID NO: 1999 - protein, 363 aa, Arabidopsis thaliana
MDQIVNVDEFQELAKQALPKMYYDFYNGGAEDQHTLNENVQAFRRIMFRPRVLVDVSNIDMSTSMLGYPISAPIMIAPTAMHKLAHPKGEIATAKAAAACNTIMIVSFMSTCTIEEVASSCNAVRFLQIYVYKRRDVTAQIVKRAEKAGFKAIVLTVDVPRLGRREADIKNKMISPQLKNFEGLVSTEVRPNEGSGVEAFASSAFDASLSWKDIEWLRSITKLPILVKGLLTREDALKAVEAGVDGIVVSNHGARQLDYSPATITVLEEVVHAVKGRIPVLLDGGVRRGTDVFKALALGAQAVLIGRPIVYGLAAKGEDGVKKVIDMLKNEFEITMALSGCPTIDDVTRNHVRTENERIKSML

SEQ ID NO: 2000 - protein, 343 aa, Arabidopsis thaliana
MYYDFYNGGAEDQHTLNENVQAFRRIMFRPRVLVDVSNIDMSTSMLGYPISAPIMIAPTAMHKLAHPKGEIATAKAAAACNTIMIVSFMSTCTIEEVASSCNAVRFLQIYVYKRRDVTAQIVKRAEKAGFKAIVLTVDVPRLGRREADIKNKMISPQLKNFEGLVSTEVRPNEGSGVEAFASSAFDASLSWKDIEWLRSITKLPILVKGLLTREDALKAVEAGVDGIVVSNHGARQLDYSPATITVLEEVVHAVKGRIPVLLDGGVRRGTDVFKALALGAQAVLIGRPIVYGLAAKGEDGVKKVIDMLKNEFEITMALSGCPTIDDVTRNHVRTENERIKSML

SEQ ID NO: 2001 - protein, 317 aa, Arabidopsis thaliana
MFRPRVLVDVSNIDMSTSMLGYPISAPIMIAPTAMHKLAHPKGEIATAKAAAACNTIMIVSFMSTCTIEEVASSCNAVRFLQIYVYKRRDVTAQIVKRAEKAGFKAIVLTVDVPRLGRREADIKNKMISPQLKNFEGLVSTEVRPNEGSGVEAFASSAFDASLSWKDIEWLRSITKLPILVKGLLTREDALKAVEAGVDGIVVSNHGARQLDYSPATITVLEEVVHAVKGRIPVLLDGGVRRGTDVFKALALGAQAVLIGRPIVYGLAAKGEDGVKKVIDMLKNEFEITMALSGCPTIDDVTRNHVRTENERIKSML

SEQ ID NO: 2002 - DNA, 2425 bp, Arabidopsis thaliana
gacaaaccacaacaaaaaatctcgagacaaagatacaatggcgagccgaaacagagcactcttctctgtttccactcttttcctctgtttcatcgtctgcatctccgagcaatcgaacaatcagtcttctccagtcttcgcctgtgacgtcaccggaaacccttctcttgccgggcttagattctgcaacgcggggttgagtatcaaagcccgagtcaccgatcttgtcggaagattgacgttggaggagaaaatcgggtttttgaccagcaaagctatcggcgttagccgccttgggattccgtcttacaaatggtggtcggaggcacttcatggcgtctctaacgtcggaggtggtagtcggttcaccggtcaagtccctggcgccactagcttcccacaagttatactcacggccgcttctttcaatgtgtctttgttccaagccattggcaaggttgtatcgacagaggcgagggcaatgtacaatgtgggatcagccggtttaacgttttggtcacctaatgtgaacatattccgggacccgagatggggaagaggacaagagactcccggtgaggacccaacactctcaagcaaatacgcagtggcctacgttaaaggtcttcaggagactgacggtggagatcctaaccgtctcaaagtcgctgcttgctgcaaacactacaccgcctatgatattgacaattggagaaatgtcaatcgtctcactttcaacgctgtggtaaaccaacaagatctggctgatacgtttcaaccaccgttcaagagctgtgtggttgatgggcatgttgctagtgtcatgtgttcttacaaccaagttaacggtaaaccaacatgtgccgatcctgatctgctttccggtgtgatccgcggacaatggcagctcaacggatacattgtttcggattgtgattcggtagatgtgttgttcagaaaacaacactatgctaagactccagaagaagctgtggccaaatctctattggcaggtttggatttgaattgtgatcatttcaatggtcaacacgcgatgggagcggtcaaggcgggtttggtaaacgaaacagctattgacaaagcgatttcaaacaatttcgcgactctgatgcgtttagggttcttcgatggagaccctaagaagcagctctacggtggtcttggtcctaaggatgtttgcaccgctgataaccaagaactcgcaagagatggcgcaagacaaggcattgtcttgcttaagaactctgctggttcgcttccgctctcaccttccgcaatcaaaacattagccgtgatcggaccaaacgccaatgccacagaaacaatgatcggaaactaccacggtgtaccatgcaagtacacaacgccgcttcagggattggcagaaacggtgtcgtctacctatcaactgggatgtaacgtggcttgcgtagatgcggatataggctcagccgtggatctggctgcttctgcggatgctgttgtgctcgtggtgggcgcagaccaatcaattgagagggagggccatgaccgagtcgacctgtatcttcctggaaagcagcaagagcttgtgactcgagttgctatggcagcaagaggaccggtggtgctagttatcatgtccggtggaggatttgacattacattcgccaagaatgataaaaagatcacaagcataatgtgggtcggataccctggtgaagccggtggtctcgccattgctgacgttatcttcggacgtcataatccgagtggaaatttgccgatgacgtggtatcctcaatcgtacgtggaaaaagttccgatgtcaaatatgaacatgagacccgacaaatcaaaggggtatccgggtcggagttacaggttttacaccggagaaaccgtatacgccttcgcagacgcgcttacctacactaaattcgaccatcagctaatcaaagcgccaagactcgtctctctcagtctcgacgagaaccacccttgccgatcatcggagtgccaatctttggacgcgatcggacctcactgcgagaacgccgttgagggaggatcggatttcgaggttcatttgaatgtaaagaacaccggagacagagcgggaagccacacggtgtttctgttcacgacgtcgccgcaagtacacggatctccgattaagcaactactaggatttgagaagattcgtctgggaaagagtgaagaagcggtggttaggtttaacgtcaatgtgtgtaaggatctgagtgtggttgatgagaccgggaagaggaaaatcgcgttaggtcatcatcttctccatgtaggaagcttgaaacactctttgaacattagtgtttgattcgacggctcgttttgtttttaacttaagatattaattatggtaataaaatgagatagcaatttt

SEQ ID NO: 2003 - protein, 785 aa, Arabidopsis thaliana
TNHNKKSRDKDTMASRNRALFSVSTLFLCFIVCISEQSNNQSSPVFACDVTGNPSLAGLRFCNAGLSIKARVTDLVGRLTLEEKIGFLTSKAIGVSRLGIPSYKWWSEALHGVSNVGGGSRFTGQVPGATSFPQVILTAASFNVSLFQAIGKVVSTEARAMYNVGSAGLTFWSPNVNIFRDPRWGRGQETPGEDPTLSSKYAVAYVKGLQETDGGDPNRLKVAACCKHYTAYDIDNWRNVNRLTFNAVVNQQDLADTFQPPFKSCVVDGHVASVMCSYNQVNGKPTCADPDLLSGVIRGQWQLNGYIVSDCDSVDVLFRKQHYAKTPEEAVAKSLLAGLDLNCDHFNGQHAMGAVKAGLVNETAIDKAISNNFATLMRLGFFDGDPKKQLYGGLGPKDVCTADNQELARDGARQGIVLLKNSAGSLPLSPSAIKTLAVIGPNANATETMIGNYHGVPCKYTTPLQGLAETVSSTYQLGCNVACVDADIGSAVDLAASADAVVLVVGADQSIEREGHDRVDLYLPGKQQELVTRVAMAARGPVVLVIMSGGGFDITFAKNDKKITSIMWVGYPGEAGGLAIADVIFGRHNPSGNLPMTWYPQSYVEKVPMSNMNMRPDKSKGYPGRSYRFYTGETVYAFADALTYTKFDHQLIKAPRLVSLSLDENHPCRSSECQSLDAIGPHCENAVEGGSDFEVHLNVKNTGDRAGSHTVFLFTTSPQVHGSPIKQLLGFEKIRLGKSEEAVVRFNVNVCKDLSVVDETGKRKIALGHHLLHVGSLKHSLNISV

SEQ ID NO: 2004 - protein, 773 aa, Arabidopsis thaliana
MASRNRALFSVSTLFLCFIVCISEQSNNQSSPVFACDVTGNPSLAGLRFCNAGLSIKARVTDLVGRLTLEEKIGFLTSKAIGVSRLGIPSYKWWSEALHGVSNVGGGSRFTGQVPGATSFPQVILTAASFNVSLFQAIGKVVSTEARAMYNVGSAGLTFWSPNVNIFRDPRWGRGQETPGEDPTLSSKYAVAYVKGLQETDGGDPNRLKVAACCKHYTAYDIDNWRNVNRLTFNAVVNQQDLADTFQPPFKSCVVDGHVASVMCSYNQVNGKPTCADPDLLSGVIRGQWQLNGYIVSDCDSVDVLFRKQHYAKTPEEAVAKSLLAGLDLNCDHFNGQHAMGAVKAGLVNETAIDKAISNNFATLMRLGFFDGDPKKQLYGGLGPKDVCTADNQELARDGARQGIVLLKNSAGSLPLSPSAIKTLAVIGPNANATETMIGNYHGVPCKYTTPLQGLAETVSSTYQLGCNVACVDADIGSAVDLAASADAVVLVVGADQSIEREGHDRVDLYLPGKQQELVTRVAMAARGPVVLVIMSGGGFDITFAKNDKKITSIMWVGYPGEAGGLAIADVIFGRHNPSGNLPMTWYPQSYVEKVPMSNMNMRPDKSKGYPGRSYRFYTGETVYAFADALTYTKFDHQLIKAPRLVSLSLDENHPCRSSECQSLDAIGPHCENAVEGGSDFEVHLNVKNTGDRAGSHTVFLFTTSPQVHGSPIKQLLGFEKIRLGKSEEAVVRFNVNVCKDLSVVDETGKRKIALGHHLLHVGSLKHSLNISV

SEQ ID NO: 2005 - protein, 625 aa, Arabidopsis thaliana
MYNVGSAGLTFWSPNVNIFRDPRWGRGQETPGEDPTLSSKYAVAYVKGLQETDGGDPNRLKVAACCKHYTAYDIDNWRNVNRLTFNAVVNQQDLADTFQPPFKSCVVDGHVASVMCSYNQVNGKPTCADPDLLSGVIRGQWQLNGYIVSDCDSVDVLFRKQHYAKTPEEAVAKSLLAGLDLNCDHFNGQHAMGAVKAGLVNETAIDKAISNNFATLMRLGFFDGDPKKQLYGGLGPKDVCTADNQELARDGARQGIVLLKNSAGSLPLSPSAIKTLAVIGPNANATETMIGNYHGVPCKYTTPLQGLAETVSSTYQLGCNVACVDADIGSAVDLAASADAVVLVVGADQSIEREGHDRVDLYLPGKQQELVTRVAMAARGPVVLVIMSGGGFDITFAKNDKKITSIMWVGYPGEAGGLAIADVIFGRHNPSGNLPMTWYPQSYVEKVPMSNMNMRPDKSKGYPGRSYRFYTGETVYAFADALTYTKFDHQLIKAPRLVSLSLDENHPCRSSECQSLDAIGPHCENAVEGGSDFEVHLNVKNTGDRAGSHTVFLFTTSPQVHGSPIKQLLGFEKIRLGKSEEAVVRFNVNVCKDLSVVDETGKRKIALGHHLLHVGSLKHSLNISV

SEQ ID NO: 2006 - DNA, 1272 bp, Arabidopsis thaliana
acgaggaagatgaagactggtgggtagcagctgcagaagagtcactaaaacaaatcgcatctctaagtccttccccaaaatgcccttgatttagacatctacctaagtcaagaccaatctgggtttgtcttcttcccttttctctatttaaaaccaccatcgttccctaaatcaataatctctcaaaattcaatggctgcattaccagtattcataccagcagagtcatttccatcgatcctctcacatgaaaccttgatcaatcactttcggaccaatcttccgaaacattcatcaacaatcacaagccctgtccggcaaaactacaccgtttcatcaccttcctctctcctcctcatgccttcttggtcatcttcttcttctctcccttacatgggcgtcaagctcgtgacctatttccctcataactcttctcagaacttacctggcatccatggatcctacacactctttagctccactacaggccaaaccttagctacaatggatggtactgttttaaccctttaccgtacttcctctgtttcaggcttaggatccaaaatcctagctagagacgatagtcaagtgctgatcatggttggttccggtgctctcgcaccacacctgatcaaatcccatctagctgcgaaaccaagcttgagaagagtgatcatatggaacagaactccacaaagggctcaggagttagctgaaaccctctccaaggatcctcaacacaaggagatttcattcgatagccacgattcgctagatcaaatcattcctctaggagatattataagctgtgcaacaaactcaactgttccattggtcaaaggtgagttcttgaaacccggaactcatcttgaccttgttggatcgtttagccatgaaatgaaggaatgtgacgacaatgcgatacagagagggagtgtgtttgtcgataatgacactgcgatgatagaagcaggagagctcgcgggagcgtttgagagaggagtgattaagagagaaggcatttgtgggaatttggtggagttgatcaaaggtgacaaagaagggagaaagagttcaacagacataacagtgtttaagtccgtcggttcgggtaccgtagatctcttaaccgcacaacttgttcacgagacttacctcagccgttgttaagcagtgtgaatgaatcttgtttgatcattgcgtttgcgaatatttcacattgttatttaaacgaaataaattattgatatggacctatggttttgttgttgt

SEQ ID NO: 2007 - protein, 325 aa, Arabidopsis thaliana
MAALPVFIPAESFPSILSHETLINHFRTNLPKHSSTITSPVRQNYTVSSPSSLLLMPSWSSSSSLPYMGVKLVTYFPHNSSQNLPGIHGSYTLFSSTTGQTLATMDGTVLTLYRTSSVSGLGSKILARDDSQVLIMVGSGALAPHLIKSHLAAKPSLRRVIIWNRTPQRAQELAETLSKDPQHKEISFDSHDSLDQIIPLGDIISCATNSTVPLVKGEFLKPGTHLDLVGSFSHEMKECDDNAIQRGSVFVDNDTAMIEAGELAGAFERGVIKREGICGNLVELIKGDKEGRKSSTDITVFKSVGSGTVDLLTAQLVHETYLSRC

SEQ ID NO: 2008 - protein, 270 aa, Arabidopsis thaliana
MPSWSSSSSLPYMGVKLVTYFPHNSSQNLPGIHGSYTLFSSTTGQTLATMDGTVLTLYRTSSVSGLGSKILARDDSQVLIMVGSGALAPHLIKSHLAAKPSLRRVIIWNRTPQRAQELAETLSKDPQHKEISFDSHDSLDQIIPLGDIISCATNSTVPLVKGEFLKPGTHLDLVGSFSHEMKECDDNAIQRGSVFVDNDTAMIEAGELAGAFERGVIKREGICGNLVELIKGDKEGRKSSTDITVFKSVGSGTVDLLTAQLVHETYLSRC

SEQ ID NO: 2009 - protein, 258 aa, Arabidopsis thaliana
MGVKLVTYFPHNSSQNLPGIHGSYTLFSSTTGQTLATMDGTVLTLYRTSSVSGLGSKILARDDSQVLIMVGSGALAPHLIKSHLAAKPSLRRVIIWNRTPQRAQELAETLSKDPQHKEISFDSHDSLDQIIPLGDIISCATNSTVPLVKGEFLKPGTHLDLVGSFSHEMKECDDNAIQRGSVFVDNDTAMIEAGELAGAFERGVIKREGICGNLVELIKGDKEGRKSSTDITVFKSVGSGTVDLLTAQLVHETYLSRC

SEQ ID NO: 2010 - DNA, 2073 bp, Arabidopsis thaliana
actatctcacggcttttagttttcaccattctgattaaagagaaaccaaacgtttcatttttcaatatctagagagaaagatgcagacttcggtgaccccagatgccatctccaccgttttgtcaaacccatcctttgattcgtcttccgatcgatctgagatcgttgttcaagttgtggatcttaaacctatcggcaatcgctatacatttagtgcaaatgacggaaagacgaaagtcaaagcaatgtttactgcttcactcacacctgaaatcatttctgggaagatccagaacttgggtctaattcgtctcattgatttcactgttaacgacatttcaagcaaatctacaaaatatttccttgtgactaaatgtgaggctgttggttctgtgcttgattctgagattaacttggacagtaagagcggagaggaggaggctcgtgagcccaagaagcagaaactagagcattctcctgtcagtcctctgaatgatgttgtttctactggtatcacattgaaaccgaagcaggaatttgtagccaaatcagcttctcagataatgagtgaacaaaggggaaatgctgcaccagctgcaagaatggccatgactagaagggttcatccacttgtgtcattaaatccatatcaaggaaactggaccatcaaagtccgagttacaaacaagggagtgatgagaaattacaaaaacgctaggggtgaaggatgtgtcttcaatgttgaactaacagatgaagaaggaacacaaattcaagcaacgatgtttaatgatgctgcaaggaagttttttgacagattccagttgggaaaggtttattatatatcaagggggtcactaaaactcgctaacaagcagttcaaaacagttcagaatgattatgagatgacactgaatgaaaattcagaggttgaggaagctagtagcgaagaaatgttcatccctgagacaaaattcaacttcgtacccattgaagagttgggtctgtatgttaatcagaaggaacttattgatcttattggagttgttcaaagtgtatctcctaccatgagtattagaaggagaactgacaatgagatgattcctaagagggatataactttggctgatgagtcaaggaaaactgttgtggtgtccctgtggaatgatcttgcaactggcataggtcaggagctactagacatggctgatcagtcacctgtgattgcaatcaagtctctcaaagttggagattttcaaggtgtttcgttgtctaccatcagcagaagcaatgtggttattaacccggaatcaccagaagctaaaaagttgaaatcttggtttgattctgaaggcaaggaaatatccatgtcttctattggctcagggatgagcccttctgccaaaaatggatctcggtctttgtatactgaccgagtgcttctctctcacatcacaagcaatccatctttattcgaagaaaagcctgtatttttcagcactagggcttacataagcttcatcaaaccagaccaaacaatgtggtaccaagcttgtaagacttgtaacaagaaagtgacagaagcacttgactctggttactggtgtgaaggatgccagagaaagtatgaagaatgcagcttaaggtacataatggcggtgaaagtcaccgactcatctggagaaacttggatttcgtcattcaacgatgaagcagagaagattcttggatgttcagctgatgagctcaacaaactaaaatcagaggaaggtgaagtaaatgaatatcagacaaaactgaaagaggcaacatggtcatctcatgtcttccgggttagtgtcacacagaatgagtataacggtgagaagagacagagggtaactgtaaaaggagtagctcctcttgattttgctgctgaaacaagattgttgcttcaagacatctccaacaagaacaaaacatctcagtagtagcttttacttcttttttttctctattggcctaaaaaagtctcaaaacttttccttgtataatataagcctttctgcaatttataaaattagggttttgctt

SEQ ID NO: 2011 - protein, 629 aa, Arabidopsis thaliana
MQTSVTPDAISTVLSNPSFDSSSDRSEIVVQVVDLKPIGNRYTFSANDGKTKVKAMFTASLTPEIISGKIQNLGLIRLIDFTVNDISSKSTKYFLVTKCEAVGSVLDSEINLDSKSGEEEAREPKKQKLEHSPVSPLNDVVSTGITLKPKQEFVAKSASQIMSEQRGNAAPAARMAMTRRVHPLVSLNPYQGNWTIKVRVTNKGVMRNYKNARGEGCVFNVELTDEEGTQIQATMFNDAARKFFDRFQLGKVYYISRGSLKLANKQFKTVQNDYEMTLNENSEVEEASSEEMFIPETKFNFVPIEELGLYVNQKELIDLIGVVQSVSPTMSIRRRTDNEMIPKRDITLADESRKTVVVSLWNDLATGIGQELLDMADQSPVIAIKSLKVGDFQGVSLSTISRSNVVINPESPEAKKLKSWFDSEGKEISMSSIGSGMSPSAKNGSRSLYTDRVLLSHITSNPSLFEEKPVFFSTRAYISFIKPDQTMWYQACKTCNKKVTEALDSGYWCEGCQRKYEECSLRYIMAVKVTDSSGETWISSFNDEAEKILGCSADELNKLKSEEGEVNEYQTKLKEATWSSHVFRVSVTQNEYNGEKRQRVTVKGVAPLDFAAETRLLLQDISNKNKTSQ

SEQ ID NO: 2012 - protein, 574 aa, Arabidopsis thaliana
MFTASLTPEIISGKIQNLGLIRLIDFTVNDISSKSTKYFLVTKCEAVGSVLDSEINLDSKSGEEEAREPKKQKLEHSPVSPLNDVVSTGITLKPKQEFVAKSASQIMSEQRGNAAPAARMAMTRRVHPLVSLNPYQGNWTIKVRVTNKGVMRNYKNARGEGCVFNVELTDEEGTQIQATMFNDAARKFFDRFQLGKVYYISRGSLKLANKQFKTVQNDYEMTLNENSEVEEASSEEMFIPETKFNFVPIEELGLYVNQKELIDLIGVVQSVSPTMSIRRRTDNEMIPKRDITLADESRKTVVVSLWNDLATGIGQELLDMADQSPVIAIKSLKVGDFQGVSLSTISRSNVVINPESPEAKKLKSWFDSEGKEISMSSIGSGMSPSAKNGSRSLYTDRVLLSHITSNPSLFEEKPVFFSTRAYISFIKPDQTMWYQACKTCNKKVTEALDSGYWCEGCQRKYEECSLRYIMAVKVTDSSGETWISSFNDEAEKILGCSADELNKLKSEEGEVNEYQTKLKEATWSSHVFRVSVTQNEYNGEKRQRVTVKGVAPLDFAAETRLLLQDISNKNKTSQ

SEQ ID NO: 2013 - protein, 468 aa, Arabidopsis thaliana
MSEQRGNAAPAARMAMTRRVHPLVSLNPYQGNWTIKVRVTNKGVMRNYKNARGEGCVFNVELTDEEGTQIQATMFNDAARKFFDRFQLGKVYYISRGSLKLANKQFKTVQNDYEMTLNENSEVEEASSEEMFIPETKFNFVPIEELGLYVNQKELIDLIGVVQSVSPTMSIRRRTDNEMIPKRDITLADESRKTVVVSLWNDLATGIGQELLDMADQSPVIAIKSLKVGDFQGVSLSTISRSNVVINPESPEAKKLKSWFDSEGKEISMSSIGSGMSPSAKNGSRSLYTDRVLLSHITSNPSLFEEKPVFFSTRAYISFIKPDQTMWYQACKTCNKKVTEALDSGYWCEGCQRKYEECSLRYIMAVKVTDSSGETWISSFNDEAEKILGCSADELNKLKSEEGEVNEYQTKLKEATWSSHVFRVSVTQNEYNGEKRQRVTVKGVAPLDFAAETRLLLQDISNKNKTSQ

SEQ ID NO: 2014 - DNA, 1678 bp, Arabidopsis thaliana
aagaataaaaacgatgttggcgactcacgcgctggtgactccgattccaaagttgactgctttcgtactctctctatctactactccatcaagattgtctggttctgttccgggtttgattgatttctaccgtcgccggagattttgtcgtgtaatcacctccatggctgaagcgggatcggtttacgtcgatgtagctggggaatcgaagtcggagcatgttactgggaagtggttttcggtgccggagctccgactgcgtgaccaccggttcatagttcctcttgattattccaaaagttctcccaaaattaccgtctttgctcgagagatcgttgcggttgggaaagaggagcaagcaatgccgtatttattgtatttgcaaggtggtccaggatttgaaggtccaaggcctagtgaagctagtggatggattcaaagagcttgtgaagagtttcgagtggtcttactcgatcaacgaggaacaggcttgtccactcctttaacatgttcctctatgcttcaattcaaatcagcaaaggaattagctgattatttggttcactttcgagctgataatatagttaaagatgctgagtttattagagttcgtcttgttcctaaggctgatccttggacaattttgggtcagagtttcggtggcttttgtgcacttacatatctgagttttgcacccgaaggactcaaacaagtgctaataactggaggaattccaccaattggtaaagcatgtacagcagatgatgtatatgaagccggttttgaacaagttgctcgccaaaatgaaaaatactacaagagattccctcaagacattgagattgttcgtgaactcgtaaattacttggctgaatctgaaggtggcggggtacctctcccatcaggaggcattcttactcctaagggtcttcaaactcttggtctttctggtttaggatcaagtactggttttgagcgcctgcattatatgttggagagagtatgggatcctattttagttactggagctccaaagtgtattagtcagttcttcttaaacgcttttgagagttggcattcttttgatacaaatccactatatgctcttctccacgaggccatatactgtgagggtgcttcatcaggatggtctgctcatagattacgggataaatatgagtacaaattcgacgcaatgaaggcagtcaaagaaagtcagcctgtactcttcacaggagagatgatatttccatggatgtttgatgaaattcatgccttgaagccatttaaagctgccgccgatcttttggccaagaaagaggattggcctccattatatgatgttcctagattgcagaataacaaggtgcctgttgctgcagcggtttactacgaagatatgtatgtaaacttcaagctggtgacggaaacagcttctcatatatcgggtatcagactttgggtaacgaatgagtttatgcattcgggtcttcgtgatgctggaagacaaattattgatcatttgttgggaatgatcaatgggaaaaagcctctcttttgattccttgtactagtcagtactttgtgacttgtggttttcttcgttatacactttctttgagaattaaatgagtaaaaaagaaagagaatgaataaaagaaagtctttcaagttttgg

SEQ ID NO: 2015 - protein, 519 aa, Arabidopsis thaliana
RIKTMLATHALVTPIPKLTAFVLSLSTTPSRLSGSVPGLIDFYRRRRFCRVITSMAEAGSVYVDVAGESKSEHVTGKWFSVPELRLRDHRFIVPLDYSKSSPKITVFAREIVAVGKEEQAMPYLLYLQGGPGFEGPRPSEASGWIQRACEEFRVVLLDQRGTGLSTPLTCSSMLQFKSAKELADYLVHFRADNIVKDAEFIRVRLVPKADPWTILGQSFGGFCALTYLSFAPEGLKQVLITGGIPPIGKACTADDVYEAGFEQVARQNEKYYKRFPQDIEIVRELVNYLAESEGGGVPLPSGGILTPKGLQTLGLSGLGSSTGFERLHYMLERVWDPILVTGAPKCISQFFLNAFESWHSFDTNPLYALLHEAIYCEGASSGWSAHRLRDKYEYKFDAMKAVKESQPVLFTGEMIFPWMFDEIHALKPFKAAADLLAKKEDWPPLYDVPRLQNNKVPVAAAVYYEDMYVNFKLVTETASHISGIRLWVTNEFMHSGLRDAGRQIIDHLLGMINGKKPLF

SEQ ID NO: 2016 - protein, 515 aa, Arabidopsis thaliana
MLATHALVTPIPKLTAFVLSLSTTPSRLSGSVPGLIDFYRRRRFCRVITSMAEAGSVYVDVAGESKSEHVTGKWFSVPELRLRDHRFIVPLDYSKSSPKITVFAREIVAVGKEEQAMPYLLYLQGGPGFEGPRPSEASGWIQRACEEFRVVLLDQRGTGLSTPLTCSSMLQFKSAKELADYLVHFRADNIVKDAEFIRVRLVPKADPWTILGQSFGGFCALTYLSFAPEGLKQVLITGGIPPIGKACTADDVYEAGFEQVARQNEKYYKRFPQDIEIVRELVNYLAESEGGGVPLPSGGILTPKGLQTLGLSGLGSSTGFERLHYMLERVWDPILVTGAPKCISQFFLNAFESWHSFDTNPLYALLHEAIYCEGASSGWSAHRLRDKYEYKFDAMKAVKESQPVLFTGEMIFPWMFDEIHALKPFKAAADLLAKKEDWPPLYDVPRLQNNKVPVAAAVYYEDMYVNFKLVTETASHISGIRLWVTNEFMHSGLRDAGRQIIDHLLGMINGKKPLF

SEQ ID NO: 2017 - protein, 465 aa, Arabidopsis thaliana
MAEAGSVYVDVAGESKSEHVTGKWFSVPELRLRDHRFIVPLDYSKSSPKITVFAREIVAVGKEEQAMPYLLYLQGGPGFEGPRPSEASGWIQRACEEFRVVLLDQRGTGLSTPLTCSSMLQFKSAKELADYLVHFRADNIVKDAEFIRVRLVPKADPWTILGQSFGGFCALTYLSFAPEGLKQVLITGGIPPIGKACTADDVYEAGFEQVARQNEKYYKRFPQDIEIVRELVNYLAESEGGGVPLPSGGILTPKGLQTLGLSGLGSSTGFERLHYMLERVWDPILVTGAPKCISQFFLNAFESWHSFDTNPLYALLHEAIYCEGASSGWSAHRLRDKYEYKFDAMKAVKESQPVLFTGEMIFPWMFDEIHALKPFKAAADLLAKKEDWPPLYDVPRLQNNKVPVAAAVYYEDMYVNFKLVTETASHISGIRLWVTNEFMHSGLRDAGRQIIDHLLGMINGKKPLF

SEQ ID NO: 2018 - DNA, 1589 bp, Arabidopsis thaliana
agtttgggcttcaaaataatcaaacgaaaacaatggaaaaagcaacggagagacaaaggatactgcttcgtcatcttcaaccttcgtcatcttccgacgcctctctctctgcctcagcttgcttgtccaaagacagtgctgcatatcaatatggagatgatgttgtcattgtcgcggcacaaaggactgcactttgcaaggcaaaacgtggcagcttcaaggatacatttccagacgagttgcttgcctctgtattgagagcattgatagagaaaactaatgtaaacccaagtgaagttggtgacattgtagtgggtactgttttgggaccaggatctcagagagccagtgaatgcaggatggctgcgttctatgctggtttccccgaaactgttcccatcagaaccgtgaacagacagtgttcatctgggcttcaggctgttgctgatgttgccgctgccataaaagctggtttttatgacattggtattggagctgggctggagtccatgacaactaatccaaggggatggaaaggatcagtcaacccaaatgtgaagaagtttgaacaagctcacaattgccttcttccaatgggtattacttcagaaaatgtagcacaccggtttaatgtttcaagggaggagcaggatcaagctgctgttgattctcacagaaaggctgcttctgctactgcttccggaaagtttaaggatgagataacccctgtaaaaaccaagattgttgacccaaagacaggtgatgagaaacccataacagtttctgtggatgatgggattcgacctaacacaaccctttccggacttgcaaagctgaagccagtgtttaaggaagacggaaccacaactgctgggaattctagccaattaagtgacggtgctggagctgttctccttatgaggagaaatgtcgcaatgcagaaaggccttcccattcttggtgtattcaggacattttctgcagttggtgtggacccagccatcatgggggttgggccagccgttgccattcctgctgcagtcaaggcagctggtttagaactcaatgacgtcgacttgtttgagattaacgaggcatttgcatctcagtttgtttattgtcggaacaagctcgggctagacgcggaaaagatcaatgtcaatggaggagccatagccattggacatcccttgggcgctacaggagccagatgcgttgcgacgctgctgcatgagatgaaacgacgtggtaaagactgtcgttttggcgtagtgtcaatgtgtataggttcgggaatgggagcagccgctgtgtttgagagaggaggcggtgtggatgagctctgtgatgtccggaaagtctaatgacaataaggccttttgaccaaggaccctagctaaggaccaaattagaacacagtactacaaataaacattatcacaaataaatgcgttctagatgaataaatcataacgatagtacaatacatgagggaaaacttcttgttattttttaactctcttttgttatatggttggaatatatacagatactctttgagaacatatcataatctatttggtttgtct

SEQ ID NO: 2019 - protein, 453 aa, Arabidopsis thaliana
FGLQNNQTKTMEKATERQRILLRHLQPSSSSDASLSASACLSKDSAAYQYGDDVVIVAAQRTALCKAKRGSFKDTFPDELLASVLRALIEKTNVNPSEVGDIVVGTVLGPGSQRASECRMAAFYAGFPETVPIRTVNRQCSSGLQAVADVAAAIKAGFYDIGIGAGLESMTTNPRGWKGSVNPNVKKFEQAHNCLLPMGITSENVAHRFNVSREEQDQAAVDSHRKAASATASGKFKDEITPVKTKIVDPKTGDEKPITVSVDDGIRPNTTLSGLAKLKPVFKEDGTTTAGNSSQLSDGAGAVLLMRRNVAMQKGLPILGVFRTFSAVGVDPAIMGVGPAVAIPAAVKAAGLELNDVDLFEINEAFASQFVYCRNKLGLDAEKINVNGGAIAIGHPLGATGARCVATLLHEMKRRGKDCRFGVVSMCIGSGMGAAAVFERGGGVDELCDVRKV

SEQ ID NO: 2020 - protein, 443 aa, Arabidopsis thaliana
MEKATERQRILLRHLQPSSSSDASLSASACLSKDSAAYQYGDDVVIVAAQRTALCKAKRGSFKDTFPDELLASVLRALIEKTNVNPSEVGDIVVGTVLGPGSQRASECRMAAFYAGFPETVPIRTVNRQCSSGLQAVADVAAAIKAGFYDIGIGAGLESMTTNPRGWKGSVNPNVKKFEQAHNCLLPMGITSENVAHRFNVSREEQDQAAVDSHRKAASATASGKFKDEITPVKTKIVDPKTGDEKPITVSVDDGIRPNTTLSGLAKLKPVFKEDGTTTAGNSSQLSDGAGAVLLMRRNVAMQKGLPILGVFRTFSAVGVDPAIMGVGPAVAIPAAVKAAGLELNDVDLFEINEAFASQFVYCRNKLGLDAEKINVNGGAIAIGHPLGATGARCVATLLHEMKRRGKDCRFGVVSMCIGSGMGAAAVFERGGGVDELCDVRKV

SEQ ID NO: 2021 - protein, 334 aa, Arabidopsis thaliana
MAAFYAGFPETVPIRTVNRQCSSGLQAVADVAAAIKAGFYDIGIGAGLESMTTNPRGWKGSVNPNVKKFEQAHNCLLPMGITSENVAHRFNVSREEQDQAAVDSHRKAASATASGKFKDEITPVKTKIVDPKTGDEKPITVSVDDGIRPNTTLSGLAKLKPVFKEDGTTTAGNSSQLSDGAGAVLLMRRNVAMQKGLPILGVFRTFSAVGVDPAIMGVGPAVAIPAAVKAAGLELNDVDLFEINEAFASQFVYCRNKLGLDAEKINVNGGAIAIGHPLGATGARCVATLLHEMKRRGKDCRFGVVSMCIGSGMGAAAVFERGGGVDELCDVRKV

SEQ ID NO: 2022 - DNA, 1091 bp, Arabidopsis thaliana
aaaaaaagataaattacaaaatatcattttccttatcttattgacttgtcaagattctcttcttcttcttcttcttcctcctcctccaaactcagttccctccgtccatggcagcaaccttacctctatctccgatcaatcatcagttgtgtcggttcgggaacaactctttgacgactcaccggttctgttctcctggcttcttgatttcttctccttgtttcattggtttgaccggaatgggctctgctactcagttacgtgctcgtcgttctctgatctcttcagcagttgcgacgaattcgctgttgcatgacgtcggagccgccgtggcagtgcttggtggagcatacgcgcttgtcttaagcttcgagagtctcaccaagcgaaacgtcattcaacagagtttgagcagaaagcttgtgcatatactctcaggtctgcttttcgtacttgcgtggccaatcttcagcggatcgaccgaggctcgatactttgctgcttttgttccgttagtgaatggcttaaggcttgttattaacggactatccatttccccaaattcgatgctaatcaaatccgtcacaagagaagggagagcagaagagttgcttaaaggtcctttgttctacgttctagctcttcttttctctgcggttttcttctggagagagtctcctatcggtatgatctcgttagcaatgatgtgtggtggcgatggaatagctgatataatgggacgtaagtttgggtcaactaagataccttacaacccaagaaagagttgggcaggaagcatctccatgttcatcttcggcttcttcatctccatcgcattactttactattactcaagccttgggtaccttcacatgaactgggaaacgaccttgcagagagtagcaatggtctcaatggtcgccacggtagtcgagtcgctacccatcaccgatcaattagacgacaatatttcggttcctctggctactattttagctgcttatttaagtttcggatattagattaatccctcataaaccgaatgtgtatatacgtatttttttaatgaatccgaccttacaaatgtttcc

SEQ ID NO: 2023 - protein, 304 aa, Arabidopsis thaliana
MAATLPLSPINHQLCRFGNNSLTTHRFCSPGFLISSPCFIGLTGMGSATQLRARRSLISSAVATNSLLHDVGAAVAVLGGAYALVLSFESLTKRNVIQQSLSRKLVHILSGLLFVLAWPIFSGSTEARYFAAFVPLVNGLRLVINGLSISPNSMLIKSVTREGRAEELLKGPLFYVLALLFSAVFFWRESPIGMISLAMMCGGDGIADIMGRKFGSTKIPYNPRKSWAGSISMFIFGFFISIALLYYYSSLGYLHMNWETTLQRVAMVSMVATVVESLPITDQLDDNISVPLATILAAYLSFGY

SEQ ID NO: 2024 - protein, 260 aa, Arabidopsis thaliana
MGSATQLRARRSLISSAVATNSLLHDVGAAVAVLGGAYALVLSFESLTKRNVIQQSLSRKLVHILSGLLFVLAWPIFSGSTEARYFAAFVPLVNGLRLVINGLSISPNSMLIKSVTREGRAEELLKGPLFYVLALLFSAVFFWRESPIGMISLAMMCGGDGIADIMGRKFGSTKIPYNPRKSWAGSISMFIFGFFISIALLYYYSSLGYLHMNWETTLQRVAMVSMVATVVESLPITDQLDDNISVPLATILAAYLSFGY

SEQ ID NO: 2025 - DNA, 1905 bp, Arabidopsis thaliana
gagctccgacgagtggcaagtgaagaaggtgtgggagaaagaaagctaatgagagaaatacataaatcgacaaaaacaaaccgtcttctcatctctgcctctggatttaactctcccttcacagttgcatagaatcttcttctctgctcatattttgaagaaatctccagtcgaagaaactgctccctcttttagtcaattctcgcttcactccctcaatataatgcgatttctcaaccggaatatctgaatctctcggtggttacctctgatatatcgccaggaactgaactcctactcgatctctatcaacaatgccgtccttgtagaactttggatccaactctctgattccgtcaatttccattaatatcagctcagcgaaggaactttgagtagaagaagataatgtcacattcatgggatggtcttggggagattgcgtcagtggctcagctgactggtttagatgcggtcaagttgattggtctcatagtcaaagctgcgaatactgcttggatgcataagaagaattgtcgtcaattcgctcaacatctcaaactcattgggaatttgcttgaacagctgaagatctctgagatgaagaagtatcctgagactcgagagcctctcgaagggcttgaggatgctttgagaaggtcttaccttctggtcaatagctgtagagaccggagctatctttacttgttggctatgggttggaacattgtttaccagttcaggaaacatcaggatgagattgatcgttttcttaagatcatacctctcatcactttggtcgataacgctcgcattcgggagaggtttgagtatattgaccgtgatcagcgtgagtacactctggatgaagaggatagacatgtgcaagatgttattttgaaacaagaatccaccagagaagcagcatcagtactgaagaagactctctcttgctcataccctaacttgcgtttctgtgaagctctcaaaacagaaaacgagaaactgcagatcgaacttcagcggtcgcaggagcattatgatgtggctcagtgtgaagtcattcagcgtttaattggtgttacacaagctgctgctgctgttgaacctgactctgagaaggagctgacaaagaaagcttccaaaaaatctgaacgtagctcaagcatgaagacggaatattcgtatgacgaagattctcccaagaaaagcagtactcgtgcagcttcgagatccacttctaatgtttcatctgggcatgatctgctttcacgaagagcatcacaggcacaacaccatgaagaatggcataccgacttactagcttgttgctcggaaccttctctttgcttcaagacattctttttcccgtgtggtactttggcaaagattgccactgcagcatccaacaggcacatctcttcagctgaagcatgtaatgagctaatggcgtattctttgatactttcttgttgctgctatacttgttgcgtgaggaggaaactccggaagacactgaacatcacgggaggattcattgacgattttctatctcatgtaatgtgttgttgctgtgcccttgtacaagaactgagagaagttgagattcgtggggcatatggtacggagaagacgaaaataagcccgccttcgtcgcagttcatggaacattgaaatcttctattatacaaaaggtgaacagaaacaacgatttgttgtaactctggatacgagacgagattcttcttcgtactactcacttaatattattgtgttaaatcgtggagtcgtatgtaaattagtttgggattctcatcttaatttcagcaatttgtgttgtgtgtatcacatatagactaactaattcttatttcaacttttatcacaagatagggtattaggttt

SEQ ID NO: 2026 - protein, 421 aa, Arabidopsis thaliana
MSHSWDGLGEIASVAQLTGLDAVKLIGLIVKAANTAWMHKKNCRQFAQHLKLIGNLLEQLKISEMKKYPETREPLEGLEDALRRSYLLVNSCRDRSYLYLLAMGWNIVYQFRKHQDEIDRFLKIIPLITLVDNARIRERFEYIDRDQREYTLDEEDRHVQDVILKQESTREAASVLKKTLSCSYPNLRFCEALKTENEKLQIELQRSQEHYDVAQCEVIQRLIGVTQAAAAVEPDSEKELTKKASKKSERSSSMKTEYSYDEDSPKKSSTRAASRSTSNVSSGHDLLSRRASQAQHHEEWHTDLLACCSEPSLCFKTFFFPCGTLAKIATAASNRHISSAEACNELMAYSLILSCCCYTCCVRRKLRKTLNITGGFIDDFLSHVMCCCCALVQELREVEIRGAYGTEKTKISPPSSQFMEH

SEQ ID NO: 2027 - protein, 384 aa, Arabidopsis thaliana
MHKKNCRQFAQHLKLIGNLLEQLKISEMKKYPETREPLEGLEDALRRSYLLVNSCRDRSYLYLLAMGWNIVYQFRKHQDEIDRFLKIIPLITLVDNARIRERFEYIDRDQREYTLDEEDRHVQDVILKQESTREAASVLKKTLSCSYPNLRFCEALKTENEKLQIELQRSQEHYDVAQCEVIQRLIGVTQAAAAVEPDSEKELTKKASKKSERSSSMKTEYSYDEDSPKKSSTRAASRSTSNVSSGHDLLSRRASQAQHHEEWHTDLLACCSEPSLCFKTFFFPCGTLAKIATAASNRHISSAEACNELMAYSLILSCCCYTCCVRRKLRKTLNITGGFIDDFLSHVMCCCCALVQELREVEIRGAYGTEKTKISPPSSQFMEH

SEQ ID NO: 2028 - protein, 357 aa, Arabidopsis thaliana
MKKYPETREPLEGLEDALRRSYLLVNSCRDRSYLYLLAMGWNIVYQFRKHQDEIDRFLKIIPLITLVDNARIRERFEYIDRDQREYTLDEEDRHVQDVILKQESTREAASVLKKTLSCSYPNLRFCEALKTENEKLQIELQRSQEHYDVAQCEVIQRLIGVTQAAAAVEPDSEKELTKKASKKSERSSSMKTEYSYDEDSPKKSSTRAASRSTSNVSSGHDLLSRRASQAQHHEEWHTDLLACCSEPSLCFKTFFFPCGTLAKIATAASNRHISSAEACNELMAYSLILSCCCYTCCVRRKLRKTLNITGGFIDDFLSHVMCCCCALVQELREVEIRGAYGTEKTKISPPSSQFMEH

SEQ ID NO: 2029 - DNA, 1454 bp, Arabidopsis thaliana
atggggaaacgtgaaattcattttactccggtgggtcgtcaggtgcagagagttctggaatatccattgcgcttggagaatcgttcgccgatgtcttactcaagaaggtcaagatactctccttcactatctccttatgacaagcgtcgtggaaggtctgtgtcaaggtcattgtctagaagcccgacgaggagtgtctcaagcgatgctgagaatcctggtaacagtttatatgtaactggattgtctcaccgggttactgaaagagatctggaggatcatttcgctaaagaaggaaaggtaactgatgttcaccttgtcctggacccatggactagagaatctcgcggatttggttttatctctatgaaaagtgttggtgatgctaaccgttgcatcagatctctagatcactctgttctgcagggccgcgtcatcactgttgagaaggcaagacgtcgtagaggacgtactccaactccaggaaagtacttggggctgagaactgctcgaggacgacataagtctcctagctactctccccgcaggtctgttagctgctctcgtagtcgtagtcgaagctactcatctgatcggggcagatcttattctccaagctatgggagaagaggaaggtcatcctcgtactcacccttctatcgacgacgcagattctactctccttcgagatctccttcacctgatgatcgttacaacaggagacgcgacagatcatactcaccttactacaggcggagggaccggtccagatcctactcacgtaactgtagagcacgggacagatcaccttactacatgcggaggtacaggtccagatccaggtcatactcgcctcgctacagagcacgtgaccgatcatgctcaccctactacaggggaagagaccggtcttattcaccccactaccaagggagagacagatcctactcacctgaaagtcgttactacagaaggcacaggtcggtatcgggaagcgtaagccctggagggagaagcatgtcacgtagcatatccccaaggaagggaaggaaagagagcagaagcaagtctcggaggcacgacaggcaatcttcaatgtgtcattcgaggagcgcaagatcaagcacctccagatccgtcagcccataacagtctctacttacttgaagttgacatcaatcactcacgtctgttgttgtattaagcattttgggacttgtctattccttgtatttggaattgatgacagtacgtatgttatgttggtttggtgttaggatactttattacttctgtggaaatgttgctttggcgacgagtcgtgagagaaatggaatctcttctttgttacaaaaaatctattttcatgtctttctactccaacaaatttctgttgttgtataattgttccacttacttttccaactttttttcataatcaatagacgattttc

SEQ ID NO: 2030 - protein, 382 aa, Arabidopsis thaliana
MGKREIHFTPVGRQVQRVLEYPLRLENRSPMSYSRRSRYSPSLSPYDKRRGRSVSRSLSRSPTRSVSSDAENPGNSLYVTGLSHRVTERDLEDHFAKEGKVTDVHLVLDPWTRESRGFGFISMKSVGDANRCIRSLDHSVLQGRVITVEKARRRRGRTPTPGKYLGLRTARGRHKSPSYSPRRSVSCSRSRSRSYSSDRGRSYSPSYGRRGRSSSYSPFYRRRRFYSPSRSPSPDDRYNRRRDRSYSPYYRRRDRSRSYSRNCRARDRSPYYMRRYRSRSRSYSPRYRARDRSCSPYYRGRDRSYSPHYQGRDRSYSPESRYYRRHRSVSGSVSPGGRSMSRSISPRKGRKESRSKSRRHDRQSSMCHSRSARSSTSRSVSP

SEQ ID NO: 2031 - protein, 352 aa, Arabidopsis thaliana
MSYSRRSRYSPSLSPYDKRRGRSVSRSLSRSPTRSVSSDAENPGNSLYVTGLSHRVTERDLEDHFAKEGKVTDVHLVLDPWTRESRGFGFISMKSVGDANRCIRSLDHSVLQGRVITVEKARRRRGRTPTPGKYLGLRTARGRHKSPSYSPRRSVSCSRSRSRSYSSDRGRSYSPSYGRRGRSSSYSPFYRRRRFYSPSRSPSPDDRYNRRRDRSYSPYYRRRDRSRSYSRNCRARDRSPYYMRRYRSRSRSYSPRYRARDRSCSPYYRGRDRSYSPHYQGRDRSYSPESRYYRRHRSVSGSVSPGGRSMSRSISPRKGRKESRSKSRRHDRQSSMCHSRSARSSTSRSVSP

SEQ ID NO: 2032 - protein, 260 aa, Arabidopsis thaliana
MKSVGDANRCIRSLDHSVLQGRVITVEKARRRRGRTPTPGKYLGLRTARGRHKSPSYSPRRSVSCSRSRSRSYSSDRGRSYSPSYGRRGRSSSYSPFYRRRRFYSPSRSPSPDDRYNRRRDRSYSPYYRRRDRSRSYSRNCRARDRSPYYMRRYRSRSRSYSPRYRARDRSCSPYYRGRDRSYSPHYQGRDRSYSPESRYYRRHRSVSGSVSPGGRSMSRSISPRKGRKESRSKSRRHDRQSSMCHSRSARSSTSRSVSP

SEQ ID NO: 2033 - DNA, 1169 bp, Arabidopsis thaliana
atgtcaagagaatatatacagttctatgaacaagagacacatcacgacgagaccttgctaaaatttgccaagatcaatttcaagttcatgcagttgcattatgttcaagagcttcaaactatcgtgaaatggtggaaagagcttgacttggaatcaaagatccctaattactacagagttagagccgtggagtgcctctactgggcaatggcagtgtatatggagccacaatattcagttgctagaataatactgagcaagtccttggtgttgtggaccattatagatgacctatatgatgcctattgtactcttccagaagctattgctttcactgaaaatatggaaaggtgggaaactgatgccatagacatgccagatcatatgaaggtcctcttgaggtcattgatagaccttatggaagatttcaaaggagaagtgagatcagaaggaagattgtacagtgtggaatatggaatagacgagtggaaaagactattcagagcggaccttacaatatcaaagtgggcacgcacgggatacataccaaactatgacgaatacatggaggttggaatagtgactgggggagtagatgtcacggttgcgttcgccttcattggtatgggggaagcaggaaaagaagcttttgactggataagatcaagaccgaaattcattcaaactatagatctaaaatcacgtctcagagatgatgttgccacctacaaggatgaaatggctagaggagagattgcgacaggaatcaactgctatatgaaacaatataaagttaccgaagaagaagcgtttctagagtttcatagaaggattaaacatacttccaagctagtgaatgaagagtattttaagacgacagtacctttgaaacttgtgcgtatagcttttaacgttggacgggttatcgataccaactacaagcatggcgatggattaacctatacagggatagtaggaggccaaatcacctctttgttccttgatctaatcaccatttagggtctatgattccaagtctttacgaacctcttcaatttcccgaataagtgaaaacgtttgcgttttaccatccatatttaccttataatttgagtaagtgttttgaatacatctatatttttgtctatatttataatctctgttgtgtt

SEQ ID NO: 2034 - protein, 339 aa, Arabidopsis thaliana
MSREYIQFYEQETHHDETLLKFAKINFKFMQLHYVQELQTIVKWWKELDLESKIPNYYRVRAVECLYWAMAVYMEPQYSVARIILSKSLVLWTIIDDLYDAYCTLPEAIAFTENMERWETDAIDMPDHMKVLLRSLIDLMEDFKGEVRSEGRLYSVEYGIDEWKRLFRADLTISKWARTGYIPNYDEYMEVGIVTGGVDVTVAFAFIGMGEAGKEAFDWIRSRPKFIQTIDLKSRLRDDVATYKDEMARGEIATGINCYMKQYKVTEEEAFLEFHRRIKHTSKLVNEEYFKTTVPLKLVRIAFNVGRVIDTNYKHGDGLTYTGIVGGQITSLFLDLITI

SEQ ID NO: 2035 - protein, 310 aa, Arabidopsis thaliana
MQLHYVQELQTIVKWWKELDLESKIPNYYRVRAVECLYWAMAVYMEPQYSVARIILSKSLVLWTIIDDLYDAYCTLPEAIAFTENMERWETDAIDMPDHMKVLLRSLIDLMEDFKGEVRSEGRLYSVEYGIDEWKRLFRADLTISKWARTGYIPNYDEYMEVGIVTGGVDVTVAFAFIGMGEAGKEAFDWIRSRPKFIQTIDLKSRLRDDVATYKDEMARGEIATGINCYMKQYKVTEEEAFLEFHRRIKHTSKLVNEEYFKTTVPLKLVRIAFNVGRVIDTNYKHGDGLTYTGIVGGQITSLFLDLITI

SEQ ID NO: 2036 - protein, 270 aa, Arabidopsis thaliana
MAVYMEPQYSVARIILSKSLVLWTIIDDLYDAYCTLPEAIAFTENMERWETDAIDMPDHMKVLLRSLIDLMEDFKGEVRSEGRLYSVEYGIDEWKRLFRADLTISKWARTGYIPNYDEYMEVGIVTGGVDVTVAFAFIGMGEAGKEAFDWIRSRPKFIQTIDLKSRLRDDVATYKDEMARGEIATGINCYMKQYKVTEEEAFLEFHRRIKHTSKLVNEEYFKTTVPLKLVRIAFNVGRVIDTNYKHGDGLTYTGIVGGQITSLFLDLITI

SEQ ID NO: 2037 - DNA, 1336 bp, Arabidopsis thaliana
ctcagctaaagagagaaagagaagcaccatttttctttctcgtcgtgtcatcgttttctcagattcctgaataatcattcccttccgattccaaaatccccaaacctcatccactcctccatctcccggattcggattcccagaatcatgcccatggagaacgacaatggcccacacgttggcaacgtcgtcgtcaccgctgagcaagcgaccaagattaacgagactgatggacggttgccggagaatcggcagaccggtgttgtctctgacaccggaagtggtagcgagagaggagagcaaggggttggagagtcggcagttgctgtggcggtgccggtggaggagagcggatcgatttcggtgggagagctacctgctccccgatcttcctctgctagagttccgtttactaatctaagccaaattgatgcggatcttgctcttgctcgcacactccaagaacaggagcgggcgtatatgatgttgaccatgaatagtgaaatcagtgactatgggagctgggaaactggaagctatgtatacgatgaggatgagtttgatgaccccgagaatgaggatgaggatgatgatgaagatgaatatgaaacagatgatgatcctcaggaagatgggcttgatgtcaatgtgcacgccaatgaagatgatcaagaagatgacggtaactctgacattgaagaagttgcttatacagatgatgaggcctatgctagagctcttcaagaagctgaagaaagggatatggctgctagattgtctgccttatctgggttagcaaaccgggtggttgaagatctagaggatgagagtcatacttctcaggatgcctgggatgagatggatcctgatgagctttcatatgaggagttgcttgcacttggcgacattgtgggaaccgaaagtagaggattgtctgctgatacaattgcatctttgccttcaaaaagatataaagaaggagacaatcagaacggaaccaatgagtcatgtgttatatgtcgtttagactatgaggatgacgaagacctgatactgctcccatgcaaacattcttaccactcggagtgcataaacaactggttgaagataaacaaggtttgccccgtatgcagtgcagaagtttcaacttcgacctctggacaaagctgatgaggcaaaggaagaaagattcagaaagaatcataagctaagaacttcaaaaccttagctgcctgtttgtacacttcttataaacaaaataacatcatcagatttccttggatcctttaaaaaatctcaaagattggaacattctcaagcgtttttagtttttgcc

SEQ ID NO: 2038 - protein, 340 aa, Arabidopsis thaliana
MPMENDNGPHVGNVVVTAEQATKINETDGRLPENRQTGVVSDTGSGSERGEQGVGESAVAVAVPVEESGSISVGELPAPRSSSARVPFTNLSQIDADLALARTLQEQERAYMMLTMNSEISDYGSWETGSYVYDEDEFDDPENEDEDDDEDEYETDDDPQEDGLDVNVHANEDDQEDDGNSDIEEVAYTDDEAYARALQEAEERDMAARLSALSGLANRVVEDLEDESHTSQDAWDEMDPDELSYEELLALGDIVGTESRGLSADTIASLPSKRYKEGDNQNGTNESCVICRLDYEDDEDLILLPCKHSYHSECINNWLKINKVCPVCSAEVSTSTSGQS

SEQ ID NO: 2039 - protein, 338 aa, Arabidopsis thaliana
MENDNGPHVGNVVVTAEQATKINETDGRLPENRQTGVVSDTGSGSERGEQGVGESAVAVAVPVEESGSISVGELPAPRSSSARVPFTNLSQIDADLALARTLQEQERAYMMLTMNSEISDYGSWETGSYVYDEDEFDDPENEDEDDDEDEYETDDDPQEDGLDVNVHANEDDQEDDGNSDIEEVAYTDDEAYARALQEAEERDMAARLSALSGLANRVVEDLEDESHTSQDAWDEMDPDELSYEELLALGDIVGTESRGLSADTIASLPSKRYKEGDNQNGTNESCVICRLDYEDDEDLILLPCKHSYHSECINNWLKINKVCPVCSAEVSTSTSGQS

SEQ ID NO: 2040 - protein, 229 aa, Arabidopsis thaliana
MMLTMNSEISDYGSWETGSYVYDEDEFDDPENEDEDDDEDEYETDDDPQEDGLDVNVHANEDDQEDDGNSDIEEVAYTDDEAYARALQEAEERDMAARLSALSGLANRVVEDLEDESHTSQDAWDEMDPDELSYEELLALGDIVGTESRGLSADTIASLPSKRYKEGDNQNGTNESCVICRLDYEDDEDLILLPCKHSYHSECINNWLKINKVCPVCSAEVSTSTSGQS

SEQ ID NO: 2041 - DNA, 1396 bp, Arabidopsis thaliana
aacacagccgcctttgtgaccgtccgatcttaaatcagcgtttccggttcatttgacggcaactatctctctctctctctctagagaattgatgaagaagagcatctatcttttttgtttttgaaaattaacaacacttcacgagggttgacctgtttcggtggtgtttcttcaattccggattttgatctttcgtttcgatcgaagatcaatcaaagtctccacctttcttcaatggatttggatagcatggactgtacatcaaccatggatgtgacagatgatgaagagatccaccaagatcgccattcctacgcttctgtttccaagcatcatcatactaataacaacaccaccaacgttaatgctgctgcttctgggcttctccctaccaccaccagtgttcatgagcttctcgaatgtcctgtctgcaccaattctatgtaccctcccattcatcagtgtcacaatggacatacgttgtgttcaacctgtaaagccagggttcacaaccgctgcccaacttgtagacaagagctcggtgatatccgttgtttggcactggaaaaagtagccgaatcacttgaactaccttgtaaacacatgtcacttggatgtcctgaaatcttcccttattacagtaagctcaaacatgagactgtatgtaacttcagaccttatagctgcccttatgctggatccgagtgttctgttacgggcgatatccctttcttagttgctcatctgagggatgatcataaggtggatatgcattctgggtgtactttcaaccatcgttatgtcaagtctaatcctcgtgaagtcgaaaacgccacatggatgttaactgtctttcactgcttcggtcaatacttctgtcttcactttgaggcattccagctcggaatggctccagtctacatggcgttcctgcgtttcatgggggacgagacagaagctcgaaactacaattacagtttagaagtgggaggttatggtcggaagctgatatgggaaggaacaccaagaagcgtaagagacagccacaggaaagttagagacagtcatgatggactaattatacaaagaaacatggctctcttcttctcaggtggagataggaaagagctgaaacttcgagtcactggaaggatatggaaagagcaacaacaaagtggtgaaggtggaggagcttgtatcccaaacttgtcttgaaaattaaaaaaaaaaaatcaaactgattttgaaaacctcaccgatttggccttgtctctgtaaccatggttatctgtaattagggttttctctgacgataaacttggggttgttcttatgtatctctctctgtctttctcatgtcatggaggtttttttattataaaatatatagttcatt

SEQ ID NO: 2042 - protein, 326 aa, Arabidopsis thaliana
MDLDSMDCTSTMDVTDDEEIHQDRHSYASVSKHHHTNNNTTNVNAAASGLLPTTTSVHELLECPVCTNSMYPPIHQCHNGHTLCSTCKARVHNRCPTCRQELGDIRCLALEKVAESLELPCKHMSLGCPEIFPYYSKLKHETVCNFRPYSCPYAGSECSVTGDIPFLVAHLRDDHKVDMHSGCTFNHRYVKSNPREVENATWMLTVFHCFGQYFCLHFEAFQLGMAPVYMAFLRFMGDETEARNYNYSLEVGGYGRKLIWEGTPRSVRDSHRKVRDSHDGLIIQRNMALFFSGGDRKELKLRVTGRIWKEQQQSGEGGGACIPNLS

SEQ ID NO: 2043 - protein, 321 aa, Arabidopsis thaliana
MDCTSTMDVTDDEEIHQDRHSYASVSKHHHTNNNTTNVNAAASGLLPTTTSVHELLECPVCTNSMYPPIHQCHNGHTLCSTCKARVHNRCPTCRQELGDIRCLALEKVAESLELPCKHMSLGCPEIFPYYSKLKHETVCNFRPYSCPYAGSECSVTGDIPFLVAHLRDDHKVDMHSGCTFNHRYVKSNPREVENATWMLTVFHCFGQYFCLHFEAFQLGMAPVYMAFLRFMGDETEARNYNYSLEVGGYGRKLIWEGTPRSVRDSHRKVRDSHDGLIIQRNMALFFSGGDRKELKLRVTGRIWKEQQQSGEGGGACIPNLS

SEQ ID NO: 2044 - protein, 315 aa, Arabidopsis thaliana
MDVTDDEEIHQDRHSYASVSKHHHTNNNTTNVNAAASGLLPTTTSVHELLECPVCTNSMYPPIHQCHNGHTLCSTCKARVHNRCPTCRQELGDIRCLALEKVAESLELPCKHMSLGCPEIFPYYSKLKHETVCNFRPYSCPYAGSECSVTGDIPFLVAHLRDDHKVDMHSGCTFNHRYVKSNPREVENATWMLTVFHCFGQYFCLHFEAFQLGMAPVYMAFLRFMGDETEARNYNYSLEVGGYGRKLIWEGTPRSVRDSHRKVRDSHDGLIIQRNMALFFSGGDRKELKLRVTGRIWKEQQQSGEGGGACIPNLS

SEQ ID NO: 2045 - DNA, 1906 bp, Arabidopsis thaliana
ggcaaaatgaatagagataatatataaacacaagcattaggctgtcgagaaaacataaattttctatgattaggccatacaaatcataataagtagtagaaatacaaaaaaatctgtttgttggctaaagagaaatcgaaggaattagtcttttcacccatttttctctctctgtgtggcttcttcttcttcttcttcttcctatcaaaatcatcatcatcatcttctctatattactaaaatagagagagccaacaaaagagaggagagggcgtaaaacagcagacggtggcgcaccgtagcaccgccccctcctaacctgcgcctttcttccttctctttcattttttttttttccggtttcaggaattattcctctcctcctctctcaggtcgcttcgatcccaaggcaaaatagtttcctgatttttgattcttaccttcgattttggcttcttcttcttcttcttcagatgcattcacctagaaaactctggcggacatcaaaggaaccctagcttttctccggtcttgttatatcgcctctatcgccgccgatcggtggtttgatttcaaatccaagagaaagaaacgcagaggttcatttctcaggatgctttggatcatgagattctccggtttattctccgccgctttggttatcatcgtcctctctccttctctccaatcgtttcctccagctgaagctatcagatcctctcatctcgacgcttacctccgtttcccctcctccgatccaccgccgcatagattctccttcagaaaagctcctgttttccgcaatgccgccgattgcgccgccgcagatatcgattccggcgtctgtaacccttccttggtccacgtcgcgattactctcgatttcgagtacctgcgtggctcaatcgccgccgttcattcgattctcaagcactcgtcgtgtcccgagagcgtcttcttccatttcctcgtctccgagactgacctagaatccttgattcgttcgacttttcccgaattgaaattaaaggtttactacttcgatccggagattgtacggacgctgatctcaacctccgtgagacaagcgctcgagcagccgttgaattacgctagaaattacctagctgaccttctcgagccttgcgtgcgtcgcgtgatctacctagattccgatctaatcgtcgtcgacgacatcgcaaagctctggatgacgaaactgggatcgaaaacgatcggagctcccgagtactgtcacgcgaacttcacaaagtatttcacaccggcgttctggtccgacgagaggttctccggagctttctccgggaggaaaccgtgctacttcaacacgggagtgatggtgatggatctagagagatggaggcgcgtagggtacacggaggtgatagagaaatggatggagattcagaagagtgataggatttacgagctgggatcattgccgccgttcttgttggtgttcgccggagaagtagctccgatagagcatcggtggaaccagcatgggcttggtggagataacgtgagaggaagctgtagagatttacatcccggtccggttagcttgcttcattggtccggtagtggtaaaccgtggtttcggttagattcgagacggccttgtccacttgatactctttgggcaccttatgatttgtatggacactactctcgctgatgatgattgatgatctctgttattacatattattatagtctcagtctcagctggtaaattctctcatctcctttgacaaaaaaaaaaacattctttcttctctcttttgattttaccaacttttggttggaatttgtttcgttactctgtattctattcgattgttctgtgcatcaaaccataggatacaatcagatttgttgttgt

SEQ ID NO: 2046 - protein, 361 aa, Arabidopsis thaliana
MLWIMRFSGLFSAALVIIVLSPSLQSFPPAEAIRSSHLDAYLRFPSSDPPPHRFSFRKAPVFRNAADCAAADIDSGVCNPSLVHVAITLDFEYLRGSIAAVHSILKHSSCPESVFFHFLVSETDLESLIRSTFPELKLKVYYFDPEIVRTLISTSVRQALEQPLNYARNYLADLLEPCVRRVIYLDSDLIVVDDIAKLWMTKLGSKTIGAPEYCHANFTKYFTPAFWSDERFSGAFSGRKPCYFNTGVMVMDLERWRRVGYTEVIEKWMEIQKSDRIYELGSLPPFLLVFAGEVAPIEHRWNQHGLGGDNVRGSCRDLHPGPVSLLHWSGSGKPWFRLDSRRPCPLDTLWAPYDLYGHYSR

SEQ ID NO: 2047 - protein, 357 aa, Arabidopsis thaliana
MRFSGLFSAALVIIVLSPSLQSFPPAEAIRSSHLDAYLRFPSSDPPPHRFSFRKAPVFRNAADCAAADIDSGVCNPSLVHVAITLDFEYLRGSIAAVHSILKHSSCPESVFFHFLVSETDLESLIRSTFPELKLKVYYFDPEIVRTLISTSVRQALEQPLNYARNYLADLLEPCVRRVIYLDSDLIVVDDIAKLWMTKLGSKTIGAPEYCHANFTKYFTPAFWSDERFSGAFSGRKPCYFNTGVMVMDLERWRRVGYTEVIEKWMEIQKSDRIYELGSLPPFLLVFAGEVAPIEHRWNQHGLGGDNVRGSCRDLHPGPVSLLHWSGSGKPWFRLDSRRPCPLDTLWAPYDLYGHYSR

SEQ ID NO: 2048 - DNA, 1889 bp, Arabidopsis thaliana
atacaaaaacaaacccacaaagtctagctctctctctatatcggtgattcgaattttcagaaccgaaactccggcgaaaagattatggcgggacagtcacgaaaatggatgatactggtggcgacgatatggattcaagctttcaccgggacgaatttcgatttctcagcttactcgtcagatttgaaatcggttctagggatttcacaggtgcagctaaactacctcgccgtggcttcggatctcggaaaagtattcggatggtcgtcgggactagcgcttatgtatttcccgctttggacggtgcttttcgcggcggcgtttatgggattcgtcggttatggagttcagtggcttgtcatcactcatttcatctctttgccttatatcatggtgtttctctgttgcttacttgctggtttaagtatctgttggttcaacactgtctgctttgtgctctgcattagtaacttccctgcaaacagatcacttgctctttccctcacagtgagtttcaatggtgtaagcgctgctttatatactcttgcttacaacgcaatcaatccaacttctccagagctatatcttcttttgaacgctcttataccgctcattgtctctttcactgctatcatcccgattcttcgtcaaccgccttttgagcctcttccaccagatggagttcgtcgtgactctctcatgtttctattgctcaacatactcgctgctttaaacggtgtttatctccttctctttggatcaaactcctctgatttaacctctgctcgtctactctttggtggagcaatcctcctcttggtattccctttatgtattcccggtttagtcatcgcccggaattggtataaccgcacaatccacactagtttccgtctagaaggttctggtttcattcttgttgatcctgatgagcttgagttgcataaagggatgcttgcacatgaagcaaaccgtgaaggttatcaattgctgagtgacgatgtggtgcaaaacccggttaagtccgtagctgttgaggaagaggatagtgatgagtcatgttgcaagaaacttatcacaagagatcagcttgaaggtttggggattgaacattctttgtcgctgctcttaaccagatcagatttttggttatactatatcacgtacttctgcggtggaaccattggacttgtgtacagcaacaaccttggacagattgctcaatctttaggacaaagctcaaataccacaactcttgtcacactttattctgctttctcattctttggaagattgctttctgcaacaccagattatatccgagcgaaggtttattttgccagaaccgggtggttagcaatcgcgctattaccaacccccttcgcacttttcttgcttgcatcatcaggaactgcatcagcattacaagctggaacagcgctgatgggtttaagctccgggtttatctttgcagcagcggtttccatcacatcagagctttttggaccaaacagtgttggagttaaccacaatatcttaatcacaaacataccgataggatcattgatctatggattcttggctgcattggtctatgactcacatggtttcaccgggaccaaatcaatgacctcggagtcggtggtgtgtatgggacgagattgttattacttgacctttgtgtggtggggttgcttgtctcttcttgggctaggttcgagtcttgtgttgtttattagaactagacgagcttatcaacggtttgaacaagctcgtataagttcgaacatcaacgactcttagaaatttgcatcaaccccaacggtttgtgtatatgtaggatctaagttataacagacggattaatggtattttagtggattttggcc

SEQ ID NO: 2049 - protein, 572 aa, Arabidopsis thaliana
MAGQSRKWMILVATIWIQAFTGTNFDFSAYSSDLKSVLGISQVQLNYLAVASDLGKVFGWSSGLALMYFPLWTVLFAAAFMGFVGYGVQWLVITHFISLPYIMVFLCCLLAGLSICWFNTVCFVLCISNFPANRSLALSLTVSFNGVSAALYTLAYNAINPTSPELYLLLNALIPLIVSFTAIIPILRQPPFEPLPPDGVRRDSLMFLLLNILAALNGVYLLLFGSNSSDLTSARLLFGGAILLLVFPLCIPGLVIARNWYNRTIHTSFRLEGSGFILVDPDELELHKGMLAHEANREGYQLLSDDVVQNPVKSVAVEEEDSDESCCKKLITRDQLEGLGIEHSLSLLLTRSDFWLYYITYFCGGTIGLVYSNNLGQIAQSLGQSSNTTTLVTLYSAFSFFGRLLSATPDYIRAKVYFARTGWLAIALLPTPFALFLLASSGTASALQAGTALMGLSSGFIFAAAVSITSELFGPNSVGVNHNILITNIPIGSLIYGFLAALVYDSHGFTGTKSMTSESVVCMGRDCYYLTFVWWGCLSLLGLGSSLVLFIRTRRAYQRFEQARISSNINDS

SEQ ID NO: 2050 - protein, 564 aa, Arabidopsis thaliana
MILVATIWIQAFTGTNFDFSAYSSDLKSVLGISQVQLNYLAVASDLGKVFGWSSGLALMYFPLWTVLFAAAFMGFVGYGVQWLVITHFISLPYIMVFLCCLLAGLSICWFNTVCFVLCISNFPANRSLALSLTVSFNGVSAALYTLAYNAINPTSPELYLLLNALIPLIVSFTAIIPILRQPPFEPLPPDGVRRDSLMFLLLNILAALNGVYLLLFGSNSSDLTSARLLFGGAILLLVFPLCIPGLVIARNWYNRTIHTSFRLEGSGFILVDPDELELHKGMLAHEANREGYQLLSDDVVQNPVKSVAVEEEDSDESCCKKLITRDQLEGLGIEHSLSLLLTRSDFWLYYITYFCGGTIGLVYSNNLGQIAQSLGQSSNTTTLVTLYSAFSFFGRLLSATPDYIRAKVYFARTGWLAIALLPTPFALFLLASSGTASALQAGTALMGLSSGFIFAAAVSITSELFGPNSVGVNHNILITNIPIGSLIYGFLAALVYDSHGFTGTKSMTSESVVCMGRDCYYLTFVWWGCLSLLGLGSSLVLFIRTRRAYQRFEQARISSNINDS

SEQ ID NO: 2051 - protein, 506 aa, Arabidopsis thaliana
MYFPLWTVLFAAAFMGFVGYGVQWLVITHFISLPYIMVFLCCLLAGLSICWFNTVCFVLCISNFPANRSLALSLTVSFNGVSAALYTLAYNAINPTSPELYLLLNALIPLIVSFTAIIPILRQPPFEPLPPDGVRRDSLMFLLLNILAALNGVYLLLFGSNSSDLTSARLLFGGAILLLVFPLCIPGLVIARNWYNRTIHTSFRLEGSGFILVDPDELELHKGMLAHEANREGYQLLSDDVVQNPVKSVAVEEEDSDESCCKKLITRDQLEGLGIEHSLSLLLTRSDFWLYYITYFCGGTIGLVYSNNLGQIAQSLGQSSNTTTLVTLYSAFSFFGRLLSATPDYIRAKVYFARTGWLAIALLPTPFALFLLASSGTASALQAGTALMGLSSGFIFAAAVSITSELFGPNSVGVNHNILITNIPIGSLIYGFLAALVYDSHGFTGTKSMTSESVVCMGRDCYYLTFVWWGCLSLLGLGSSLVLFIRTRRAYQRFEQARISSNINDS

SEQ ID NO: 2052 - DNA, 1340 bp, Arabidopsis thaliana
tgtatcaattctacaatcatttttgcttccctttctttgaaaacattccattttcctttctatttttttgcttatctctgtactaagaaccaaactaacccacagtagaactaaattacacttctctttcaatcatttgcgtctcaccggctaatctcattcctctgtcatttttacagttcttcgatcgaaaaccggatgtgagaagcctcgaggttcaaggatttgcagaggctcaaagctttgctttcaaagaaaaagaggaagaaggcttacaagatacagttccatttctacagatgctgcaaagtgaagacccctcatcgtttttttcaatcaaagagccaaactttctgacgctactgtctcttcaaaccctcaaggagccttgggaactcgaaagatatctttcacttgaggattcacaatttcattcaccggtccaatctgagaccaaccgcttcatggaaggagccaatcaagctgtgtcaagccaagaaattccctttagccaagcaaacatgacactcccttcttctacctcatcaccactcagtgcacattcaagacgaaagcgcaaaatcaaccacttgctgcctcaagaaatgactagagaaaagagaaagaggaggaaaacaaaaccaagtaaaaacaatgaagagattgagaatcaaagaataaaccacattgctgttgaacgaaacagaagacgtcaaatgaacgaacatatcaactctctccgggcccttctcccaccttcctacatccaacgaggagaccaagcttccatagtaggaggagcaataaactacgtgaaggtcctcgagcaaatcatacaatctctcgaatcgcaaaagagaacgcaacaacaaagtaacagtgaggtagtagaaaacgcacttaatcatctctcaggcatttcgtcgaacgacctgtggacaactcttgaagatcaaacttgtatccccaaaatcgaagctacagtgatacaaaaccatgtcagccttaaagttcaatgtgagaagaaacaaggacaacttctcaaaggaatcatatcacttgaaaagcttaaactcactgttcttcatctcaatatcactacttcgtctcattcctctgtttcttattccttcaacctcaagatggaagatgagtgcgacttagagtcagccgacgagattacggcggctgttcatcggattttcgatattccgacaatttgattaaacacatataattccaaaaatattaacagctgacaaaatggtatcttttttttttttcctacttgtaccaattttttaagaattaagagaataaaaaaatttcgtttttcgttc

SEQ ID NO: 2053 - protein, 307 aa, Arabidopsis thaliana
MLQSEDPSSFFSIKEPNFLTLLSLQTLKEPWELERYLSLEDSQFHSPVQSETNRFMEGANQAVSSQEIPFSQANMTLPSSTSSPLSAHSRRKRKINHLLPQEMTREKRKRRKTKPSKNNEEIENQRINHIAVERNRRRQMNEHINSLRALLPPSYIQRGDQASIVGGAINYVKVLEQIIQSLESQKRTQQQSNSEVVENALNHLSGISSNDLWTTLEDQTCIPKIEATVIQNHVSLKVQCEKKQGQLLKGIISLEKLKLTVLHLNITTSSHSSVSYSFNLKMEDECDLESADEITAAVHRIFDIPTI

SEQ ID NO: 2054 - protein, 252 aa, Arabidopsis thaliana
MEGANQAVSSQEIPFSQANMTLPSSTSSPLSAHSRRKRKINHLLPQEMTREKRKRRKTKPSKNNEEIENQRINHIAVERNRRRQMNEHINSLRALLPPSYIQRGDQASIVGGAINYVKVLEQIIQSLESQKRTQQQSNSEVVENALNHLSGISSNDLWTTLEDQTCIPKIEATVIQNHVSLKVQCEKKQGQLLKGIISLEKLKLTVLHLNITTSSHSSVSYSFNLKMEDECDLESADEITAAVHRIFDIPTI

SEQ ID NO: 2055 - protein, 233 aa, Arabidopsis thaliana
MTLPSSTSSPLSAHSRRKRKINHLLPQEMTREKRKRRKTKPSKNNEEIENQRINHIAVERNRRRQMNEHINSLRALLPPSYIQRGDQASIVGGAINYVKVLEQIIQSLESQKRTQQQSNSEVVENALNHLSGISSNDLWTTLEDQTCIPKIEATVIQNHVSLKVQCEKKQGQLLKGIISLEKLKLTVLHLNITTSSHSSVSYSFNLKMEDECDLESADEITAAVHRIFDIPTI

SEQ ID NO: 2056 - DNA, 1611 bp, Arabidopsis thaliana
gagggttttgtttgaacaaagagactagagagtgttggagccgttaaatggcgaaaactgataagctagctcaattccttgattctggtatctacgaatccgacgaattcaattggttcttcttagacacagttcgtatcaccaaccgttcatatacccgatttaaggtttcaccttctgcttactactctcgtttcttcaattcgaagcaactcaatcaacactctagcgagtctaatccgaaaaagcgaaaacggaagcagaaaaactctagctttcaccttcctagtgtaggagagcaagcttcgaatcttcgtcatcaggaagcgaggctgttcttatcgaaagcccatgaatcttttctaaaggaaattgagttgttgagtttaacgaaaggtctaagtgatgataatgatgatgatgattctagtttgttgaacaagtgttgtgacgatgaagtctcttttattgagcttggaggagtgtggcaagctcctttctatgagataacactgagttttaatctacattgcgacaatgaaggtgagagttgtaatgaacagagagtgtttcaagtgttcaataacctagtagtgaatgagattggagaagaagttgaagctgagttttccaaccggagatatataatgcccagaaacagttgcttctacatgtctgatttacatcacatccgaaacctcgttcctgctaaatctgaagaaggctacaatcttatagttattgatccgccttgggaaaatgcaagtgctcatcagaaatcaaagtatcctactttaccgaaccaatacttcttatctcttccgatcaagcagcttgctcatgctgaaggagctctcgtggctttgtgggtgacaaatagagagaaattactaagttttgttgagaaagagctattccctgcgtggggaattaagtatgtagctacaatgtattggttaaaggtgaaaccggatggtacactgatttgcgacctggacctggtccatcataaaccttatgagtaccttctactaggctaccattttaccgaacttgcaggatcagaaaagaggtcagattttaaactcttggacaagaaccagataatcatgagcatccctggtgatttttcgaggaaacccccaattggagatatactactgaaacacactcccgggtctcaacctgctcggtgccttgagctatttgcgagggaaatggctgccggatggacctcttggggaaacgaaccgcttcactttcaggactcgagatactttttgaaagtttagtgggcgcattccctagggtgtaaccaagaaaagggctggcttgggccctcatgatcgtttttctctatgactcattctcaagctggggacagttaggagagaacccttggaaagaagtggaaggttcggttcatcgcaaacgacatcgtttgaagaagacaacactagagtaagcctgaaaaaagtatagtgttactaaagattattttgtctcagaactgtaccatcaatttagtaagctttttccttttcctttcataaacagatgatgtttcagataaaatttaaatatattatcagtacagtaagattacatacc

SEQ ID NO: 2057 - protein, 414 aa, Arabidopsis thaliana
MAKTDKLAQFLDSGIYESDEFNWFFLDTVRITNRSYTRFKVSPSAYYSRFFNSKQLNQHSSESNPKKRKRKQKNSSFHLPSVGEQASNLRHQEARLFLSKAHESFLKEIELLSLTKGLSDDNDDDDSSLLNKCCDDEVSFIELGGVWQAPFYEITLSFNLHCDNEGESCNEQRVFQVFNNLVVNEIGEEVEAEFSNRRYIMPRNSCFYMSDLHHIRNLVPAKSEEGYNLIVIDPPWENASAHQKSKYPTLPNQYFLSLPIKQLAHAEGALVALWVTNREKLLSFVEKELFPAWGIKYVATMYWLKVKPDGTLICDLDLVHHKPYEYLLLGYHFTELAGSEKRSDFKLLDKNQIIMSIPGDFSRKPPIGDILLKHTPGSQPARCLELFAREMAAGWTSWGNEPLHFQDSRYFLKV

SEQ ID NO: 2058 - protein, 214 aa, Arabidopsis thaliana
MPRNSCFYMSDLHHIRNLVPAKSEEGYNLIVIDPPWENASAHQKSKYPTLPNQYFLSLPIKQLAHAEGALVALWVTNREKLLSFVEKELFPAWGIKYVATMYWLKVKPDGTLICDLDLVHHKPYEYLLLGYHFTELAGSEKRSDFKLLDKNQIIMSIPGDFSRKPPIGDILLKHTPGSQPARCLELFAREMAAGWTSWGNEPLHFQDSRYFLKV

SEQ ID NO: 2059 - DNA, 991 bp, Arabidopsis thaliana
gcccttcaataagtttcaatgtcataaaaccaaaaaaaaaaaaaatagtgaagacgacgaacctttgaggacactcttcggtttctccaatccttcatatgatgtcggacggaggagcaccgtcgagatacgtgaagttgacgaaggaacaagctccggtcgatgagattcatcccggtgaactcaatcagcccattgaagtttctcatctagctgttcacaaatgcaatgagtgtggccaacctttgcctgagaattttgaagctcctgctgatgagccctggactaccggaatattcggctgcactgaggacatgaatagtttttggctgggacttttctgcccaagtgttctatttggacgtgtctatgaaactctgagtgatgaggaaacctcgtggaagaaagcatgtatttgccattccattgtagtagaaggcggtcttactgctgcatcgatgcttgcttgtgttcccggtattgatccgcatacttctttacttatatgggaaggtttgttgtttgtttggtggatgtgtgggatatacactggaaatgtccgtcaaactctacaaaggaaatatcatcttcagaatgctccatgtgatccatgtatggtgcattgttgccttcacttttgtgcggtttgtcaagagcaccgtgagatgaagaatcgtctttcggataactttgtgatgcctatgactgttatcaacccaccaccggttcaagagatgagtgcttctggtgacagagaccaacaccaccacaactctgttccggtttcacaccatagctctgatcttgagatgaggccattgtagtcctcaatggttccccatcagattcaaggttttgttttgcctgaatctaactttatatatgtaaaccgatttggtttgtttcaaactcatatagatagattcggattctggttttccttgtgtaatcatgatttatcattatctcaaaattaagattttctatgcct

SEQ ID NO: 2060 - protein, 241 aa, Arabidopsis thaliana
MMSDGGAPSRYVKLTKEQAPVDEIHPGELNQPIEVSHLAVHKCNECGQPLPENFEAPADEPWTTGIFGCTEDMNSFWLGLFCPSVLFGRVYETLSDEETSWKKACICHSIVVEGGLTAASMLACVPGIDPHTSLLIWEGLLFVWWMCGIYTGNVRQTLQRKYHLQNAPCDPCMVHCCLHFCAVCQEHREMKNRLSDNFVMPMTVINPPPVQEMSASGDRDQHHHNSVPVSHHSSDLEMRPL

SEQ ID NO: 2061 - protein, 240 aa, Arabidopsis thaliana
MSDGGAPSRYVKLTKEQAPVDEIHPGELNQPIEVSHLAVHKCNECGQPLPENFEAPADEPWTTGIFGCTEDMNSFWLGLFCPSVLFGRVYETLSDEETSWKKACICHSIVVEGGLTAASMLACVPGIDPHTSLLIWEGLLFVWWMCGIYTGNVRQTLQRKYHLQNAPCDPCMVHCCLHFCAVCQEHREMKNRLSDNFVMPMTVINPPPVQEMSASGDRDQHHHNSVPVSHHSSDLEMRPL

SEQ ID NO: 2062 - protein, 169 aa, Arabidopsis thaliana
MNSFWLGLFCPSVLFGRVYETLSDEETSWKKACICHSIVVEGGLTAASMLACVPGIDPHTSLLIWEGLLFVWWMCGIYTGNVRQTLQRKYHLQNAPCDPCMVHCCLHFCAVCQEHREMKNRLSDNFVMPMTVINPPPVQEMSASGDRDQHHHNSVPVSHHSSDLEMRPL

SEQ ID NO: 2063 - DNA, 1035 bp, Arabidopsis thaliana
gcttgaaaatgaaatctggtttaaatagtttctctgtttggtttttctgttttaattaatttacgggcaatggaagcattgagagcgtcctacggcgactcttcatcggattccgataccgatgatctttctccggcgagtcccgttactgcaaattctggagagaaagattcgatttccttgcctcctccaccgcttgcgcttctcgattccattgtatccacaggttcactggatttcttctcaacagagcctggagttcgtgtaagaaactttcctcatgtcgatggaaattacgctttgcacgtttacgtacctgtttgtatacctccactgccaaagaaggagattgtatgttttttaaagaaggttgcatcagttgttcctcatcttcatttggtagaggctgatgtgccactcagcattctatgcaaggatgatcagaagtttgagcgtgccttggggagagagttccacataagcttaggaagaaacgttccactacgtgttcatcagattaactcggtgatttctatgcttcggcaaaagcttcagttgcagaagagatacttgatagatttcaataagtgggaagtctttgtgaatgatgaccatactcgctctttcctttctttggaaatcactacttcaggactatccgagataagtaagcaaattgatgctgttaatgaagtttacaagctccacaatctgccggagttctacaaggatccgcggccgcatatatccttggtctgggcgttgggtgatattagaacttccctaaagggagctgttgacgtggaacttaggaagcttagagcaggtggttgtgtgcagaatcgtatcttcacctctaagttttgtgggatcgagtgtaagataggaaacaaaacacacaaaatatgtaaactcccagatgaataagaaaatctcaaatttctgtgtttgcagaccaatcaggtatgcatttgtaacgacatagaaggatgagttgatctgtgttcttgggtattccataatatatgtctcttc

SEQ ID NO: 2064 - protein, 285 aa, Arabidopsis thaliana
MEALRASYGDSSSDSDTDDLSPASPVTANSGEKDSISLPPPPLALLDSIVSTGSLDFFSTEPGVRVRNFPHVDGNYALHVYVPVCIPPLPKKEIVCFLKKVASVVPHLHLVEADVPLSILCKDDQKFERALGREFHISLGRNVPLRVHQINSVISMLRQKLQLQKRYLIDFNKWEVFVNDDHTRSFLSLEITTSGLSEISKQIDAVNEVYKLHNLPEFYKDPRPHISLVWALGDIRTSLKGAVDVELRKLRAGGCVQNRIFTSKFCGIECKIGNKTHKICKLPDE

SEQ ID NO: 2065 - DNA, 1700 bp, Arabidopsis thaliana
aaaaaaaaaaaaagaaagaaaaaaaattcagaagcctttgttttcatcgatgaataaattaacaaacaaaactaaaaaataggatattcgctggccgaatcgcgtcgatccacatcgcaggtgagggttcctgcaatttatccctcgtggtctctgaatctcagatcgtcgtcaacgaatcctccattttctgaatcaaaattttctggaaacaatggggagcttggggacgatgctgagatatccggatgacatatatccgctcctgaagatgaaacgagcgattgagaaagcggagaagcagatccctcctgagccacactggggtttctgctattcgatgctccacaaggtttctcgaagcttttctctcgttattcagcaactcaacaccgagctccgtaacgccgtgtgtgtgttctacttggttctccgagctcttgatactgttgaggatgatactagcataccaactgatgaaaaggttcccatcctgatagcttttcaccggcacatatacgatactgattggcattattcatgtggtacgaaggagtacaagattctaatggaccaatttcaccatgtttctgcagcttttttggaacttgaaaaagggtatcaagaggctatcgaggaaattactagaagaatgggtgcagggatggccaagtttatctgccaagaggtagaaactgttgatgactacgatgaatactgccactatgttgctgggcttgttggtttaggtttgtcgaaactcttcctcgctgcaggatcagaggttttgacaccagattgggaggcgatttccaattcaatgggtttatttctgcagaaaacaaacattatcagagattatcttgaggacattaatgagataccaaaatcccgcatgttttggcctcgcgagatttggggcaaatatgctgacaagcttgaggatttaaaatacgaggagaacacaaacaaatccgtacagtgcttaaatgaaatggttaccaatgcgttgatgcatattgaagattgcctgaaatacatggtttccttgcgtgatccttccatatttcggttctgtgccatccctcagatcatggcgattggaacacttgcattatgctataacaatgaacaagtattcagaggcgttgtgaaactgaggcgaggtcttactgctaaagtcattgatcgtacaaagacaatggctgatgtctatggtgctttctatgatttttcctgcatgctgaagacaaaggttgacaagaacgatccaaatgccagtaagacactaaaccgacttgaagccgttcagaaactctgcagagacgctggagttcttcaaaacagaaaatcttatgttaatgacaaaggacaaccaaacagtgtctttattataatggttgtgattctactggccatagtctttgcatatctcagagcaaactgagtgatccatgtaagcgagtctgattgtatcaccatcattcaagatgttcagagcaaatttgagtgatgaagtaatctaggttgattcttattcacgccactgaatcctaagcaagattgtttccagaacaaacagagtttaagcatggtttagtctaaaaccatggattctattttagttactaccttcgttatctaaacgtgcatttgttcatctatttttattccttgtgtttaaagttctttctttgttt

SEQ ID NO: 2066 - protein, 410 aa, Arabidopsis thaliana
MGSLGTMLRYPDDIYPLLKMKRAIEKAEKQIPPEPHWGFCYSMLHKVSRSFSLVIQQLNTELRNAVCVFYLVLRALDTVEDDTSIPTDEKVPILIAFHRHIYDTDWHYSCGTKEYKILMDQFHHVSAAFLELEKGYQEAIEEITRRMGAGMAKFICQEVETVDDYDEYCHYVAGLVGLGLSKLFLAAGSEVLTPDWEAISNSMGLFLQKTNIIRDYLEDINEIPKSRMFWPREIWGKYADKLEDLKYEENTNKSVQCLNEMVTNALMHIEDCLKYMVSLRDPSIFRFCAIPQIMAIGTLALCYNNEQVFRGVVKLRRGLTAKVIDRTKTMADVYGAFYDFSCMLKTKVDKNDPNASKTLNRLEAVQKLCRDAGVLQNRKSYVNDKGQPNSVFIIMVVILLAIVFAYLRAN

SEQ ID NO: 2067 - protein, 404 aa, Arabidopsis thaliana
MLRYPDDIYPLLKMKRAIEKAEKQIPPEPHWGFCYSMLHKVSRSFSLVIQQLNTELRNAVCVFYLVLRALDTVEDDTSIPTDEKVPILIAFHRHIYDTDWHYSCGTKEYKILMDQFHHVSAAFLELEKGYQEAIEEITRRMGAGMAKFICQEVETVDDYDEYCHYVAGLVGLGLSKLFLAAGSEVLTPDWEAISNSMGLFLQKTNIIRDYLEDINEIPKSRMFWPREIWGKYADKLEDLKYEENTNKSVQCLNEMVTNALMHIEDCLKYMVSLRDPSIFRFCAIPQIMAIGTLALCYNNEQVFRGVVKLRRGLTAKVIDRTKTMADVYGAFYDFSCMLKTKVDKNDPNASKTLNRLEAVQKLCRDAGVLQNRKSYVNDKGQPNSVFIIMVVILLAIVFAYLRAN

SEQ ID NO: 2068 - protein, 391 aa, Arabidopsis thaliana
MKRAIEKAEKQIPPEPHWGFCYSMLHKVSRSFSLVIQQLNTELRNAVCVFYLVLRALDTVEDDTSIPTDEKVPILIAFHRHIYDTDWHYSCGTKEYKILMDQFHHVSAAFLELEKGYQEAIEEITRRMGAGMAKFICQEVETVDDYDEYCHYVAGLVGLGLSKLFLAAGSEVLTPDWEAISNSMGLFLQKTNIIRDYLEDINEIPKSRMFWPREIWGKYADKLEDLKYEENTNKSVQCLNEMVTNALMHIEDCLKYMVSLRDPSIFRFCAIPQIMAIGTLALCYNNEQVFRGVVKLRRGLTAKVIDRTKTMADVYGAFYDFSCMLKTKVDKNDPNASKTLNRLEAVQKLCRDAGVLQNRKSYVNDKGQPNSVFIIMVVILLAIVFAYLRAN

SEQ ID NO: 2069 - DNA, 1420 bp, Arabidopsis thaliana
gccaacaatgaaagcgatccagttgctgtgggaagcgataatggaggcgacgaagagagaaagacggagagaagatgacgacggcgaaaaagcttcaccggaatcactcgttcttccaccagagatcattacagaaattcttctccgattaccagccaaatcgatcgggcgattcaggtgcgtatcaaagctcttttgcactttatcgtcagatccagggttcgcgaagattcacctcgatctgatccttcgaaacgaatccgtaagatcgctccaccgtaagctcattgtgtcttcacataatctgtactcgttagatttcaattcgatcggtgacggaattagggatttagcggctgtggaacacaattatcctcttaaagacgatccaagcattttctctgagatgattaggaattacgtgggggaccatctgtacgatgatcgtcgcgtgatgcttaagctgaatgcgaaatcgtatcgaagaaactgggttgagatcgttggatcttccaatggtttagtgtgtatctctcctggtgaaggagctgttttcttgtataatccaactaccggagattccaagagattacctgaaaattttcgtcccaaatctgtagaatacgaaagagataatttccaaacttatggatttggtttcgatggtctcactgatgattacaaattggtgaagcttgttgctaccagtgaagatattctcgatgctagtgtctattccttgaaggctgactcatggagacggatctgcaatttgaattatgagcacaacgatggctcctacacgtccggtgtgcatttcaacggtgcgattcactgggtgttcacagagagtaggcacaaccaaagagtggttgtagcatttgatattcaaaccgaggagtttcgagagatgccagtgcctgatgaagctgaagattgttcccataggtttagcaactttgtggtcggaagtctcaatggacgtctctgtgtggtcaatagttgctacgatgtgcatgatgatatatgggtgatgagtgagtacggtgaagctaaatcctggagcagaattcgaatcaacttgttgtataggtcgatgaaaccgctctgttcgactaagaacgatgaagaggttcttctggagcttgatggagacctggtgttgtacaactttgaaaccaatgcatcgagtaatctaggaatttgtggggttaagctcagtgacgggttcgaggcaaatacatacgtagagagcctcatatcacccaactcttatggtatagagagctgaggaagtctgctttttgctaagatataataaaccaacattcggattagaaatgttttagaaacataatcatgtaatatgtatcatgtaattaacaacgaatggtcaatgggtattttaagtttctttctc

SEQ ID NO: 2070 - protein, 429 aa, Arabidopsis thaliana
PTMKAIQLLWEAIMEATKRERRREDDDGEKASPESLVLPPEIITEILLRLPAKSIGRFRCVSKLFCTLSSDPGFAKIHLDLILRNESVRSLHRKLIVSSHNLYSLDFNSIGDGIRDLAAVEHNYPLKDDPSIFSEMIRNYVGDHLYDDRRVMLKLNAKSYRRNWVEIVGSSNGLVCISPGEGAVFLYNPTTGDSKRLPENFRPKSVEYERDNFQTYGFGFDGLTDDYKLVKLVATSEDILDASVYSLKADSWRRICNLNYEHNDGSYTSGVHFNGAIHWVFTESRHNQRVVVAFDIQTEEFREMPVPDEAEDCSHRFSNFVVGSLNGRLCVVNSCYDVHDDIWVMSEYGEAKSWSRIRINLLYRSMKPLCSTKNDEEVLLELDGDLVLYNFETNASSNLGICGVKLSDGFEANTYVESLISPNSYGIES

SEQ ID NO: 2071 - protein, 427 aa, Arabidopsis thaliana
MKAIQLLWEAIMEATKRERRREDDDGEKASPESLVLPPEIITEILLRLPAKSIGRFRCVSKLFCTLSSDPGFAKIHLDLILRNESVRSLHRKLIVSSHNLYSLDFNSIGDGIRDLAAVEHNYPLKDDPSIFSEMIRNYVGDHLYDDRRVMLKLNAKSYRRNWVEIVGSSNGLVCISPGEGAVFLYNPTTGDSKRLPENFRPKSVEYERDNFQTYGFGFDGLTDDYKLVKLVATSEDILDASVYSLKADSWRRICNLNYEHNDGSYTSGVHFNGAIHWVFTESRHNQRVVVAFDIQTEEFREMPVPDEAEDCSHRFSNFVVGSLNGRLCVVNSCYDVHDDIWVMSEYGEAKSWSRIRINLLYRSMKPLCSTKNDEEVLLELDGDLVLYNFETNASSNLGICGVKLSDGFEANTYVESLISPNSYGIES

SEQ ID NO: 2072 - protein, 416 aa, Arabidopsis thaliana
MEATKRERRREDDDGEKASPESLVLPPEIITEILLRLPAKSIGRFRCVSKLFCTLSSDPGFAKIHLDLILRNESVRSLHRKLIVSSHNLYSLDFNSIGDGIRDLAAVEHNYPLKDDPSIFSEMIRNYVGDHLYDDRRVMLKLNAKSYRRNWVEIVGSSNGLVCISPGEGAVFLYNPTTGDSKRLPENFRPKSVEYERDNFQTYGFGFDGLTDDYKLVKLVATSEDILDASVYSLKADSWRRICNLNYEHNDGSYTSGVHFNGAIHWVFTESRHNQRVVVAFDIQTEEFREMPVPDEAEDCSHRFSNFVVGSLNGRLCVVNSCYDVHDDIWVMSEYGEAKSWSRIRINLLYRSMKPLCSTKNDEEVLLELDGDLVLYNFETNASSNLGICGVKLSDGFEANTYVESLISPNSYGIES

SEQ ID NO: 2073 - DNA, 2194 bp, Arabidopsis thaliana
agtttttaagcctccgtcttcttcttcttccgtcgtcgtagtcgaaaggtggttttagctatatggatatcttctactgcaaatactcttcaaaacggatgctttgaagccttgatactaatttcatgcgttctatatatgtgcatcgtaaggaagtaatgggagagaatcgtcagattagatcacgttcttggaatagaatgccaactaaaagatgcagtgcaaatggcataatggaagagtttattctggtagatgatgatgatgttatcattcttgattttcctgagtcatctaaacggaaagctccgggtacatccagaaccaggaaggagtccattatgccgagagtgattagcattgacgatgatgatgatgagacagaaaatgttcagaaagctgggagtagttcaagcggtaacttgcaaacatctgcagaagtggataatgacgattgccaattcattcaggagaagtgtgctacttttagattttcaaaatgcaaacagactttctctacaatgccctctcatggtattcgatttggtttaggctctgatacttatagtgacttttccgagagtgactgttctgattgtgagattttagaagggtctcatagagatgtccgcgagcagtgggaacaagcagctctcttgagaaaaatgaagaaagcaggtaaagctggtttgagtgaggaggctggtccttcgaatctccactgtgacactaatttcgagcctggttttgaaaggagaactgaacaacatgatcaaacgtctttcttctttgctgcaagaaatccagatggtggaaaagctggtctgactgaggaagctggtccttcaaatctccactgtgacaataatttcagacctggttttgaaagtagaactgaacaacatgatcaaacatctttcttctttactgcaagtaatccagatggtgaaaaagaaacctcttctactttctttggagccgatggtagaatccctgatatgacgacttattttggctcggtaatggaggaagacaaccaagctaaacacactgctaattctactttttccagtaaagaggattttcgggggccttccccactgtcacccggaatacgagttgaacatgaaaggtttgatacaccaccaactcattttacttcgccaaaagaaccgatacatcaaactagttttaagaaagttgtagaacagccaaacaaagtgcaagttcaatgtgaaacttcactgtcacccgaagagaatcaaaataaaaacgtcgcgtatcagtcttataccaaggaagttgaagaagaagaagacgcatcaaaattgtctccgccacagacttctaatggatatggagatacaacgcatgtgtttggcacccaaagtaatggagccaggtgtgagcacggcataagtttagatgaatcaagagaaccgatcattgatcctattccatctaccagtggacaagtgcaaggtactaatggtacagctcctgcaattgatgtcatgcttaacagagagatattgaaggagactgatgaatacaagagagcacaagaagaagaatgggagtccaggcaacgacagttacagatccaggcagacgaagctcagaagcaacgtaagagaagaaagttagagaacatgcgaaagttggagatggaaagaaggcaaaaagagagggtagaggaagtgagagagacacagaagaaggatgaagaaaacatgaacatgaaggagaaagttcgtgcagaaataaccaaatcgcttaaactgctggaactcaagagttttaacatggcagcgttgcttcgaggcttagggattcaagttggtggtggaatatctcctctgccaaatgaggtacacgcggcatacaaacgagcagtattgaaatttcatccggacagagcatcaagaggtggtgacatcaaacagcaagttgaagcagaagaaaaattcaagcttattgctcgcatgaaggacaaatttaagcttattgctccctaacattgacccgtattatcaaaatcttttttttttttttgaatttcttagaatatgtaaatagtttttttgattatccaacaggaaacaaaattgtgttggtaggttttaaagaagggaaaaatagaagaaacacagtggtaatggtatcaacgtcttctcttcttgcctttgccttt

SEQ ID NO: 2074 - protein, 630 aa, Arabidopsis thaliana
MRSIYVHRKEVMGENRQIRSRSWNRMPTKRCSANGIMEEFILVDDDDVIILDFPESSKRKAPGTSRTRKESIMPRVISIDDDDDETENVQKAGSSSSGNLQTSAEVDNDDCQFIQEKCATFRFSKCKQTFSTMPSHGIRFGLGSDTYSDFSESDCSDCEILEGSHRDVREQWEQAALLRKMKKAGKAGLSEEAGPSNLHCDTNFEPGFERRTEQHDQTSFFFAARNPDGGKAGLTEEAGPSNLHCDNNFRPGFESRTEQHDQTSFFFTASNPDGEKETSSTFFGADGRIPDMTTYFGSVMEEDNQAKHTANSTFSSKEDFRGPSPLSPGIRVEHERFDTPPTHFTSPKEPIHQTSFKKVVEQPNKVQVQCETSLSPEENQNKNVAYQSYTKEVEEEEDASKLSPPQTSNGYGDTTHVFGTQSNGARCEHGISLDESREPIIDPIPSTSGQVQGTNGTAPAIDVMLNREILKETDEYKRAQEEEWESRQRQLQIQADEAQKQRKRRKLENMRKLEMERRQKERVEEVRETQKKDEENMNMKEKVRAEITKSLKLLELKSFNMAALLRGLGIQVGGGISPLPNEVHAAYKRAVLKFHPDRASRGGDIKQQVEAEEKFKLIARMKDKFKLIAP

SEQ ID NO: 2075 - protein, 619 aa, Arabidopsis thaliana
MGENRQIRSRSWNRMPTKRCSANGIMEEFILVDDDDVIILDFPESSKRKAPGTSRTRKESIMPRVISIDDDDDETENVQKAGSSSSGNLQTSAEVDNDDCQFIQEKCATFRFSKCKQTFSTMPSHGIRFGLGSDTYSDFSESDCSDCEILEGSHRDVREQWEQAALLRKMKKAGKAGLSEEAGPSNLHCDTNFEPGFERRTEQHDQTSFFFAARNPDGGKAGLTEEAGPSNLHCDNNFRPGFESRTEQHDQTSFFFTASNPDGEKETSSTFFGADGRIPDMTTYFGSVMEEDNQAKHTANSTFSSKEDFRGPSPLSPGIRVEHERFDTPPTHFTSPKEPIHQTSFKKVVEQPNKVQVQCETSLSPEENQNKNVAYQSYTKEVEEEEDASKLSPPQTSNGYGDTTHVFGTQSNGARCEHGISLDESREPIIDPIPSTSGQVQGTNGTAPAIDVMLNREILKETDEYKRAQEEEWESRQRQLQIQADEAQKQRKRRKLENMRKLEMERRQKERVEEVRETQKKDEENMNMKEKVRAEITKSLKLLELKSFNMAALLRGLGIQVGGGISPLPNEVHAAYKRAVLKFHPDRASRGGDIKQQVEAEEKFKLIARMKDKFKLIAP

SEQ ID NO: 2076 - protein, 605 aa, Arabidopsis thaliana
MPTKRCSANGIMEEFILVDDDDVIILDFPESSKRKAPGTSRTRKESIMPRVISIDDDDDETENVQKAGSSSSGNLQTSAEVDNDDCQFIQEKCATFRFSKCKQTFSTMPSHGIRFGLGSDTYSDFSESDCSDCEILEGSHRDVREQWEQAALLRKMKKAGKAGLSEEAGPSNLHCDTNFEPGFERRTEQHDQTSFFFAARNPDGGKAGLTEEAGPSNLHCDNNFRPGFESRTEQHDQTSFFFTASNPDGEKETSSTFFGADGRIPDMTTYFGSVMEEDNQAKHTANSTFSSKEDFRGPSPLSPGIRVEHERFDTPPTHFTSPKEPIHQTSFKKVVEQPNKVQVQCETSLSPEENQNKNVAYQSYTKEVEEEEDASKLSPPQTSNGYGDTTHVFGTQSNGARCEHGISLDESREPIIDPIPSTSGQVQGTNGTAPAIDVMLNREILKETDEYKRAQEEEWESRQRQLQIQADEAQKQRKRRKLENMRKLEMERRQKERVEEVRETQKKDEENMNMKEKVRAEITKSLKLLELKSFNMAALLRGLGIQVGGGISPLPNEVHAAYKRAVLKFHPDRASRGGDIKQQVEAEEKFKLIARMKDKFKLIAP

SEQ ID NO: 2077 - DNA, 1250 bp, Arabidopsis thaliana
aaagctggttctttcactcttcaggagaaagagagagagagagagatagttatcagagatagcaaaaatggaggctttggtttgccggaaattgggagatccaactgcgacgaatccaggtagtccagaatctccggtagaagtaagcaagactcatccgatcccgtctttgaattcagacacgtcggtgagagtcagagttattgctacgagcttgaattacgcaaattaccttcagattctcgggaaataccaggagaaacctccgttacctttcattccgggctctgattactccggaatcgtcgacgcgattggtcccgccgtcaccaaattccgcgttggagatcgtgtctgttctttcgccgatctcggttccttcgctcagtttatcgtcgctgatcaatctcgtttgttccttgtaccggaaagatgtgacatggttgctgcagctgcgcttcctgttgcgtttgggacttctcatgtagcacttgttcatagagctcgtttaacatctggtcaggtcttattggttctaggtgctgctggtggcgttggccttgcagctgttcaaatcggtaaggtttgtggagccattgtcattgcagttgctagaggaactgagaagattcaactgttgaagtcaatgggagtggatcatgttgttgatctaggcactgagaatgttatttcaagtgtgaaagagtttatcaagacaagaaagcttaaaggagttgatgttctgtatgatcctgttggagggaaactaaccaaggagtccatgaaagttctgaaatggggagcccagattctggtgataggtttcgccagcggcgaaatacctgtcattcctgctaatatagcacttgttaagaactggacggttcatggtctttactggggtagctacaggatccatcagcccaatgtccttgaagattccatcaaagagttattgtcatggctttcccgaggattgatcactattcacatctctcatacctatagcctctcccaggccaatcttgcattcggggacctcaaagacaggaaggcaattggaaaagtgatgattgctctcgaccacaagactgccctgtcttcaaaactatagactctttatggccgtaggagaaaacagcttatgtattctagaaataaggttattgcaatggccatgtaagctgaaccatcttgcatttatatctggcatataatcgacattctgatttgaaatttcaataaacgtt

SEQ ID NO: 2078 - protein, 348 aa, Arabidopsis thaliana
MEALVCRKLGDPTATNPGSPESPVEVSKTHPIPSLNSDTSVRVRVIATSLNYANYLQILGKYQEKPPLPFIPGSDYSGIVDAIGPAVTKFRVGDRVCSFADLGSFAQFIVADQSRLFLVPERCDMVAAAALPVAFGTSHVALVHRARLTSGQVLLVLGAAGGVGLAAVQIGKVCGAIVIAVARGTEKIQLLKSMGVDHVVDLGTENVISSVKEFIKTRKLKGVDVLYDPVGGKLTKESMKVLKWGAQILVIGFASGEIPVIPANIALVKNWTVHGLYWGSYRIHQPNVLEDSIKELLSWLSRGLITIHISHTYSLSQANLAFGDLKDRKAIGKVMIALDHKTALSSKL

SEQ ID NO: 2079 - protein, 224 aa, Arabidopsis thaliana
MVAAAALPVAFGTSHVALVHRARLTSGQVLLVLGAAGGVGLAAVQIGKVCGAIVIAVARGTEKIQLLKSMGVDHVVDLGTENVISSVKEFIKTRKLKGVDVLYDPVGGKLTKESMKVLKWGAQILVIGFASGEIPVIPANIALVKNWTVHGLYWGSYRIHQPNVLEDSIKELLSWLSRGLITIHISHTYSLSQANLAFGDLKDRKAIGKVMIALDHKTALSSKL

SEQ ID NO: 2080 - DNA, 1444 bp, Arabidopsis thaliana
aaaacttctctctatctctcttttctctgttccggatttgctctgtttttctctctgttccggatttgctctgtttcactctgttcttgatttgttctgtttccctctgttttcttgggtttattctgtctctgtcttatctttttcttctagaaaagaacaatcaaatggaatctactgaactacacgacatagatttcatttcaaatcccttcacctccttttctgaaccaactttcttcactccaaccacaagctctctcagacccgacttcgtatccgacgaaccggattcaccaaaggcaaaaaacgaagacgaagaagacgagtacatcaccgagttgactcgccagatgactaactatatgcttcaagacgatgaaaagcatcaaaagtcttgtggtagtggctctggctcgccgcaatcgactctctggtcaccatttgcttcaggattaagcagtccaataggcccttcccgtgaaccatcgccgccactaactccggcaacggtaccggtggagaaaatcatgacaaagattgatacaaaaccagtaacgatcccttttcaatcaaaacaagctctaatcgatgaccagatccgatccattcaagcaaacttccagaagattaaaaaggagaaagagaaagagaggcaacgcaacgctgacgttttggggcacaaagcaagaaactaccacaacctccaccagaaccagagacctaggtcaggcgttaaggcggtgttcgttgacgggtcaggttcaagaaccgggtcgggtggtaccggagtgttcttaccacgaggtcatggtaccgtgttggagtcacgcaagaaatcaggatgttcaacagtaataataccagcaagagtagttgaagccttgaaagttcactttgacaaattgggtgttccttctacattctcttctgatatccctccttttcatgatgcattgttggtgtccatgaacaacaaaaagatcaaaagtaacaaaaatacttcattatctcgggtacaaagtggatcaccgtacgaaatggggatgtcggcagagagccaccaagaaccaccggcggatttgccacaggaatggacgtactgataaaacattggcacatgctcctggttgctgcagttataggttttcaaaaggtagggacttttcggattgaatatcttctagtgggtcaaaataaaaataaaatgctttcaaaaaccattattttttaattggaaatacatagattttaaaatttggtgatttttttcttttattattgtgataaaatcaataattcctgtgataaaagaacaataaaatgttcatatatcccatgcctattgtatgtaataaggggttggttgtttttatgtaagattccttgtaataaaagcattatgcatctcgccagtgtaataaaaagcctttatttgattgtt

SEQ ID NO: 2081 - protein, 367 aa, Arabidopsis thaliana
NFSLSLFSLFRICSVFLSVPDLLCFTLFLICSVSLCFLGFILSLSYLFLLEKNNQMESTELHDIDFISNPFTSFSEPTFFTPTTSSLRPDFVSDEPDSPKAKNEDEEDEYITELTRQMTNYMLQDDEKHQKSCGSGSGSPQSTLWSPFASGLSSPIGPSREPSPPLTPATVPVEKIMTKIDTKPVTIPFQSKQALIDDQIRSIQANFQKIKKEKEKERQRNADVLGHKARNYHNLHQNQRPRSGVKAVFVDGSGSRTGSGGTGVFLPRGHGTVLESRKKSGCSTVIIPARVVEALKVHFDKLGVPSTFSSDIPPFHDALLVSMNNKKIKSNKNTSLSRVQSGSPYEMGMSAESHQEPPADLPQEWTY

SEQ ID NO: 2082 - protein, 312 aa, Arabidopsis thaliana
MESTELHDIDFISNPFTSFSEPTFFTPTTSSLRPDFVSDEPDSPKAKNEDEEDEYITELTRQMTNYMLQDDEKHQKSCGSGSGSPQSTLWSPFASGLSSPIGPSREPSPPLTPATVPVEKIMTKIDTKPVTIPFQSKQALIDDQIRSIQANFQKIKKEKEKERQRNADVLGHKARNYHNLHQNQRPRSGVKAVFVDGSGSRTGSGGTGVFLPRGHGTVLESRKKSGCSTVIIPARVVEALKVHFDKLGVPSTFSSDIPPFHDALLVSMNNKKIKSNKNTSLSRVQSGSPYEMGMSAESHQEPPADLPQEWTY

SEQ ID NO: 2083 - protein, 250 aa, Arabidopsis thaliana
MTNYMLQDDEKHQKSCGSGSGSPQSTLWSPFASGLSSPIGPSREPSPPLTPATVPVEKIMTKIDTKPVTIPFQSKQALIDDQIRSIQANFQKIKKEKEKERQRNADVLGHKARNYHNLHQNQRPRSGVKAVFVDGSGSRTGSGGTGVFLPRGHGTVLESRKKSGCSTVIIPARVVEALKVHFDKLGVPSTFSSDIPPFHDALLVSMNNKKIKSNKNTSLSRVQSGSPYEMGMSAESHQEPPADLPQEWTY

SEQ ID NO: 2084 - DNA, 1862 bp, Arabidopsis thaliana
atggattttaatgaattgtatcctatactaagaatttcattgaaatttctctctcgggggataaaaaaaaaatattgggttgataaaaagattctcggaatttttaatgaaagtcaaaaaggatttgtctttgcttcgacgattgtattttaccgctaccgcattaaatctggtcaaaacgccattctcgtttcttccttcaagcttaagcttaaaacgaaaccagaaatcacgagaagcatcgttgtttctcacctctacagttacggcgcgaatatgacgagactacccctcttcgtcgtcctcctcctcttctccgcaagttgcatcactcgcacggcggcggagatcaaatctctcacaatctccgacgattctaggccgatgattctcttcgaaaagttcggattcactcagtccggccatgttagcgtctctatttcctctgtagcagtagtatcttcttcgtctgatccgatcccggatccatcgaggttagggttcttccttatgtcagaggaatcgcttctccaggtagtcttagagatcgagcaaaaccccaacttctgtgtactcgattccaattacgtcctccatctcttcacatttcacgatctctctcctccccctggttccaaatacgagcacttgtatccggtgatgtctccgaacgaatactctctcttcttcgtgaattgcgtaccggaaaccaaaatttcgatgaaggttcgaacggagatgtacaatttagatccgaacgggtctaaggattaccttcctgccgggtcaacccgattacccggattgtatttcttcttctccctcggttacttagctttccttggtctctggggatatgcttgttgggtcaataaacgtgttgttcataggatccatgttcttatggcggctctgcttttaatgaaggctttgaatctgatctgcgccgccgaggataagcattacgtgaaagtcaccggtactcctcatggctgggatgttttattctacattttccagtttattcgtgttgttcttctcttcactgtgattgtgttgattggaactggctggtccttcttgaagccattcttacaagagaaagagaagaatgtgttgatggttgttgttccacttcaggttctcgctaacattgcttccattgtgattggagagactggaccttttatcaaagattgggttacttggaatcagatattcttgcttgtagatatagtttgctgttgtgcgatcttattccctattgtttggtcgatacgttcgctaagagagacttcgaaaaccgatgggaaagcggctaggaacttggcgaaattgactctgtttagacaattctacattgttgtcatcgggtatttgtactttacgaggattgtagtgtttgcgctgaagacaatcgcagcttataagtatcggtgggtgagcaatgcagctgaggagattgcaagtctggcgttttacatgttgatgttctatatgttcaggcctgtcgagaagaatgagtatttcgttatagatgaagaagaagaagaagccgccgagctggccttgaaggaggatgattttgaactctgaagcagatcaaggaatttcatcgactgtataagctgtgaggacatctgctttttcttatcttcttttatttgatttttgattttctgtacttcagatgtagtttacttgcaaaagggattaactgtgtatttttctcttatatcataaaagctggtttgtcctaagactaatctgctagtaagaagaggatcagagcctctgctgtttgacccgactccctagttttatattaagactataagccaatgaacttgtgtttattcttc

SEQ ID NO: 2085 - protein, 531 aa, Arabidopsis thaliana
MDFNELYPILRISLKFLSRGIKKKYWVDKKILGIFNESQKGFVFASTIVFYRYRIKSGQNAILVSSFKLKLKTKPEITRSIVVSHLYSYGANMTRLPLFVVLLLFSASCITRTAAEIKSLTISDDSRPMILFEKFGFTQSGHVSVSISSVAVVSSSSDPIPDPSRLGFFLMSEESLLQVVLEIEQNPNFCVLDSNYVLHLFTFHDLSPPPGSKYEHLYPVMSPNEYSLFFVNCVPETKISMKVRTEMYNLDPNGSKDYLPAGSTRLPGLYFFFSLGYLAFLGLWGYACWVNKRVVHRIHVLMAALLLMKALNLICAAEDKHYVKVTGTPHGWDVLFYIFQFIRVVLLFTVIVLIGTGWSFLKPFLQEKEKNVLMVVVPLQVLANIASIVIGETGPFIKDWVTWNQIFLLVDIVCCCAILFPIVWSIRSLRETSKTDGKAARNLAKLTLFRQFYIVVIGYLYFTRIVVFALKTIAAYKYRWVSNAAEEIASLAFYMLMFYMFRPVEKNEYFVIDEEEEEAAELALKEDDFEL

SEQ ID NO: 2086 - protein, 439 aa, Arabidopsis thaliana
MTRLPLFVVLLLFSASCITRTAAEIKSLTISDDSRPMILFEKFGFTQSGHVSVSISSVAVVSSSSDPIPDPSRLGFFLMSEESLLQVVLEIEQNPNFCVLDSNYVLHLFTFHDLSPPPGSKYEHLYPVMSPNEYSLFFVNCVPETKISMKVRTEMYNLDPNGSKDYLPAGSTRLPGLYFFFSLGYLAFLGLWGYACWVNKRVVHRIHVLMAALLLMKALNLICAAEDKHYVKVTGTPHGWDVLFYIFQFIRVVLLFTVIVLIGTGWSFLKPFLQEKEKNVLMVVVPLQVLANIASIVIGETGPFIKDWVTWNQIFLLVDIVCCCAILFPIVWSIRSLRETSKTDGKAARNLAKLTLFRQFYIVVIGYLYFTRIVVFALKTIAAYKYRWVSNAAEEIASLAFYMLMFYMFRPVEKNEYFVIDEEEEEAAELALKEDDFEL

SEQ ID NO: 2087 - protein, 403 aa, Arabidopsis thaliana
MILFEKFGFTQSGHVSVSISSVAVVSSSSDPIPDPSRLGFFLMSEESLLQVVLEIEQNPNFCVLDSNYVLHLFTFHDLSPPPGSKYEHLYPVMSPNEYSLFFVNCVPETKISMKVRTEMYNLDPNGSKDYLPAGSTRLPGLYFFFSLGYLAFLGLWGYACWVNKRVVHRIHVLMAALLLMKALNLICAAEDKHYVKVTGTPHGWDVLFYIFQFIRVVLLFTVIVLIGTGWSFLKPFLQEKEKNVLMVVVPLQVLANIASIVIGETGPFIKDWVTWNQIFLLVDIVCCCAILFPIVWSIRSLRETSKTDGKAARNLAKLTLFRQFYIVVIGYLYFTRIVVFALKTIAAYKYRWVSNAAEEIASLAFYMLMFYMFRPVEKNEYFVIDEEEEEAAELALKEDDFEL

SEQ ID NO: 2088 - DNA, 4746 bp, Arabidopsis thaliana
cttttctctctctatctctatctctcgtagcttgataagagtttctctcttttgaagatccgtttctctctctctcactgagactattgttgttaggtcaacttgcgatcatggcgatttcgaaggtctgaagctgatttcgaatggtttggagatatccgtagtggttaagcatatggaagtctatgttctgctcttggttgctctgttagggcttcctccatttggaccaacttagctgaatgttgtatgatctctctccttgaagcagcaaataagaagaaggtctggtccttaacttaacatctggttactagaggaaacttcagctattattaggtaaagaaagactgtacagagttgtataacaagtaagcgttagagtggctttgtttgcctcggtgatagaagaaccgactgattcgttgttgtgtgttagctttggagggaatcagatttcgcgagggaaggtgttttagatcaaatctgtgaattttactcaactgaggcttttagtgaaccacgactgtagagttgaccttgaatcctactctgagtaattatattatcagatagatttaggatggaagctgaaattgtgaatgtgagacctcagctagggtttatccagagaatggttcctgctctacttcctgtccttttggtttctgtcggatatattgatcccgggaaatgggttgcaaatatcgaaggaggtgctcgtttcgggtatgacttggtggcaattactctgcttttcaattttgccgccatcttatgccaatatgttgcagctcgcataagcgttgtgactggtaaacacttggctcagatctgcaatgaagaatatgacaagtggacgtgcatgttcttgggcattcaggcggagttctcagcaattctgctcgaccttaccatggttgtgggagttgcgcatgcacttaaccttttgtttggggtggagttatccactggagtgtttttggccgccatggatgcgtttttatttcctgttttcgcctctttccttgaaaatggtatggcaaatacagtatccatttactctgcaggcctggtattacttctctatgtatctggcgtcttgctgagtcagtctgagatcccactctctatgaatggagtgttaactcggttaaatggagagagcgcattcgcactgatgggtcttcttggcgcaagcatcgtccctcacaatttttatatccattcttattttgctggggaaagtacatcttcgtctgatgtcgacaagagcagcttgtgtcaagaccatttgttcgccatctttggtgtcttcagcggactgtcacttgtaaattatgtattgatgaatgcagcagctaatgtgtttcacagtactggccttgtggtactgacttttcacgatgccttgtcactaatggagcaggtatttatgagtccgctcattccagtggtctttttgatgctcttgttcttctctagtcaaattaccgcactagcttgggctttcggtggagaggtcgtcctgcatgacttcctgaagatagaaatacccgcttggcttcatcgtgctacaatcagaattcttgcagttgctcctgcgctttattgtgtatggacatctggtgcagacggaatataccagttacttatattcacccaggtcttggtggcaatgatgcttccttgctcggtaataccgcttttccgcattgcttcgtcgagacaaatcatgggtgtccataaaatccctcaggttggcgagttcctcgcacttacaacgtttttgggatttctggggttgaatgttgtttttgttgttgagatggtatttgggagcagtgactgggctggtggtttgagatggaataccgtgatgggcacctcgattcagtacaccactctgcttgtatcgtcatgtgcatccttatgcctgatactctggctggcagccacgccgctgaaatctgcgagtaacagagcggaagctcaaatatggaacatggatgctcaaaatgctttatcttatccatctgttcaagaagaggaaattgaaagaacagaaacaaggaggaacgaagacgaatcaatagtgcggttggaaagcagggtaaaggatcagttggatactacgtctgttactagctcggtctatgatttgccagagaacattctaatgacggatcaagaaatccgttcgagccctccagaggaaagagagttggatgtaaagtactctacctctcaagttagtagtcttaaggaagactctgatgtaaaggaacagtctgtattgcagtcaacagtggttaatgaggtcagtgataaggatctgattgttgaaacaaagatggcgaaaattgaaccaatgagtcctgtggagaagattgttagcatggagaataacagcaagtttattgaaaaggatgttgaaggggtttcatgggaaacagaagaagctaccaaagctgctcctacaagcaactttactgtcggatctgatggtcctccttcattccgcagcttaagtggggaagggggaagtgggactggaagcctttcacggttgcaaggtttgggacgtgctgcccggagacacttatctgcgatccttgatgaattttggggacatttatatgattttcatgggcaattggttgctgaagccagggcaaagaaactagatcagctgtttggcactgatcaaaagtcagcctcttctatgaaagcagattcgtttggaaaagacattagcagtggatattgcatgtcaccaactgcgaagggaatggattcacagatgacttcaagtttatatgattcactgaagcagcagaggacaccgggaagtatcgattcgttgtatggattacaaagaggttcgtcaccgtcaccgttggtcaaccgtatgcagatgttgggtgcatatggtaacaccactaataataataatgcttacgaattgagtgagagaagatactctagcctgcgtgctccatcatcttcagagggttgggaacaccaacaaccagctacagttcacggataccagatgaagtcatatgtagacaatttggcaaaagaaaggcttgaagccttacaatcccgtggagagatcccgacatcgagatctatggcgcttggtacattgagctatacacagcaacttgctttagccttgaaacagaagtcccagaatggtctaacccctggaccagctcctgggtttgagaattttgctgggtctagaagcatatcgcgacaatctgaaagatcttattacggtgttccatcttctggcaatactgatactgttggcgcagcagtagccaatgagaaaaaatatagtagcatgccagatatctcaggattgtctatgtccgcaaggaacatgcatttaccaaacaacaagagtggatactgggatccgtcaagtggaggaggagggtatggtgcgtcttatggtcggttaagcaatgaatcatcgttatattctaatttggggtcacgggtgggagtaccctcgacttatgatgacatttctcaatcaagaggaggctacagagatgcctacagtttgccacagagtgcaacaacagggaccggatcgctttggtccagacagccctttgagcagtttggtgtagcggagaggaatggtgctgttggtgaggagctcaggaatagatcgaatccgatcaatatagacaacaacgcttcttctaatgttgatgcagaggctaagcttcttcagtcgttcaggcactgtattctaaagcttattaaacttgaaggatccgagtggttgtttggacaaagcgatggagttgatgaagaactgattgaccgggtagctgcacgagagaagtttatctatgaagctgaagctcgagaaataaaccaggtgggtcacatgggggagccactaatttcatcggttcctaactgtggagatggttgcgtttggagagctgatttgattgtgagctttggagtttggtgcattcaccgtgtccttgacttgtctctcatggagagtcggcctgagctttggggaaagtacacttacgttctcaaccgcctacagggagtgattgatccggcgttctcaaagctgcggacaccaatgacaccgtgcttttgccttcagattccagcgagccaccagagagcgagtccgacttcagctaacggaatgttacctccggctgcaaaaccggctaaaggcaaatgcacaaccgcagtcacacttcttgatctaatcaaagacgttgaaatggcaatctcttgtagaaaaggccgaaccggtacagctgcaggtgatgtggctttcccaaaggggaaagagaatttggcttcggttttgaagcggtataaacgtcggttatcgaataaaccagtaggtatgaatcaggatggacccggttcaagaaaaaacgtgactgcgtacggatcattgggttgaagaagaagaacattgtgagaaatctcatgatcaaagtgacgtcgagagggaagccgaagaatcaaaactctcgcttttgattgctcctctgcttcgttaattgtgtattaagaaaagaagaaaaaaaatggatttttgttgcttcagaatttttcgctctttttttcttaatttggttgtaatgttatgtttatatacatatatcatcatcataggaccatagctacaaaccgaatccggtttgtgtaattctatgcggaatcataaagaaatcgtcg

SEQ ID NO: 2089 - protein, 1294 aa, Arabidopsis thaliana
MEAEIVNVRPQLGFIQRMVPALLPVLLVSVGYIDPGKWVANIEGGARFGYDLVAITLLFNFAAILCQYVAARISVVTGKHLAQICNEEYDKWTCMFLGIQAEFSAILLDLTMVVGVAHALNLLFGVELSTGVFLAAMDAFLFPVFASFLENGMANTVSIYSAGLVLLLYVSGVLLSQSEIPLSMNGVLTRLNGESAFALMGLLGASIVPHNFYIHSYFAGESTSSSDVDKSSLCQDHLFAIFGVFSGLSLVNYVLMNAAANVFHSTGLVVLTFHDALSLMEQVFMSPLIPVVFLMLLFFSSQITALAWAFGGEVVLHDFLKIEIPAWLHRATIRILAVAPALYCVWTSGADGIYQLLIFTQVLVAMMLPCSVIPLFRIASSRQIMGVHKIPQVGEFLALTTFLGFLGLNVVFVVEMVFGSSDWAGGLRWNTVMGTSIQYTTLLVSSCASLCLILWLAATPLKSASNRAEAQIWNMDAQNALSYPSVQEEEIERTETRRNEDESIVRLESRVKDQLDTTSVTSSVYDLPENILMTDQEIRSSPPEERELDVKYSTSQVSSLKEDSDVKEQSVLQSTVVNEVSDKDLIVETKMAKIEPMSPVEKIVSMENNSKFIEKDVEGVSWETEEATKAAPTSNFTVGSDGPPSFRSLSGEGGSGTGSLSRLQGLGRAARRHLSAILDEFWGHLYDFHGQLVAEARAKKLDQLFGTDQKSASSMKADSFGKDISSGYCMSPTAKGMDSQMTSSLYDSLKQQRTPGSIDSLYGLQRGSSPSPLVNRMQMLGAYGNTTNNNNAYELSERRYSSLRAPSSSEGWEHQQPATVHGYQMKSYVDNLAKERLEALQSRGEIPTSRSMALGTLSYTQQLALALKQKSQNGLTPGPAPGFENFAGSRSISRQSERSYYGVPSSGNTDTVGAAVANEKKYSSMPDISGLSMSARNMHLPNNKSGYWDPSSGGGGYGASYGRLSNESSLYSNLGSRVGVPSTYDDISQSRGGYRDAYSLPQSATTGTGSLWSRQPFEQFGVAERNGAVGEELRNRSNPINIDNNASSNVDAEAKLLQSFRHCILKLIKLEGSEWLFGQSDGVDEELIDRVAAREKFIYEAEAREINQVGHMGEPLISSVPNCGDGCVWRADLIVSFGVWCIHRVLDLSLMESRPELWGKYTYVLNRLQGVIDPAFSKLRTPMTPCFCLQIPASHQRASPTSANGMLPPAAKPAKGKCTTAVTLLDLIKDVEMAISCRKGRTGTAAGDVAFPKGKENLASVLKRYKRRLSNKPVGMNQDGPGSRKNVTAYGSLG

SEQ ID NO: 2090 - protein, 1277 aa, Arabidopsis thaliana
MVPALLPVLLVSVGYIDPGKWVANIEGGARFGYDLVAITLLFNFAAILCQYVAARISVVTGKHLAQICNEEYDKWTCMFLGIQAEFSAILLDLTMVVGVAHALNLLFGVELSTGVFLAAMDAFLFPVFASFLENGMANTVSIYSAGLVLLLYVSGVLLSQSEIPLSMNGVLTRLNGESAFALMGLLGASIVPHNFYIHSYFAGESTSSSDVDKSSLCQDHLFAIFGVFSGLSLVNYVLMNAAANVFHSTGLVVLTFHDALSLMEQVFMSPLIPVVFLMLLFFSSQITALAWAFGGEVVLHDFLKIEIPAWLHRATIRILAVAPALYCVWTSGADGIYQLLIFTQVLVAMMLPCSVIPLFRIASSRQIMGVHKIPQVGEFLALTTFLGFLGLNVVFVVEMVFGSSDWAGGLRWNTVMGTSIQYTTLLVSSCASLCLILWLAATPLKSASNRAEAQIWNMDAQNALSYPSVQEEEIERTETRRNEDESIVRLESRVKDQLDTTSVTSSVYDLPENILMTDQEIRSSPPEERELDVKYSTSQVSSLKEDSDVKEQSVLQSTVVNEVSDKDLIVETKMAKIEPMSPVEKIVSMENNSKFIEKDVEGVSWETEEATKAAPTSNFTVGSDGPPSFRSLSGEGGSGTGSLSRLQGLGRAARRHLSAILDEFWGHLYDFHGQLVAEARAKKLDQLFGTDQKSASSMKADSFGKDISSGYCMSPTAKGMDSQMTSSLYDSLKQQRTPGSIDSLYGLQRGSSPSPLVNRMQMLGAYGNTTNNNNAYELSERRYSSLRAPSSSEGWEHQQPATVHGYQMKSYVDNLAKERLEALQSRGEIPTSRSMALGTLSYTQQLALALKQKSQNGLTPGPAPGFENFAGSRSISRQSERSYYGVPSSGNTDTVGAAVANEKKYSSMPDISGLSMSARNMHLPNNKSGYWDPSSGGGGYGASYGRLSNESSLYSNLGSRVGVPSTYDDISQSRGGYRDAYSLPQSATTGTGSLWSRQPFEQFGVAERNGAVGEELRNRSNPINIDNNASSNVDAEAKLLQSFRHCILKLIKLEGSEWLFGQSDGVDEELIDRVAAREKFIYEAEAREINQVGHMGEPLISSVPNCGDGCVWRADLIVSFGVWCIHRVLDLSLMESRPELWGKYTYVLNRLQGVIDPAFSKLRTPMTPCFCLQIPASHQRASPTSANGMLPPAAKPAKGKCTTAVTLLDLIKDVEMAISCRKGRTGTAAGDVAFPKGKENLASVLKRYKRRLSNKPVGMNQDGPGSRKNVTAYGSLG

SEQ ID NO: 2091 - protein, 1200 aa, Arabidopsis thaliana
MFLGIQAEFSAILLDLTMVVGVAHALNLLFGVELSTGVFLAAMDAFLFPVFASFLENGMANTVSIYSAGLVLLLYVSGVLLSQSEIPLSMNGVLTRLNGESAFALMGLLGASIVPHNFYIHSYFAGESTSSSDVDKSSLCQDHLFAIFGVFSGLSLVNYVLMNAAANVFHSTGLVVLTFHDALSLMEQVFMSPLIPVVFLMLLFFSSQITALAWAFGGEVVLHDFLKIEIPAWLHRATIRILAVAPALYCVWTSGADGIYQLLIFTQVLVAMMLPCSVIPLFRIASSRQIMGVHKIPQVGEFLALTTFLGFLGLNVVFVVEMVFGSSDWAGGLRWNTVMGTSIQYTTLLVSSCASLCLILWLAATPLKSASNRAEAQIWNMDAQNALSYPSVQEEEIERTETRRNEDESIVRLESRVKDQLDTTSVTSSVYDLPENILMTDQEIRSSPPEERELDVKYSTSQVSSLKEDSDVKEQSVLQSTVVNEVSDKDLIVETKMAKIEPMSPVEKIVSMENNSKFIEKDVEGVSWETEEATKAAPTSNFTVGSDGPPSFRSLSGEGGSGTGSLSRLQGLGRAARRHLSAILDEFWGHLYDFHGQLVAEARAKKLDQLFGTDQKSASSMKADSFGKDISSGYCMSPTAKGMDSQMTSSLYDSLKQQRTPGSIDSLYGLQRGSSPSPLVNRMQMLGAYGNTTNNNNAYELSERRYSSLRAPSSSEGWEHQQPATVHGYQMKSYVDNLAKERLEALQSRGEIPTSRSMALGTLSYTQQLALALKQKSQNGLTPGPAPGFENFAGSRSISRQSERSYYGVPSSGNTDTVGAAVANEKKYSSMPDISGLSMSARNMHLPNNKSGYWDPSSGGGGYGASYGRLSNESSLYSNLGSRVGVPSTYDDISQSRGGYRDAYSLPQSATTGTGSLWSRQPFEQFGVAERNGAVGEELRNRSNPINIDNNASSNVDAEAKLLQSFRHCILKLIKLEGSEWLFGQSDGVDEELIDRVAAREKFIYEAEAREINQVGHMGEPLISSVPNCGDGCVWRADLIVSFGVWCIHRVLDLSLMESRPELWGKYTYVLNRLQGVIDPAFSKLRTPMTPCFCLQIPASHQRASPTSANGMLPPAAKPAKGKCTTAVTLLDLIKDVEMAISCRKGRTGTAAGDVAFPKGKENLASVLKRYKRRLSNKPVGMNQDGPGSRKNVTAYGSLG

SEQ ID NO: 2092 - DNA, 1659 bp, Arabidopsis thaliana
aaagcataggaggaacaacacaaacatgggttcaagtacaacaacacgacgaatcacttaagctcaacacgacaacacctttgactctatctttctcatctccaaataaaaaccaaactaaaccatcacagaagctgaaaaagttcaaaactttaaggtacaagatgggaattttgtcggacgacgtagtgataatcagtcaatcggagaaagaaggtgacccgagtgttataaccatcaattgtcctgacaaaactggtctgggttgtgatctctgtcgtatcctcctcttcttcggcctcaacattgtcagaggagatgtctcaactgatggaaaatggtgctacttggtcttctgggtgattgggaaaccaaacacgagatggaatctgttgaagatgagacttgtagaggcaagtccttctttttcttgggcctttggtatctcaagatgttacctttctgattctgagtctcagcctcccaagcttcctgatcttttcttattgaagctagcttgttctgaccgcacagggcttctttatgatgtcacagaggttctttacaagcttgagattaacattgagaaagttaagatatcgactacccctgatggaaaagtgatggacttgttctttgtcacagacactagagagcttttagggacggttaagaggcggaatgaagtgtatgagtacctgagagatgctataggagattcaatgatcagctatgacattgaacttgttggccctgaaatcacagcttgctcaacttcctcgtcggttgcagaaacattgttctcctcggatgtgtcgggagagcattcgagtgggttacacacttcaagcaatgtttctattgcagttgacaactcgctaagctcagctcacaccctcattcatatcacttgtcaagatcacaaaggtcttctctatgatattatgaggaccttcaaggatttcaacattcagatctcatatgggcgttttacaatcaaactaggaaagaactgtgagatcgacttgttcatagtgcaatctgatggccgaaagatccttgactcgagcaagctaaatgcattgattactcgtttaagagcagagctacagcaacctctgagagtggtaatgatgaatcgaggtccagatactgaacttctagtcacaaacccagttgagttatcaggaaagggacggccacaagtcttccacgacatagcacttgccctcaagaagatcgatacctgcatcttctcggctgaaattggaagacacgtgactggagacagagaatgggaggtgtacaaagtgttgatcaacgaagaagacagcttaccaatcccgagaagcaagatagaggaagaagtatggaaaactttgatgggctgggaatgaaaatctttcagagtataggaccattagctaacctcagactcatcgaaagagtatggctataagatttgtcactttatgatgcaatgagtgtatgtagattaatatgatacgaggagatatatctgataagccacagtgtgtatatatggtttgagtctttctttttgtgttgatgagaaattgtaagtagagaaaagcagaacgttggaatgttgtaaatgagtactgtgtgggtttcatagtaagaagctaaagtttttcc

SEQ ID NO: 2093 - protein, 464 aa, Arabidopsis thaliana
SIGGTTQTWVQVQQHDESLKLNTTTPLTLSFSSPNKNQTKPSQKLKKFKTLRYKMGILSDDVVIISQSEKEGDPSVITINCPDKTGLGCDLCRILLFFGLNIVRGDVSTDGKWCYLVFWVIGKPNTRWNLLKMRLVEASPSFSWAFGISRCYLSDSESQPPKLPDLFLLKLACSDRTGLLYDVTEVLYKLEINIEKVKISTTPDGKVMDLFFVTDTRELLGTVKRRNEVYEYLRDAIGDSMISYDIELVGPEITACSTSSSVAETLFSSDVSGEHSSGLHTSSNVSIAVDNSLSSAHTLIHITCQDHKGLLYDIMRTFKDFNIQISYGRFTIKLGKNCEIDLFIVQSDGRKILDSSKLNALITRLRAELQQPLRVVMMNRGPDTELLVTNPVELSGKGRPQVFHDIALALKKIDTCIFSAEIGRHVTGDREWEVYKVLINEEDSLPIPRSKIEEEVWKTLMGWE

SEQ ID NO: 2094 - protein, 410 aa, Arabidopsis thaliana
MGILSDDVVIISQSEKEGDPSVITINCPDKTGLGCDLCRILLFFGLNIVRGDVSTDGKWCYLVFWVIGKPNTRWNLLKMRLVEASPSFSWAFGISRCYLSDSESQPPKLPDLFLLKLACSDRTGLLYDVTEVLYKLEINIEKVKISTTPDGKVMDLFFVTDTRELLGTVKRRNEVYEYLRDAIGDSMISYDIELVGPEITACSTSSSVAETLFSSDVSGEHSSGLHTSSNVSIAVDNSLSSAHTLIHITCQDHKGLLYDIMRTFKDFNIQISYGRFTIKLGKNCEIDLFIVQSDGRKILDSSKLNALITRLRAELQQPLRVVMMNRGPDTELLVTNPVELSGKGRPQVFHDIALALKKIDTCIFSAEIGRHVTGDREWEVYKVLINEEDSLPIPRSKIEEEVWKTLMGWE

SEQ ID NO: 2095 - protein, 332 aa, Arabidopsis thaliana
MRLVEASPSFSWAFGISRCYLSDSESQPPKLPDLFLLKLACSDRTGLLYDVTEVLYKLEINIEKVKISTTPDGKVMDLFFVTDTRELLGTVKRRNEVYEYLRDAIGDSMISYDIELVGPEITACSTSSSVAETLFSSDVSGEHSSGLHTSSNVSIAVDNSLSSAHTLIHITCQDHKGLLYDIMRTFKDFNIQISYGRFTIKLGKNCEIDLFIVQSDGRKILDSSKLNALITRLRAELQQPLRVVMMNRGPDTELLVTNPVELSGKGRPQVFHDIALALKKIDTCIFSAEIGRHVTGDREWEVYKVLINEEDSLPIPRSKIEEEVWKTLMGWE

SEQ ID NO: 2096 - DNA, 1279 bp, Arabidopsis thaliana
gttttggtgtttcttcgtcgacgtcgctatctccaatctcattactcccctttctcaatgatcataaaacctacttcgattctactccttatcaactgaatcaccgaaaaacctcaccttttttctttttccgatcatggggaatctgatcagtttgatcttctgctgcgggagaaggcagaggagcaatattcctccggcgatggaaacggctcctcttgatctcccaccgaacagatttgtattcgccgccgtgccaccatatctgaaccctaaccctaactacgttgaccagtatccaggtaactgccttcctccgccagtaactgagccgccgatgctaccgtacaatttcaaccatttgcatcactatcctcccaacagttaccaactacctcatcctttgtttcacggcggtagataccctatactgccgcctcctacgtacgtcgaccagaaagccgtcacgattcgtaacgatgttaatctgaagaagaagactttaacgctcatacccgacccggagaatccgaatcgacttcttgtctccttcacatttgatgcatccatgcccggaaggatcacagttgttttctttgctacagaagatgcagaatgtaatcttagagctacaaaggaagatactttgcctccaatcacttttgatttcggagaaggacttggtcagaagttcatacaatcatctggaacgggtatagacttgacggcgtttaaagattccgagctattcaaggaggtggatacagatgtcttcccgttggcggttaaggcggaggcaactccagcggaagaaggaaagtctggttccaccaatgtgcagattactcaagtggtgtataccaaggagaaaggagagattaaaatagaagtggtgaagcagatactatgggtgaataagaggaggtatgagctgcttgagatttatgggattgagaacacggttgatggttccgatgagggaaaggaatgtgttgtatgcttgtctgaaccacgcgatacaactgttcttccttgcagacacatgtgtatgtgtagcgggtgcgcaaaggcgttaaggtttcagacaaatctgtgcccagtttgcagacaacctgttgagatgcttttggagattaacaagaacggatgaaatggagatggagaatgaacaaatttagttaagcaatcgacttgtgtaatatatgccatgcttaattaagacgtaaaacgttatggttcaatatattataagtggaaactgagttcttaaatagcaatg

SEQ ID NO: 2097 - protein, 337 aa, Arabidopsis thaliana
MGNLISLIFCCGRRQRSNIPPAMETAPLDLPPNRFVFAAVPPYLNPNPNYVDQYPGNCLPPPVTEPPMLPYNFNHLHHYPPNSYQLPHPLFHGGRYPILPPPTYVDQKAVTIRNDVNLKKKTLTLIPDPENPNRLLVSFTFDASMPGRITVVFFATEDAECNLRATKEDTLPPITFDFGEGLGQKFIQSSGTGIDLTAFKDSELFKEVDTDVFPLAVKAEATPAEEGKSGSTNVQITQVVYTKEKGEIKIEVVKQILWVNKRRYELLEIYGIENTVDGSDEGKECVVCLSEPRDTTVLPCRHMCMCSGCAKALRFQTNLCPVCRQPVEMLLEINKNG

SEQ ID NO: 2098 - protein, 315 aa, Arabidopsis thaliana
METAPLDLPPNRFVFAAVPPYLNPNPNYVDQYPGNCLPPPVTEPPMLPYNFNHLHHYPPNSYQLPHPLFHGGRYPILPPPTYVDQKAVTIRNDVNLKKKTLTLIPDPENPNRLLVSFTFDASMPGRITVVFFATEDAECNLRATKEDTLPPITFDFGEGLGQKFIQSSGTGIDLTAFKDSELFKEVDTDVFPLAVKAEATPAEEGKSGSTNVQITQVVYTKEKGEIKIEVVKQILWVNKRRYELLEIYGIENTVDGSDEGKECVVCLSEPRDTTVLPCRHMCMCSGCAKALRFQTNLCPVCRQPVEMLLEINKNG

SEQ ID NO: 2099 - protein, 270 aa, Arabidopsis thaliana
MLPYNFNHLHHYPPNSYQLPHPLFHGGRYPILPPPTYVDQKAVTIRNDVNLKKKTLTLIPDPENPNRLLVSFTFDASMPGRITVVFFATEDAECNLRATKEDTLPPITFDFGEGLGQKFIQSSGTGIDLTAFKDSELFKEVDTDVFPLAVKAEATPAEEGKSGSTNVQITQVVYTKEKGEIKIEVVKQILWVNKRRYELLEIYGIENTVDGSDEGKECVVCLSEPRDTTVLPCRHMCMCSGCAKALRFQTNLCPVCRQPVEMLLEINKNG

SEQ ID NO: 2100 - DNA, 1529 bp, Arabidopsis thaliana
aaaataggcctctccaccaaatctctctctctttctctctgtcacactctttatcactctctgctctcacagatcggagaatctcctctgagagctctaatctctcagctttcttcaccggcgtctccggatctaataatcctgtaaggcctctactgcagaaaaaagattgaatttttacaatttggggtgactcaattttgttgactagagtgtttggagatatttctaactaaatgggaacaatgcaccgcagtggtgctcctcgaagaacgaatgaaaatgcaaaggttattattactactattttggggatagtgtttgggacttttattggtatcacattaccttcactttcgtttaagattaacttaccctcgcgccttatatcatctcttgatgtagccatatctggtgacaaatcccctgaagatttcggttcaagaaagtttcctgagatatatgttccaactaacccgcgtggtgcagaactactacctccaggaatcgttgtggcgaaaactgatttttacttgcgtagattatggggagaacctaatgaagatttgaagaagaagccaaaatatcttgtgacatttacagttggatttgagcagaggaaccatattaatggagttgttaagaagttttctgaagatttccaaattttgctcttccattatgatggccggacaactgaatgggaccaatttgagtggtcgaagagcgcgattcatattagtacaagaaagcaaacaaaatggtggtacgcgaagaggtttttgcatcctgatgttgtgtcagcttatgagtacatatttatatgggatgaagatcttggagtggagcatttcaatgcggataagtacattgagttagttaagaagcatggtttagagatttctcaaccaggcttagagcctaacaatggactcacatgggaaatgacaaagaggagaggtgaccgggaagtccataaagatacaaaagagaaaccaggatggtgtaaagacccacatttacctccatgtgccgcgtttgttgaaataatggcgcctgtattttctcgagaagcatggcgatgtgtgtggcatatgattcagaatgatctggttcatggatggggtctcgactttgcgcttagaagatgcgttgaacctgctcatgagaagattggtgttgtggattcgcaatggataatacataaagtgataccttcacttggaagtcaaggaaagacagagaatgggaaagctccatgacaaggagtgagagatagatgcaaaatggaatggacaatgtttcagaaccgattggctgatgctgataaagagtatcttgggaagatggtgaaagattagatttgtttttcttttttctttctatataattaatatattaaaaaaacttttacttttgtatatcaaatattttacactaaattaggttttcataggacatgtgtgaagccctttttattgatattgtgtaagatttatacattttgattgagctttattatgttgttt

SEQ ID NO: 2101 - protein, 341 aa, Arabidopsis thaliana
MGTMHRSGAPRRTNENAKVIITTILGIVFGTFIGITLPSLSFKINLPSRLISSLDVAISGDKSPEDFGSRKFPEIYVPTNPRGAELLPPGIVVAKTDFYLRRLWGEPNEDLKKKPKYLVTFTVGFEQRNHINGVVKKFSEDFQILLFHYDGRTTEWDQFEWSKSAIHISTRKQTKWWYAKRFLHPDVVSAYEYIFIWDEDLGVEHFNADKYIELVKKHGLEISQPGLEPNNGLTWEMTKRRGDREVHKDTKEKPGWCKDPHLPPCAAFVEIMAPVFSREAWRCVWHMIQNDLVHGWGLDFALRRCVEPAHEKIGVVDSQWIIHKVIPSLGSQGKTENGKAP

SEQ ID NO: 2102 - protein, 338 aa, Arabidopsis thaliana
MHRSGAPRRTNENAKVIITTILGIVFGTFIGITLPSLSFKINLPSRLISSLDVAISGDKSPEDFGSRKFPEIYVPTNPRGAELLPPGIVVAKTDFYLRRLWGEPNEDLKKKPKYLVTFTVGFEQRNHINGVVKKFSEDFQILLFHYDGRTTEWDQFEWSKSAIHISTRKQTKWWYAKRFLHPDVVSAYEYIFIWDEDLGVEHFNADKYIELVKKHGLEISQPGLEPNNGLTWEMTKRRGDREVHKDTKEKPGWCKDPHLPPCAAFVEIMAPVFSREAWRCVWHMIQNDLVHGWGLDFALRRCVEPAHEKIGVVDSQWIIHKVIPSLGSQGKTENGKAP

SEQ ID NO: 2103 - DNA, 1464 bp, Arabidopsis thaliana
gttaacgaatctcgtaaaaaaacccaatggcgccttccttatcaccaatcagatcacaccacgtggcagttatcggcgccggagccgccggattagtcgcggcgcgagagcttcgtcgggaaggtcactcggtggtcgtcttcgagagacaaaaacaagtcggaggaacctggatttacaccgatcatattgaacccgatccattaagcgttgacccgacccgatccgttgttcattcgagcgtctatggatctctccgaactaatctcccccgtgagtgtatgggatacagggacttcccgttcgtgattcgttccgatgtatcggaatctagagatccgaggaggtttccgagtcatggtgaagttttggcgtatttgcaagatttcgctaaggagtttgcgattgaggagatgattcggtttgatacggcggttgtgaaggttgctccggcggcggaagaaggaagcgggaaatggagaattgaatctacggagaaagagaagaaagttcttcgtgatgagatttatgatgctgttgttgtttgtaatggacattacattgaacctcgtcacgctgaaattcctggtataagttcttggccagggaaggagatgcatagtcataattatcgtatacctgaaccgtttagagatcaggttgttgtgcttatagggaactctgcaagtgctgatgatataagtagggatattgctagagttgccaaagaggttcatgtggcttgtaggtccaatgctgctgatacgtatattgagcggcctggttacagtaatctatggatgcattcgatgattgagagtgtccatgaggatggttctgtagtttttcagaatgggaaaacgatttcggttgatgttattatgcattgcactgggtataagtatcacttcccgtttcttgaaaccaatggaaatgttactgtagacgataaccgtgtcgggccattgtacaaagacgtattctctccagcctttgcgccgtggctctccttcgttgggataccatggaaggttgtaccttttcctatgtttgaactgcaaagcaagtggatcgctggtgttttgtcgggtcggataccgctgccttcaaaggaagatatgatgatggaaatcaaaaccttatactcaacacttgatgcccaagggattgcaaagcgatatactcaccaaatgggcatttctcaatttgagtacaatagttggttggcttcacaatgcggttgctcagaaacagaggaatggaggaaagagatgtattttgcaacgggcgtgaagaagagagcccatccagagacgtatagagacgaatgggatgatcatcacttagtttctcaagcttatcaagatttctctttgtacacataaacaaaaaaacatatctgagaaagtaaattcaatgttaatgccagtactgccatttattggaaaagacatcattcttacc

SEQ ID NO: 2104 - protein, 452 aa, Arabidopsis thaliana
MAPSLSPIRSHHVAVIGAGAAGLVAARELRREGHSVVVFERQKQVGGTWIYTDHIEPDPLSVDPTRSVVHSSVYGSLRTNLPRECMGYRDFPFVIRSDVSESRDPRRFPSHGEVLAYLQDFAKEFAIEEMIRFDTAVVKVAPAAEEGSGKWRIESTEKEKKVLRDEIYDAVVVCNGHYIEPRHAEIPGISSWPGKEMHSHNYRIPEPFRDQVVVLIGNSASADDISRDIARVAKEVHVACRSNAADTYIERPGYSNLWMHSMIESVHEDGSVVFQNGKTISVDVIMHCTGYKYHFPFLETNGNVTVDDNRVGPLYKDVFSPAFAPWLSFVGIPWKVVPFPMFELQSKWIAGVLSGRIPLPSKEDMMMEIKTLYSTLDAQGIAKRYTHQMGISQFEYNSWLASQCGCSETEEWRKEMYFATGVKKRAHPETYRDEWDDHHLVSQAYQDFSLYT

SEQ ID NO: 2105 - protein, 367 aa, Arabidopsis thaliana
MGYRDFPFVIRSDVSESRDPRRFPSHGEVLAYLQDFAKEFAIEEMIRFDTAVVKVAPAAEEGSGKWRIESTEKEKKVLRDEIYDAVVVCNGHYIEPRHAEIPGISSWPGKEMHSHNYRIPEPFRDQVVVLIGNSASADDISRDIARVAKEVHVACRSNAADTYIERPGYSNLWMHSMIESVHEDGSVVFQNGKTISVDVIMHCTGYKYHFPFLETNGNVTVDDNRVGPLYKDVFSPAFAPWLSFVGIPWKVVPFPMFELQSKWIAGVLSGRIPLPSKEDMMMEIKTLYSTLDAQGIAKRYTHQMGISQFEYNSWLASQCGCSETEEWRKEMYFATGVKKRAHPETYRDEWDDHHLVSQAYQDFSLYT

SEQ ID NO: 2106 - protein, 323 aa, Arabidopsis thaliana
MIRFDTAVVKVAPAAEEGSGKWRIESTEKEKKVLRDEIYDAVVVCNGHYIEPRHAEIPGISSWPGKEMHSHNYRIPEPFRDQVVVLIGNSASADDISRDIARVAKEVHVACRSNAADTYIERPGYSNLWMHSMIESVHEDGSVVFQNGKTISVDVIMHCTGYKYHFPFLETNGNVTVDDNRVGPLYKDVFSPAFAPWLSFVGIPWKVVPFPMFELQSKWIAGVLSGRIPLPSKEDMMMEIKTLYSTLDAQGIAKRYTHQMGISQFEYNSWLASQCGCSETEEWRKEMYFATGVKKRAHPETYRDEWDDHHLVSQAYQDFSLYT

SEQ ID NO: 2107 - DNA, 1108 bp, Arabidopsis thaliana
agacagatgttgagttgttcttcatcggcgttccaaagagtagcctttatgcttatggctcccaaattaaaacctcagagactccatcaaattgcagagagtggtgttgaacatttggttaagaaagctaggacgatgagtactgaatcctcaatgaaagatgctttctctacttacgctgattatctcaataacttcaatgagaagcgagaaagagtggtgaaggtaagtcgtgatatcacaatgaacagcaaaaaagttatctttcaggttcacaggctcagtaaagacaacaaagaggaggtattggagaaagcagggaaggatttagaagcagtgagggatcaacattttgcccggctaatgaaagagcttcaagggactgatttttggaagctgagacgtgcttattccccaggggtgcaggaatatgttgaagctgcaacgttttataagttctgtttgtctgggacgctatgtactctcgatgagattaacacaacgcttgtaccacttagtgacccttctttagagccgttgcagatcaatatcctcgactatattcttgggcttgcagatttgacgggagagctaatgcggatggcaattggtcgcatatcagacggtgaaatcgaattcgcgcagaggatttgtcagtttgttcgacagattcatagggaactaatgctagttgtgccaaagatggatgacagttatgacatgaaatccaagatggaagtgatgcttcaaagtgtgatcaaaatagagaacgcttgctttagcgttcacgtgagaggattagagtatattccactgcttggagataatgcaccaacatcatacctattgggagctgctgatgtcgaatgattaaaagtgagtggtcttttccgtctctcggacacattttaaagttcttgttaaggttggtgtgtttgcgacaagtaggatcgttttagtatggacttatcttcagagaattttagccacttcttacttctgaggaactttaaatctgtatgctgcaagacttttaagaaacaaatggttagaactagatgtaaaacttttcttttgaatatttataatagaatctagcaattacttt

SEQ ID NO: 2108 - protein, 289 aa, Arabidopsis thaliana
RQMLSCSSSAFQRVAFMLMAPKLKPQRLHQIAESGVEHLVKKARTMSTESSMKDAFSTYADYLNNFNEKRERVVKVSRDITMNSKKVIFQVHRLSKDNKEEVLEKAGKDLEAVRDQHFARLMKELQGTDFWKLRRAYSPGVQEYVEAATFYKFCLSGTLCTLDEINTTLVPLSDPSLEPLQINILDYILGLADLTGELMRMAIGRISDGEIEFAQRICQFVRQIHRELMLVVPKMDDSYDMKSKMEVMLQSVIKIENACFSVHVRGLEYIPLLGDNAPTSYLLGAADVE

SEQ ID NO: 2109 - protein, 287 aa, Arabidopsis thaliana
MLSCSSSAFQRVAFMLMAPKLKPQRLHQIAESGVEHLVKKARTMSTESSMKDAFSTYADYLNNFNEKRERVVKVSRDITMNSKKVIFQVHRLSKDNKEEVLEKAGKDLEAVRDQHFARLMKELQGTDFWKLRRAYSPGVQEYVEAATFYKFCLSGTLCTLDEINTTLVPLSDPSLEPLQINILDYILGLADLTGELMRMAIGRISDGEIEFAQRICQFVRQIHRELMLVVPKMDDSYDMKSKMEVMLQSVIKIENACFSVHVRGLEYIPLLGDNAPTSYLLGAADVE

SEQ ID NO: 2110 - protein, 273 aa, Arabidopsis thaliana
MLMAPKLKPQRLHQIAESGVEHLVKKARTMSTESSMKDAFSTYADYLNNFNEKRERVVKVSRDITMNSKKVIFQVHRLSKDNKEEVLEKAGKDLEAVRDQHFARLMKELQGTDFWKLRRAYSPGVQEYVEAATFYKFCLSGTLCTLDEINTTLVPLSDPSLEPLQINILDYILGLADLTGELMRMAIGRISDGEIEFAQRICQFVRQIHRELMLVVPKMDDSYDMKSKMEVMLQSVIKIENACFSVHVRGLEYIPLLGDNAPTSYLLGAADVE

SEQ ID NO: 2111 - DNA, 1353 bp, Arabidopsis thaliana
ctcatcagcaaacacaaacacacgactagataaactctaaatcctcacagcagatcacgtgctaatcacatggctccggggcttactcaaaccgctgatgctatgtccaccgtgacgataacaaaaccgtcactgccatcagtccaagacagcgatcgagcttacgtgacgtttcttgctggaaacggtgattacgtgaaaggagtcgttggtttagccaaagggttaaggaaagtcaaatcggcttatccactcgtagtagcgatgttacccgacgtcccggaggaacaccgtcgtatacttgtggatcaaggatgcatcgtccgtgaaatcgaacccgtttacccacccgagaaccaaactcagttcgccatggcttattacgtcatcaactactctaaactccgtatctggaagtttgtggagtatagtaaaatgatatatttagatggagacattcaagtttacgaaaacatcgatcacttgtttgacctaccagatggctatttgtacgcggtgatggattgtttctgtgagaaaacatggagtcacacgccgcaatacaagatcagatattgccaacaatgccccgacaaagtccagtggccaaaagcggagcttggagagccaccggctctttacttcaacgccggaatgttcttgtacgagcctaacctcgagacttacgaggatctactacgaacacttaaaatcactcctccgactcctttcgctgaacaggattttttgaacatgtactttaagaaaatctacaagccgattcctttagtgtacaatctcgtccttgcgatgttatggcgtcacccagaaaatgtagagcttggaaaagtcaaggtggttcactactgtgcagcgggttcgaagccgtggagatacacagggaaagaagcgaacatggagagggaagatataaaaatgttagtgaaaaaatggtgggacatttacgacgacgaatccttggattacaagaaacctgttaccgttgtggacacagaggtcgatctcgtgaatctgaagccgttcatcaccgctcttactgaagctggccggctcaactacgtgaccgcaccgtccgctgcttgaatgttgccaggagttaaaattgtcggtggatcaggtagttatttttctttccggtcagtaagaggttggggattatgtgtcgggtcgacaaccacacatactgtctctggttccaatgctttggacgttgacatgtgatttgctttacttttttgtctataatgtgtgttatcctcaattttagcgtctatcttcgaatatcaaacttgagtgacaaaataaatattccaaataacaggtcttcttcac

SEQ ID NO: 2112 - protein, 344 aa, Arabidopsis thaliana
MAPGLTQTADAMSTVTITKPSLPSVQDSDRAYVTFLAGNGDYVKGVVGLAKGLRKVKSAYPLVVAMLPDVPEEHRRILVDQGCIVREIEPVYPPENQTQFAMAYYVINYSKLRIWKFVEYSKMIYLDGDIQVYENIDHLFDLPDGYLYAVMDCFCEKTWSHTPQYKIRYCQQCPDKVQWPKAELGEPPALYFNAGMFLYEPNLETYEDLLRTLKITPPTPFAEQDFLNMYFKKIYKPIPLVYNLVLAMLWRHPENVELGKVKVVHYCAAGSKPWRYTGKEANMEREDIKMLVKKWWDIYDDESLDYKKPVTVVDTEVDLVNLKPFITALTEAGRLNYVTAPSAA

SEQ ID NO: 2113 - protein, 333 aa, Arabidopsis thaliana
MSTVTITKPSLPSVQDSDRAYVTFLAGNGDYVKGVVGLAKGLRKVKSAYPLVVAMLPDVPEEHRRILVDQGCIVREIEPVYPPENQTQFAMAYYVINYSKLRIWKFVEYSKMIYLDGDIQVYENIDHLFDLPDGYLYAVMDCFCEKTWSHTPQYKIRYCQQCPDKVQWPKAELGEPPALYFNAGMFLYEPNLETYEDLLRTLKITPPTPFAEQDFLNMYFKKIYKPIPLVYNLVLAMLWRHPENVELGKVKVVHYCAAGSKPWRYTGKEANMEREDIKMLVKKWWDIYDDESLDYKKPVTVVDTEVDLVNLKPFITALTEAGRLNYVTAPSAA

SEQ ID NO: 2114 - protein, 279 aa, Arabidopsis thaliana
MLPDVPEEHRRILVDQGCIVREIEPVYPPENQTQFAMAYYVINYSKLRIWKFVEYSKMIYLDGDIQVYENIDHLFDLPDGYLYAVMDCFCEKTWSHTPQYKIRYCQQCPDKVQWPKAELGEPPALYFNAGMFLYEPNLETYEDLLRTLKITPPTPFAEQDFLNMYFKKIYKPIPLVYNLVLAMLWRHPENVELGKVKVVHYCAAGSKPWRYTGKEANMEREDIKMLVKKWWDIYDDESLDYKKPVTVVDTEVDLVNLKPFITALTEAGRLNYVTAPSAA

SEQ ID NO: 2115 - DNA, 1776 bp, Arabidopsis thaliana
aacagagaatcacgaaatcacgaccgcattagagaagaaagagagagagagagcttttcttcttcttcttccgctcactagatctgctccctctcgcagtctcctgggttttggcaaattgcttttgattcttctcgggtggcagctatggtttcctccaccaaactcaaatccgttgatttctacaggaaaattccgagagatttgacggaggcatctctatcaggcgctgggttatcaattgtagctgctctctttatgatgtttttgtttggaatggagctgagtagttatttggaagttaacactaccacagctgttatagttgacaagagcagtgatggtgacttcttacgcattgatttcaacatcagttttcctgctctttcctgtgaatttgcatccgttgatgtgagcgatgtcttgggaacgaataggttgaatataacaaaaacagttcgcaagtttccaattgatccacatttaaggtccaccggcgcagaattccactctggccttgcattacataacataaaccatggagaagaaactaaggaagagtttcctgatggtgctataccattgaccagtgctagttttgaagcattatcacatcactttccaatattggttgttaactttaatgcaccatggtgctactggagtaatcgtctgaaaccttcatgggagaaagcagctaatataataaaacaaagatatgatcctgaagctgatggccgtgttcttctaggaaatgttgattgcacggaagaacctgcgctatgtaagaggaatcacatacaaggctatccatctattcgtattttccgcaaaggcagtgaccttagagaggaccatggacaccacgaacatgaatcttactatggagatcgggacacagacagtatagttaagatggtggagggactggtcgcacctatccacccggagactcacaaggtggctttggatggaaaatccaatgatactgtaaaacatcttaaaaagggaccagttacaggaggttgtagagttgaaggttatgtacgtgtaaagaaggttccaggaaatctcgtgatctcagctcattcaggagctcattcatttgattcttctcaaatgaacatgtcgcatgttgtttctcatttttcgtttgggaggatgatttctcctaggctgctgaccgatatgaagcgattgttgccatatcttggcctaagccatgacaggctggatggaaaggcattcataaatcaacatgagtttggtgccaatgtcactatcgaacactaccttcaaacagtcaaaacagaggtcattacaagaagatccggtcaagaacattcactgatagaggaatatgaatacaccgctcacagcagcgtggctcagacttactacttacccgttgcgaagtttcactttgaactctctcctatgcagatcttaataaccgaaaacccgaagtccttctcacacttcatcacaaatctgtgtgccattattggtggtgttttcacggttgccggaatactagattcgatttttcacaatacagtaagactggtaaaaaaggtcgaacttgggaaaaacatttgatcgtccactggaggttagaattttccattaatatataaaaccatagaagaacctcagactgtttactttgaatagctgatctacacagaaaaactcaaaaaaagagagaatttttgtttgacacaatcttagtttctttatggttcttgttctattaaaatccgcctggtttttcgt

SEQ ID NO: 2116 - protein, 483 aa, Arabidopsis thaliana
MVSSTKLKSVDFYRKIPRDLTEASLSGAGLSIVAALFMMFLFGMELSSYLEVNTTTAVIVDKSSDGDFLRIDFNISFPALSCEFASVDVSDVLGTNRLNITKTVRKFPIDPHLRSTGAEFHSGLALHNINHGEETKEEFPDGAIPLTSASFEALSHHFPILVVNFNAPWCYWSNRLKPSWEKAANIIKQRYDPEADGRVLLGNVDCTEEPALCKRNHIQGYPSIRIFRKGSDLREDHGHHEHESYYGDRDTDSIVKMVEGLVAPIHPETHKVALDGKSNDTVKHLKKGPVTGGCRVEGYVRVKKVPGNLVISAHSGAHSFDSSQMNMSHVVSHFSFGRMISPRLLTDMKRLLPYLGLSHDRLDGKAFINQHEFGANVTIEHYLQTVKTEVITRRSGQEHSLIEEYEYTAHSSVAQTYYLPVAKFHFELSPMQILITENPKSFSHFITNLCAIIGGVFTVAGILDSIFHNTVRLVKKVELGKNI

SEQ ID NO: 2117 - protein, 446 aa, Arabidopsis thaliana
MMFLFGMELSSYLEVNTTTAVIVDKSSDGDFLRIDFNISFPALSCEFASVDVSDVLGTNRLNITKTVRKFPIDPHLRSTGAEFHSGLALHNINHGEETKEEFPDGAIPLTSASFEALSHHFPILVVNFNAPWCYWSNRLKPSWEKAANIIKQRYDPEADGRVLLGNVDCTEEPALCKRNHIQGYPSIRIFRKGSDLREDHGHHEHESYYGDRDTDSIVKMVEGLVAPIHPETHKVALDGKSNDTVKHLKKGPVTGGCRVEGYVRVKKVPGNLVISAHSGAHSFDSSQMNMSHVVSHFSFGRMISPRLLTDMKRLLPYLGLSHDRLDGKAFINQHEFGANVTIEHYLQTVKTEVITRRSGQEHSLIEEYEYTAHSSVAQTYYLPVAKFHFELSPMQILITENPKSFSHFITNLCAIIGGVFTVAGILDSIFHNTVRLVKKVELGKNI

SEQ ID NO: 2118 - protein, 445 aa, Arabidopsis thaliana
MFLFGMELSSYLEVNTTTAVIVDKSSDGDFLRIDFNISFPALSCEFASVDVSDVLGTNRLNITKTVRKFPIDPHLRSTGAEFHSGLALHNINHGEETKEEFPDGAIPLTSASFEALSHHFPILVVNFNAPWCYWSNRLKPSWEKAANIIKQRYDPEADGRVLLGNVDCTEEPALCKRNHIQGYPSIRIFRKGSDLREDHGHHEHESYYGDRDTDSIVKMVEGLVAPIHPETHKVALDGKSNDTVKHLKKGPVTGGCRVEGYVRVKKVPGNLVISAHSGAHSFDSSQMNMSHVVSHFSFGRMISPRLLTDMKRLLPYLGLSHDRLDGKAFINQHEFGANVTIEHYLQTVKTEVITRRSGQEHSLIEEYEYTAHSSVAQTYYLPVAKFHFELSPMQILITENPKSFSHFITNLCAIIGGVFTVAGILDSIFHNTVRLVKKVELGKNI

SEQ ID NO: 2119 - DNA, 1420 bp, Arabidopsis thaliana
aaaaaaaattcattcccttcttggattgctctgttttcttcggcggttcttgcagctccattgattctctgtttcctctgctacagttaacttatacttgcagattctcgcgttgatagtaaaaagatggtgaagcttttggagctgttcataacttcatcaaaaccagtcgttgagattctgttgataacatcagtcggattttatatggctctcgatggagtcaatcttcttggtcatgatgctcgtaaatatctgaacaacattgtcttctatgtgtttagtccttcgcttattggaagccgtttagctgatagtgttacatacgaaagcttggtcaaaatgtggttcatgccggtgaatgttctgcttacattcatcattggttcattacttggctggattgttattgtcatcactaagcctccttcacaccttcgtggtctcattcttggttgttgtgctgctgggaatttggggaatatgccactgattataatcccagctgtttgtaaagaaaaaggaggtccctttggagatcctgagagttgccagaaatatggaatgggttatgttgctctctccatggctatgggatctatttacatatggacttatgtatacaatcttatgcgtgtgctatcgaactctcccgttgaaacccctccctctgttgaatccaactacgacagctacaaagttccccttatttcttccaaggaagaagaaaacaaccaaaaggctgggaggtgggaaaaagtcaagcggagattggtttcactgtcacaaaaagtcaaccttaagacaatttttgctccatcaactattgctgcgatgattgcacttgtgatcgggctcattactcctttaaggaagctaataatcggcacggaagctcctctccgggtgcttcaagactcagtaactctagtgggagatggggcagttcctgcaatgaccatgattataggaggaaacctactcaaaggtttgaggagttcaggaatgaaaatgtccagtattatcggcgtcttggttgcgcgttacgttttactgcctatgagcggtgttttaatcgtaagaggagcatataagttggatttagttacatcagagcccttataccaattcgttcttcttcttcaatatgctgtcccaccagccatgaatctaggtacaattactcagttatttggaactggggagagtgaatgctcagtgattatgctctggacttactctttggcttcgattgcactcactgtttggccaacattcttcatgtggcttgtagcttagaatagacccccatactcatcatgttacatgtattgttttgttccattgattcaagaattgttcttggacttccagatgattggatcaagtataatagagaacatatacttataagtctttt

SEQ ID NO: 2120 - protein, 390 aa, Arabidopsis thaliana
MVKLLELFITSSKPVVEILLITSVGFYMALDGVNLLGHDARKYLNNIVFYVFSPSLIGSRLADSVTYESLVKMWFMPVNVLLTFIIGSLLGWIVIVITKPPSHLRGLILGCCAAGNLGNMPLIIIPAVCKEKGGPFGDPESCQKYGMGYVALSMAMGSIYIWTYVYNLMRVLSNSPVETPPSVESNYDSYKVPLISSKEEENNQKAGRWEKVKRRLVSLSQKVNLKTIFAPSTIAAMIALVIGLITPLRKLIIGTEAPLRVLQDSVTLVGDGAVPAMTMIIGGNLLKGLRSSGMKMSSIIGVLVARYVLLPMSGVLIVRGAYKLDLVTSEPLYQFVLLLQYAVPPAMNLGTITQLFGTGESECSVIMLWTYSLASIALTVWPTFFMWLVA

SEQ ID NO: 2121 - protein, 363 aa, Arabidopsis thaliana
MALDGVNLLGHDARKYLNNIVFYVFSPSLIGSRLADSVTYESLVKMWFMPVNVLLTFIIGSLLGWIVIVITKPPSHLRGLILGCCAAGNLGNMPLIIIPAVCKEKGGPFGDPESCQKYGMGYVALSMAMGSIYIWTYVYNLMRVLSNSPVETPPSVESNYDSYKVPLISSKEEENNQKAGRWEKVKRRLVSLSQKVNLKTIFAPSTIAAMIALVIGLITPLRKLIIGTEAPLRVLQDSVTLVGDGAVPAMTMIIGGNLLKGLRSSGMKMSSIIGVLVARYVLLPMSGVLIVRGAYKLDLVTSEPLYQFVLLLQYAVPPAMNLGTITQLFGTGESECSVIMLWTYSLASIALTVWPTFFMWLVA

SEQ ID NO: 2122 - protein, 318 aa, Arabidopsis thaliana
MWFMPVNVLLTFIIGSLLGWIVIVITKPPSHLRGLILGCCAAGNLGNMPLIIIPAVCKEKGGPFGDPESCQKYGMGYVALSMAMGSIYIWTYVYNLMRVLSNSPVETPPSVESNYDSYKVPLISSKEEENNQKAGRWEKVKRRLVSLSQKVNLKTIFAPSTIAAMIALVIGLITPLRKLIIGTEAPLRVLQDSVTLVGDGAVPAMTMIIGGNLLKGLRSSGMKMSSIIGVLVARYVLLPMSGVLIVRGAYKLDLVTSEPLYQFVLLLQYAVPPAMNLGTITQLFGTGESECSVIMLWTYSLASIALTVWPTFFMWLVA

SEQ ID NO: 2123 - DNA, 1381 bp, Arabidopsis thaliana
attcttgcatcaattggctctcttttttatcagttaaaatctggttttttcaatacattaagttatttaattgggatgatttttgtttgatgcagaattgattctctcaagatttatacggatgaggaactcacagagatggctatgaaggaagcctttccggaagattacctttcccaagaggagctcgaaccatctttaaacgtttctcatcatgaaaatccattagctgggagggcaaaaaggaagaggacagtaaagaataccgaggtaaagaagaggacactaaagaatactgaggtaatgaagatgacagaaaagaagactgaggaagcttatcttgtgaaagtcgagcagcttgctaaactcaaacaaaagcaggaggaggataaagcagctgtgacactgcactgcttcagcaagaccagtgagactggtaaagatgtagttgcacctccagaaggttttgagcagatgcaatctcttaggttcatagataataattacacgaagttgaagccatctgacatccagggacaagtggatccgctatttcctgaagtcattttgtgtgttgagatttataacagtcgcaaggttaagacccaagaatttttggttctaggacgtcaaatgttgactgagttgaaggacaatattcactgtgctacagaccaggtgatgcaaaaggctggaaagtatgatccctctggatacttcctcatagaagatgtctttcacaatgatttaaggaatccctcggctaaagattacagctatcctattttagattggctttggaactcgaaagatgaagctcttaaaaaatgggaatgtgttttaaccggcgaattacagaaaaagcagaaactggttctaggtgaagcgaaatctgtggatttacctcgttacagaactgcagacatgcagagtacacacttctgtgatataagattcagagtcggagctagttatgtctattgtcatcagggagattgcaagcacacgattgtgattcgagacatgaggatgagtcatccagaggacgttcagaacagagcagcttacccgatcatgttctggccgaaacgtaggattcagaaatgcggtgtttgtaagataaagagagcttcaaaggttgcagtggatgacaagtgggcaagcgagaacagtagctatttctgtgatgtttgttttgagcttctacactcagaggaaggcccacttaactgtgacttcccagtgtttgattatgtgcatgagtaaagatgatcttctttgttgcataatatatagataggaagtatacgaagaaatagttggcattgcaagaagaagacatgatgagtcttgtcttggtaaatttgttgcataattggat

SEQ ID NO: 2124 - protein, 375 aa, Arabidopsis thaliana
MAMKEAFPEDYLSQEELEPSLNVSHHENPLAGRAKRKRTVKNTEVKKRTLKNTEVMKMTEKKTEEAYLVKVEQLAKLKQKQEEDKAAVTLHCFSKTSETGKDVVAPPEGFEQMQSLRFIDNNYTKLKPSDIQGQVDPLFPEVILCVEIYNSRKVKTQEFLVLGRQMLTELKDNIHCATDQVMQKAGKYDPSGYFLIEDVFHNDLRNPSAKDYSYPILDWLWNSKDEALKKWECVLTGELQKKQKLVLGEAKSVDLPRYRTADMQSTHFCDIRFRVGASYVYCHQGDCKHTIVIRDMRMSHPEDVQNRAAYPIMFWPKRRIQKCGVCKIKRASKVAVDDKWASENSSYFCDVCFELLHSEEGPLNCDFPVFDYVHE

SEQ ID NO: 2125 - protein, 373 aa, Arabidopsis thaliana
MKEAFPEDYLSQEELEPSLNVSHHENPLAGRAKRKRTVKNTEVKKRTLKNTEVMKMTEKKTEEAYLVKVEQLAKLKQKQEEDKAAVTLHCFSKTSETGKDVVAPPEGFEQMQSLRFIDNNYTKLKPSDIQGQVDPLFPEVILCVEIYNSRKVKTQEFLVLGRQMLTELKDNIHCATDQVMQKAGKYDPSGYFLIEDVFHNDLRNPSAKDYSYPILDWLWNSKDEALKKWECVLTGELQKKQKLVLGEAKSVDLPRYRTADMQSTHFCDIRFRVGASYVYCHQGDCKHTIVIRDMRMSHPEDVQNRAAYPIMFWPKRRIQKCGVCKIKRASKVAVDDKWASENSSYFCDVCFELLHSEEGPLNCDFPVFDYVHE

SEQ ID NO: 2126 - protein, 320 aa, Arabidopsis thaliana
MKMTEKKTEEAYLVKVEQLAKLKQKQEEDKAAVTLHCFSKTSETGKDVVAPPEGFEQMQSLRFIDNNYTKLKPSDIQGQVDPLFPEVILCVEIYNSRKVKTQEFLVLGRQMLTELKDNIHCATDQVMQKAGKYDPSGYFLIEDVFHNDLRNPSAKDYSYPILDWLWNSKDEALKKWECVLTGELQKKQKLVLGEAKSVDLPRYRTADMQSTHFCDIRFRVGASYVYCHQGDCKHTIVIRDMRMSHPEDVQNRAAYPIMFWPKRRIQKCGVCKIKRASKVAVDDKWASENSSYFCDVCFELLHSEEGPLNCDFPVFDYVHE

SEQ ID NO: 2127 - DNA, 1166 bp, Arabidopsis thaliana
gaaagaaacatcaaactcctaaaagagaagcctttaaagttttttttaatcaaaaacaaaaggaagaaaattttcctttttgttttagatggcatgaatcatcatcatcgctttgctttcttgattctctatttcgtttgatgggatttgtttttctgggaatttattcattcacctgctgccatggctaaattatctttcaaggattctcttaaagctcttgaagccgatattcaacacgctaatacactagctttagattatcctcgggagaaggatggagcgcgcgttcagatgagattatcatacagcccgactgctcaattttttctttttcttgtacaatggactgattgtaagcttgctggtttcctcggtttactcagagttcttatttatatgacttatgcagatgggaaaacaaccatgtcggtttacgaaagaaaagccagtattagagagttccaagctgtgatattaccatctttgtcacaactacaaaggggtgttacagacatagatgacagcaaacaaaaagaggtatgcaagatgcgatacagaaagaaggatgagagcgaaatgtcggagattgagatcgagagggaagaagaatgtggaatctgtatggagatgaacagcaaggtggtgctaccaaactgtactcattctttatgcatcaagtgttaccgcgattggcgagggagatcacagtcatgcccgttctgcagagacagccttaaaagagtagattcaggtgatctctggatgtttttggaccaaaacgatacagtgaatctcactgcaatcgctagagagaaccagaaacgattgtttatgtacattgagaagttaccactagtggttccagatcaagtgtatgcgtcttctccttacgatttccatgtgagatgaaggcggaaaaccggttctggtaaatctttatctgtatacttggggaaaaggaggacttgttttgtaaatgtattagagttagtacaagtagtagtaatcagtcactttcttcaccattatcttgggaaggttccacttactacgtgctttttctgcattttgctttggtttccttctatctcgtaaagcttcaagaagctcatgtatagttagcaatttatgaacttaaacctcctcatcaagaagagtgtttc

SEQ ID NO: 2128 - protein, 242 aa, Arabidopsis thaliana
MAKLSFKDSLKALEADIQHANTLALDYPREKDGARVQMRLSYSPTAQFFLFLVQWTDCKLAGFLGLLRVLIYMTYADGKTTMSVYERKASIREFQAVILPSLSQLQRGVTDIDDSKQKEVCKMRYRKKDESEMSEIEIEREEECGICMEMNSKVVLPNCTHSLCIKCYRDWRGRSQSCPFCRDSLKRVDSGDLWMFLDQNDTVNLTAIARENQKRLFMYIEKLPLVVPDQVYASSPYDFHVR

SEQ ID NO: 2129 - protein, 205 aa, Arabidopsis thaliana
MRLSYSPTAQFFLFLVQWTDCKLAGFLGLLRVLIYMTYADGKTTMSVYERKASIREFQAVILPSLSQLQRGVTDIDDSKQKEVCKMRYRKKDESEMSEIEIEREEECGICMEMNSKVVLPNCTHSLCIKCYRDWRGRSQSCPFCRDSLKRVDSGDLWMFLDQNDTVNLTAIARENQKRLFMYIEKLPLVVPDQVYASSPYDFHVR

SEQ ID NO: 2130 - protein, 170 aa, Arabidopsis thaliana
MTYADGKTTMSVYERKASIREFQAVILPSLSQLQRGVTDIDDSKQKEVCKMRYRKKDESEMSEIEIEREEECGICMEMNSKVVLPNCTHSLCIKCYRDWRGRSQSCPFCRDSLKRVDSGDLWMFLDQNDTVNLTAIARENQKRLFMYIEKLPLVVPDQVYASSPYDFHVR

SEQ ID NO: 2131 - DNA, 1819 bp, Arabidopsis thaliana
gatatttattcaactgcgtggtataaccaaaaaaaaaaagaaacactattcgactctttttttgtttttgtaataaacataaaataaattttggagagagatatttcgtcggaaattaattgacgttcaaaagattcgttaccggaatatttagtagaggcggcgatcgagttatggcggatatttgttatgaagacgagacgtcggcttgtgaatcaagaccgttgtggtctagccggaagtggaggatcggtgtccagcgattcaggatgtctccgtcggagatgaatcccacggcgtcgacgacggaggaggaggataaatctgaagggatttataataagcgaaataaacaagaagagtacgattttatgaactgtgcatcgtcgtcaccttctcaaagctctcctgaagaagagagtgtatcacttgaagacagtgacgtctctatctccgatggaaattcatcggttaatgatgttgcagttattccgtcgaagaagacggttaaagagacggatctgaggccgagatacggcgtcgcatcggtgtgcgggagaagaagagatatggaagatgcggttgcgttacatccgtcttttgtacggaaacaaacggagttttctcgaacaagatggcactattttggtgtttacgacggccatggctgttctcacgttgcggctaggtgtaaagagagacttcacgagttagtgcaagaagaagcgttgtcggataagaaagaagaatggaagaagatgatggagcgtagcttcacacgtatggacaaagaggttgttcgttggggtgaaactgtgatgagtgctaattgtaggtgtgagcttcaaacgccggactgtgacgctgttggatccaccgccgttgtctccgtcattacgccggagaagatcattgttgcgaattgcggtgactcaagagcagttctttgtaggaatggtaaagcagtacctctttctacagatcataagcctgatcgtccggatgagctggatcgaatccaagaagcaggaggacgagtgatatactgggacggtgcaagagtcttaggcgttttagccatgtcacgagccataggagacaattatttaaaaccgtacgtcacttcggagccggaagtgacggttacggatcggactgaggaagatgagtttctgattctagcgacggacgggctatgggacgtagtgacgaacgaggcagcgtgtacgatggtgcgcatgtgtctcaacagaaaaagtggtcgtggaagacggcgaggagaaacacagactccggggaggaggagtgaagaagaagggaaagaagaagaggagaaggtggtggggtcaagaaagaacgggaagagaggagagatcacggacaaagcatgtacggaggcgtcagtattgctgacgaagctggcgttggcaaaacacagtagtgacaacgtaagcgtcgtcgttattgatctcagaagaagaagaaagagacacgttgcttgacactaatctcctcatcactcttactccaccgttttttgtgttgtttaaaatgattcttttaccttgggacgaaggtagctcaaatctttgaacccaaaagagagaaaaaaaaagcattaggtctaaaaaaaaaaccccggtttactgaaagcggttaaaccgggtatggttgggtcttttttgttctgaacctttttttcttgccttttttcggtgtgtaatgaacaaacagaaaaggaagccggaatgtgtcactgtctaggtggaatcagttcagaattcaattaataaaaaagtatgtatatgttttcttggcc

SEQ ID NO: 2132 - protein, 442 aa, Arabidopsis thaliana
MADICYEDETSACESRPLWSSRKWRIGVQRFRMSPSEMNPTASTTEEEDKSEGIYNKRNKQEEYDFMNCASSSPSQSSPEEESVSLEDSDVSISDGNSSVNDVAVIPSKKTVKETDLRPRYGVASVCGRRRDMEDAVALHPSFVRKQTEFSRTRWHYFGVYDGHGCSHVAARCKERLHELVQEEALSDKKEEWKKMMERSFTRMDKEVVRWGETVMSANCRCELQTPDCDAVGSTAVVSVITPEKIIVANCGDSRAVLCRNGKAVPLSTDHKPDRPDELDRIQEAGGRVIYWDGARVLGVLAMSRAIGDNYLKPYVTSEPEVTVTDRTEEDEFLILATDGLWDVVTNEAACTMVRMCLNRKSGRGRRRGETQTPGRRSEEEGKEEEEKVVGSRKNGKRGEITDKACTEASVLLTKLALAKHSSDNVSVVVIDLRRRRKRHVA

SEQ ID NO: 2133 - protein, 410 aa, Arabidopsis thaliana
MSPSEMNPTASTTEEEDKSEGIYNKRNKQEEYDFMNCASSSPSQSSPEEESVSLEDSDVSISDGNSSVNDVAVIPSKKTVKETDLRPRYGVASVCGRRRDMEDAVALHPSFVRKQTEFSRTRWHYFGVYDGHGCSHVAARCKERLHELVQEEALSDKKEEWKKMMERSFTRMDKEVVRWGETVMSANCRCELQTPDCDAVGSTAVVSVITPEKIIVANCGDSRAVLCRNGKAVPLSTDHKPDRPDELDRIQEAGGRVIYWDGARVLGVLAMSRAIGDNYLKPYVTSEPEVTVTDRTEEDEFLILATDGLWDVVTNEAACTMVRMCLNRKSGRGRRRGETQTPGRRSEEEGKEEEEKVVGSRKNGKRGEITDKACTEASVLLTKLALAKHSSDNVSVVVIDLRRRRKRHVA

SEQ ID NO: 2134 - protein, 405 aa, Arabidopsis thaliana
MNPTASTTEEEDKSEGIYNKRNKQEEYDFMNCASSSPSQSSPEEESVSLEDSDVSISDGNSSVNDVAVIPSKKTVKETDLRPRYGVASVCGRRRDMEDAVALHPSFVRKQTEFSRTRWHYFGVYDGHGCSHVAARCKERLHELVQEEALSDKKEEWKKMMERSFTRMDKEVVRWGETVMSANCRCELQTPDCDAVGSTAVVSVITPEKIIVANCGDSRAVLCRNGKAVPLSTDHKPDRPDELDRIQEAGGRVIYWDGARVLGVLAMSRAIGDNYLKPYVTSEPEVTVTDRTEEDEFLILATDGLWDVVTNEAACTMVRMCLNRKSGRGRRRGETQTPGRRSEEEGKEEEEKVVGSRKNGKRGEITDKACTEASVLLTKLALAKHSSDNVSVVVIDLRRRRKRHVA

SEQ ID NO: 2135 - DNA, 1499 bp, Arabidopsis thaliana
acatatcaaatctgtgaacaaacgtattcgatcaaagctcatgggtgtttcgtattactcactttgatccgatttactaaacctcaagtcatcgtctattcatttgagttcttcacatcttgccgtccagtcgttcgatgatattcctctgtgaagcaaaatctcgttcttcccagctcactctcccattaccggattattcctcctgggattagcttgaacctgtcttaaacgcattcaggtttactacaggaggagaagctttttcagatgccaagttaatgactttattatagttgatcaggtctctgagaataggaaatggcaattcgcttgacgcatctgcgaaaacctcttgcttattctcggtcctttgatgtctgcattccgtttttccggtcaatctcgtcctttgaagcggttgaaaaggcgataaaatgtgctgttgaaacaaaggagtatcttagaatccccgaacttgttgtttcactcaaagagccttaccaaaactcaacgttgttttcttttctctctgctttccaacgtcatcatagaatcagagtcattgacgaaatcctccaaagttttgttcctgtgagacctcgttcactgcccaagattgtctactccagtcttcttacttattgccttcagagttccgatcctcttcctttgtctttcgcaatcctccaacgcactcttcgttctggctgtctacctaaccctcagactcatctccttctctctgatgcttggcttgaacggcgacgaggatcccagtctgttgcagatattattaatgagatgaaattgattggatacagtcctgatactggaacctgcaattacttagtgtcctctctctgtgctgttgataagttggatgaggcgattaaagttgttgaggaaatgagtgcagctggctgtattcctgatgtggaaagttatggggcggtgattaattcattgtgtttggctagaaagactactgatgtggtgaagattgtcaaagagatggtgagcaaagctgggatctctccacggaaagggatgctgacaaaagtagcagcagctctcagagccaacagggaaatttggaaagccattgagatgatcgagtttgtagaaagtcgggattaccctgtggagtttgagagttatgaggtagtagtcgagggttgcctggaggttagggaatacattttggcagggaaggtggtgatgagaatgactgatagagggttcataccgtatatcaaggttaggcaaaaagtggttgagcgtctgattaacatcggtgaatggaagcttgcttgtactgttagacaaagggtttctgaactgaggtcttaggtatttctcagataagtgttaagattttgtaagaatagctgcagttacgatcctggaatgaaactcacaacccgaacttgggaacatttttgttgtttctgattaaacatatattttttttatagcaatgatccgtttgtccctgc

SEQ ID NO: 2136 - protein, 343 aa, Arabidopsis thaliana
MAIRLTHLRKPLAYSRSFDVCIPFFRSISSFEAVEKAIKCAVETKEYLRIPELVVSLKEPYQNSTLFSFLSAFQRHHRIRVIDEILQSFVPVRPRSLPKIVYSSLLTYCLQSSDPLPLSFAILQRTLRSGCLPNPQTHLLLSDAWLERRRGSQSVADIINEMKLIGYSPDTGTCNYLVSSLCAVDKLDEAIKVVEEMSAAGCIPDVESYGAVINSLCLARKTTDVVKIVKEMVSKAGISPRKGMLTKVAAALRANREIWKAIEMIEFVESRDYPVEFESYEVVVEGCLEVREYILAGKVVMRMTDRGFIPYIKVRQKVVERLINIGEWKLACTVRQRVSELRS

SEQ ID NO: 2137 - protein, 182 aa, Arabidopsis thaliana
MKLIGYSPDTGTCNYLVSSLCAVDKLDEAIKVVEEMSAAGCIPDVESYGAVINSLCLARKTTDVVKIVKEMVSKAGISPRKGMLTKVAAALRANREIWKAIEMIEFVESRDYPVEFESYEVVVEGCLEVREYILAGKVVMRMTDRGFIPYIKVRQKVVERLINIGEWKLACTVRQRVSELRS

SEQ ID NO: 2138 - DNA, 1463 bp, Arabidopsis thaliana
aataaaatccaacttcttctccttcaagaatctagagatagagagagagagagaacacaaagtgggaaaaaagataagaacccaccataaagtttttacatttctccctttaaaaggcgaaagcttttgatttgtataaaagtcccacttaatcacctctctagcttctcattccatttccatctcctctcttttgttttctaagttgcttcaagagttttggatagtgtagcagagagattttaactaatgggtttataaaattttgttcttttgcgtgaacaagttgtcaacttctagacagattttctttttgaagtgttttcttgtcgaaattcttcttcttttggtcaaagaacgcaagattcttctgtagttcctctaaaaaaaatcctaatggagggttattcaagaaacggtgaaatctctccgaagctgcttgacttgatgattccacaagagagaagaaattggtttcacgatgagaaaaactctgttttcaaaacagaggagaagaagcttgagctaaagcttggaccacctggtgaagaagatgatgatgaatcgatgataagacacatgaagaaagaaccaaaagacaaatctatcctctctctcgctggcaaatacttctctccttcttccaccaaaaccacatcccataaaagaactgctcctggtccagtggtgggatggcctccggttcgatccttcaggaagaatttagctagtggaagttcttcaaagcttggaaatgactcaaccacctccaatggtgttaccctcaagaaccaaaagtgtgatgctgctgctaagacaacagaaccaaagagacaaggaggcatgtttgtgaagatcaacatgtatggtgttcccattggtcgtaaagttgatctcagtgctcataatagctatgagcagttatctttcacagttgacaagctcttcagaggtcttcttgcagctcaaagagactttccatcatccatagaagatgaaaaaccaatcactggattattagatgggaatggagaatatactcttacatatgaagacaatgaaggagacaagatgcttgtaggagatgttccatggcaaatgtttgtgtcttcggtgaagaggctgcgtgtgattaaaacttctgagatttcttcagcattaacatatggaaatggtaagcaagagaaaatgagaagatgaagaaaaagatcttttacagcttttaaagaagtagagagatgttattaattgcattttgcctttaaactttgatgagtttttggtcttggaaaagtttctgatataagtctgatgtacattctggtttgttacatcttcttttggcttttgagatatcatagagttttgttggaactcaaagaccaaacagtgcaatgatgattttggggtcttgagtaaatttacaaacccttttaggcatattataatagtcttctgttttt

SEQ ID NO: 2139 - protein, 267 aa, Arabidopsis thaliana
MEGYSRNGEISPKLLDLMIPQERRNWFHDEKNSVFKTEEKKLELKLGPPGEEDDDESMIRHMKKEPKDKSILSLAGKYFSPSSTKTTSHKRTAPGPVVGWPPVRSFRKNLASGSSSKLGNDSTTSNGVTLKNQKCDAAAKTTEPKRQGGMFVKINMYGVPIGRKVDLSAHNSYEQLSFTVDKLFRGLLAAQRDFPSSIEDEKPITGLLDGNGEYTLTYEDNEGDKMLVGDVPWQMFVSSVKRLRVIKTSEISSALTYGNGKQEKMRR

SEQ ID NO: 2140 - protein, 250 aa, Arabidopsis thaliana
MIPQERRNWFHDEKNSVFKTEEKKLELKLGPPGEEDDDESMIRHMKKEPKDKSILSLAGKYFSPSSTKTTSHKRTAPGPVVGWPPVRSFRKNLASGSSSKLGNDSTTSNGVTLKNQKCDAAAKTTEPKRQGGMFVKINMYGVPIGRKVDLSAHNSYEQLSFTVDKLFRGLLAAQRDFPSSIEDEKPITGLLDGNGEYTLTYEDNEGDKMLVGDVPWQMFVSSVKRLRVIKTSEISSALTYGNGKQEKMRR

SEQ ID NO: 2141 - protein, 210 aa, Arabidopsis thaliana
MIRHMKKEPKDKSILSLAGKYFSPSSTKTTSHKRTAPGPVVGWPPVRSFRKNLASGSSSKLGNDSTTSNGVTLKNQKCDAAAKTTEPKRQGGMFVKINMYGVPIGRKVDLSAHNSYEQLSFTVDKLFRGLLAAQRDFPSSIEDEKPITGLLDGNGEYTLTYEDNEGDKMLVGDVPWQMFVSSVKRLRVIKTSEISSALTYGNGKQEKMRR

SEQ ID NO: 2142 - DNA, 1745 bp, Arabidopsis thaliana
agagaagaaatagagagagaggccacaaggcacacacaagtcagtatcccacgtgcatctgggaactcgacccctctcctctgccacaacccactcttcatttctctctttctccaccaatctctctttctctctctcaaaagaagagaaactaataattctcaaaagctcacacacagaaacagaggaatctataaggaagttttggtttttggttatcaacaatggtggaagcaaaagatcaagatatgggtgatggtatgcaatgtataaaccatccatttactaaaaacccaggtgggatctgtgctttttgtcttcaagaaaagcttggaaagcttgtaacttcatctttcccacttcctaaacacctcacttcctcttcaacttcttcttctccttccttcagatctgactctgttggtagcacaaccactgcctctgccgcaaatctctcagcgtctctttctctctctgtctccggagcaacaaacaacaacaacagcaagcttccgtttttgttagctaagaagaagaagaagatgcttactgcttcttcttcttcttcgaccacggctaatattgtctacaagagaagtcaatctacaaggactacgaagacaacgtacggagattcagatttgagcccgagaaagagaaatgggttttggtccttttttcatctctactcttcgaaacaacatggtagcagtaagaaagttggaaactttcatcaacccataagccagactgagacaaaaacagagttggcagagactacaacagtgggatcttcgtcttcttcgtcagcttcttcttcaatgtcaaagagagttgttggtggtggtgggagtagtagtaacagaaacggtattgatgtgattgttgaagaagatggaagtcctaacattgaagtcacaccaagtgagaggaaagtgtcgagatctagatctgttgggtgtggaagtagaagcttctctggtgatttctttgagaggatcacaaatgggtttggagattgtactttgagaagagttgagtcacagagagaaggtaataataacaaaggtaacaaggtcagtagtaaccctagtaatggtgttagagagatggtgagatgtggtgggatctttggtgggtttatgataatgacgtcatcgtcttcttcttcatcttcatcatcatgggtatcatcatcatcagctgaacatcatcatcatcataatcataacatgggtcatggtggtggaggaaggaacagaagctggggatggtcatttgcaagtccaatgagagcttttacttcttcttcttactctggtaaaagaggccgtacaatttcagattctactacaagcaagaacacaactccaaacttgggtgcaattccttctttgttgtctgtcagaagctgaattaataataaactttgatctatgtgtttctaataagttcttaaacgagaaaatacatttaattagtttttatcattttcatcaatgtgtttatcttttttttaggtgttcttcaaatatttgttgatgctctttttgataatcttattagtattgtaatgtcacaccactcttctatgttcattatcatcttttgtcaaacaaggaacttaggatactttgagctactttttctgtttatttgtctttttctcttttgtttattttgatctttggattgattcctatgtctctttgaatgatctaatggtaaataaattggttttatct

SEQ ID NO: 2143 - protein, 396 aa, Arabidopsis thaliana
MVEAKDQDMGDGMQCINHPFTKNPGGICAFCLQEKLGKLVTSSFPLPKHLTSSSTSSSPSFRSDSVGSTTTASAANLSASLSLSVSGATNNNNSKLPFLLAKKKKKMLTASSSSSTTANIVYKRSQSTRTTKTTYGDSDLSPRKRNGFWSFFHLYSSKQHGSSKKVGNFHQPISQTETKTELAETTTVGSSSSSSASSSMSKRVVGGGGSSSNRNGIDVIVEEDGSPNIEVTPSERKVSRSRSVGCGSRSFSGDFFERITNGFGDCTLRRVESQREGNNNKGNKVSSNPSNGVREMVRCGGIFGGFMIMTSSSSSSSSSSWVSSSSAEHHHHHNHNMGHGGGGRNRSWGWSFASPMRAFTSSSYSGKRGRTISDSTTSKNTTPNLGAIPSLLSVRS

SEQ ID NO: 2144 - protein, 388 aa, Arabidopsis thaliana
MGDGMQCINHPFTKNPGGICAFCLQEKLGKLVTSSFPLPKHLTSSSTSSSPSFRSDSVGSTTTASAANLSASLSLSVSGATNNNNSKLPFLLAKKKKKMLTASSSSSTTANIVYKRSQSTRTTKTTYGDSDLSPRKRNGFWSFFHLYSSKQHGSSKKVGNFHQPISQTETKTELAETTTVGSSSSSSASSSMSKRVVGGGGSSSNRNGIDVIVEEDGSPNIEVTPSERKVSRSRSVGCGSRSFSGDFFERITNGFGDCTLRRVESQREGNNNKGNKVSSNPSNGVREMVRCGGIFGGFMIMTSSSSSSSSSSWVSSSSAEHHHHHNHNMGHGGGGRNRSWGWSFASPMRAFTSSSYSGKRGRTISDSTTSKNTTPNLGAIPSLLSVRS

SEQ ID NO: 2145 - protein, 384 aa, Arabidopsis thaliana
MQCINHPFTKNPGGICAFCLQEKLGKLVTSSFPLPKHLTSSSTSSSPSFRSDSVGSTTTASAANLSASLSLSVSGATNNNNSKLPFLLAKKKKKMLTASSSSSTTANIVYKRSQSTRTTKTTYGDSDLSPRKRNGFWSFFHLYSSKQHGSSKKVGNFHQPISQTETKTELAETTTVGSSSSSSASSSMSKRVVGGGGSSSNRNGIDVIVEEDGSPNIEVTPSERKVSRSRSVGCGSRSFSGDFFERITNGFGDCTLRRVESQREGNNNKGNKVSSNPSNGVREMVRCGGIFGGFMIMTSSSSSSSSSSWVSSSSAEHHHHHNHNMGHGGGGRNRSWGWSFASPMRAFTSSSYSGKRGRTISDSTTSKNTTPNLGAIPSLLSVRS

SEQ ID NO: 2146 - DNA, 1606 bp, Arabidopsis thaliana
gacaaaactagtaccacctaacacaaacgctgtcgttttcaagctacatttatatatctcccaccaactctttctcagatcttttgtctaagtaaaagcgaaaagggcaacaaacaaaaataaactcggagaatctcacaacaatcatggcggctacgacgaactctttccttgtcggaagcaacaacactcagattcctgctttgaaacccaaatcatcatctcaatcctttcttcacctcagcaaaccaaacaccgtcaacttcgtcagcaaaaccaagcccgtcgctgttagatgcgtcgcttcaacgactcaagttcaagatggagttagatccggctccgtcggatcccaagaacgtgtcttcaacttcgcggcgggtccagccactttgcctgagaacgttctcctaaaagctcaggcggatctatacaactggcgtggatctggcatgagtgtgatggagatgagtcacagaggcaaagagtttctctcgattatacaaaaagctgaatcggatcttcgtcagcttctcgagattcctcaggaatattccgttttgttcttacaaggtggtgccactactcaattcgctgctttacctctcaatctctgcaaatcggatgatacagtcgatttcgttgttactggttcgtggggtgataaagctgtcaaggaagcgaagaagtattgcaagactaatgtgatttggtctgggaaatctgagaaatacacaaaggttccatcttttgaggagttggagcaaactccggacgctaagtatttgcatatatgcgccaatgagactattcatggagttgagtttaaagattaccctgttcctaaaaatgggttcttggttgctgatatgtcttctaacttctgttcgaaacctgttgatgtatctaagtttggtgtgatttacggtggtgcacagaagaacgttggtccatctggtgtcacaattgtgatcattcgtaaagatttgattgggaatgctcaagatattactcctgtgatgcttgattacaagattcatgatgagaatagttcgttgtacaacacgcctccttgctttgggatttacatgtgtggtcttgtgtttgaagatctgttggagcaaggtggattgaaagaagtggagaagaagaaccagaggaaagctgatttgctttacaatgctattgaagaaagcaatggctttttcagatgtcctgttgagaaatcagtgaggtcgttgatgaatgtgcctttcacattggagaagtctgaattggaagctgagtttatcaaggaagctgctaaagagaagatggtgcagctcaaaggacatagatcagtgggaggtatgagagcttctatttacaatgcaatgcctttggctggtgttgaaaagcttgttgctttcatgaaagatttccaggctaagcatgcttagttttaagggtttttgcattttggttatgtttgttgaaagatgataagctttaaagatgataagctttaaagcttatgatttgtttttttttcttcttttcagaatgaataatgtttaacaatgtatcaaaatctttctccatcaattggaaaaacaagtttgttaac

SEQ ID NO: 2147 - protein, 430 aa, Arabidopsis thaliana
MAATTNSFLVGSNNTQIPALKPKSSSQSFLHLSKPNTVNFVSKTKPVAVRCVASTTQVQDGVRSGSVGSQERVFNFAAGPATLPENVLLKAQADLYNWRGSGMSVMEMSHRGKEFLSIIQKAESDLRQLLEIPQEYSVLFLQGGATTQFAALPLNLCKSDDTVDFVVTGSWGDKAVKEAKKYCKTNVIWSGKSEKYTKVPSFEELEQTPDAKYLHICANETIHGVEFKDYPVPKNGFLVADMSSNFCSKPVDVSKFGVIYGGAQKNVGPSGVTIVIIRKDLIGNAQDITPVMLDYKIHDENSSLYNTPPCFGIYMCGLVFEDLLEQGGLKEVEKKNQRKADLLYNAIEESNGFFRCPVEKSVRSLMNVPFTLEKSELEAEFIKEAAKEKMVQLKGHRSVGGMRASIYNAMPLAGVEKLVAFMKDFQAKHA

SEQ ID NO: 2148 - protein, 328 aa, Arabidopsis thaliana
MSVMEMSHRGKEFLSIIQKAESDLRQLLEIPQEYSVLFLQGGATTQFAALPLNLCKSDDTVDFVVTGSWGDKAVKEAKKYCKTNVIWSGKSEKYTKVPSFEELEQTPDAKYLHICANETIHGVEFKDYPVPKNGFLVADMSSNFCSKPVDVSKFGVIYGGAQKNVGPSGVTIVIIRKDLIGNAQDITPVMLDYKIHDENSSLYNTPPCFGIYMCGLVFEDLLEQGGLKEVEKKNQRKADLLYNAIEESNGFFRCPVEKSVRSLMNVPFTLEKSELEAEFIKEAAKEKMVQLKGHRSVGGMRASIYNAMPLAGVEKLVAFMKDFQAKHA

SEQ ID NO: 2149 - protein, 325 aa, Arabidopsis thaliana
MEMSHRGKEFLSIIQKAESDLRQLLEIPQEYSVLFLQGGATTQFAALPLNLCKSDDTVDFVVTGSWGDKAVKEAKKYCKTNVIWSGKSEKYTKVPSFEELEQTPDAKYLHICANETIHGVEFKDYPVPKNGFLVADMSSNFCSKPVDVSKFGVIYGGAQKNVGPSGVTIVIIRKDLIGNAQDITPVMLDYKIHDENSSLYNTPPCFGIYMCGLVFEDLLEQGGLKEVEKKNQRKADLLYNAIEESNGFFRCPVEKSVRSLMNVPFTLEKSELEAEFIKEAAKEKMVQLKGHRSVGGMRASIYNAMPLAGVEKLVAFMKDFQAKHA

SEQ ID NO: 2150 - DNA, 1763 bp, Arabidopsis thaliana
aaaatttaaatcttcattgaatgctttttctgaagctttatctaataaatctcttcgttgatccttcctttccattaacgaggtagaaattccaaaacgcgtaataatcttgtcgtcattacaaattacaataaaaagaagacatttttatttagatttccctctgatcctctcttttagatttcgaatcgagaccagatctgcgtgaagatgatagagaagtgtataggagcgcatcggtttcggagattacagagattcatgcgtcaagggaaagtgacgattctttgtctcgttctcaccgtcatcgtcttacgtggcacaatcggagccggtaagtttggtacgccggagaaagatatcgaggagatccgtgagcatttcttctacacgcgtaaacgcggcgagcctcaccgtgtcctcgtcgaggtctcttccaaaacgacgtcgtccgaagacggaggaaatggtggtaacagctacgagaccttcgatatcaacaagctattcgttgatgaaggagacgaagagaaatctcgagaccggactaataaaccttattctcttggtcccaagatctctgattgggatgagcagagacgtgattggctcaaacaaaaccctagcttccctaatttcgtggcgccaaacaagcctagggttcttcttgtcacaggttcagctcctaaaccgtgtgagaatcctgtaggagaccattacctcttgaaatcgattaagaacaaaatcgattactgtagaatacacggaatcgagatcttctacaacatggcgttgctcgatgctgagatggctggattctgggctaagcttccgttgattaggaagttactcttgtcacatcctgagattgagtttctatggtggatggatagtgatgccatgttcacggacatggtgttcgagcttccatgggagaggtacaaagattacaacttggtgatgcatggttggaacgagatggtttatgaccagaagaattggattggtctcaacacgggaagtttcttgctcaggaactcacagtggtcgcttgatcttcttgacgcttgggctcctatgggcccaaaagggaagatccgagaagaagcgggtaaagtcttgacccgggaacttaaagaccgacccgctttcgaagctgacgatcaatcggcgatggtttatctgctggcgacggagagagagaaatggggaggcaaagtttatctagagagtggttattacttgcacggttattgggggattttggtagaccggtacgaggagatgattgagaatcataaaccgggttttggagaccatcggtggccattggttacgcatttcgtcgggtgtaaaccgtgcgggaaatttggagattatccggtggaacggtgtctacggcagatggatagagcgtttaatttcggagacaatcagatccttcaaatgtatggtttcacgcataaatcgcttgggagccggcgcgtgaaacccacgcgcaatcagacggataggccgctcgatgccaaggacgagtttgggctgcttcatccgccgttcaaagcggccaagcttagtacgacgacgacgtgagtgagtgagaggatatattgttttgtatcttttaattttgcgtttaggggacacacgtttatttgttttattcaattttatttgtttgtagtttacttaattgttttgatctcccattcatggtggagtcgtgtatggagtatttaatgatttattgtagacgttatttc

SEQ ID NO: 2151 - protein, 460 aa, Arabidopsis thaliana
MIEKCIGAHRFRRLQRFMRQGKVTILCLVLTVIVLRGTIGAGKFGTPEKDIEEIREHFFYTRKRGEPHRVLVEVSSKTTSSEDGGNGGNSYETFDINKLFVDEGDEEKSRDRTNKPYSLGPKISDWDEQRRDWLKQNPSFPNFVAPNKPRVLLVTGSAPKPCENPVGDHYLLKSIKNKIDYCRIHGIEIFYNMALLDAEMAGFWAKLPLIRKLLLSHPEIEFLWWMDSDAMFTDMVFELPWERYKDYNLVMHGWNEMVYDQKNWIGLNTGSFLLRNSQWSLDLLDAWAPMGPKGKIREEAGKVLTRELKDRPAFEADDQSAMVYLLATEREKWGGKVYLESGYYLHGYWGILVDRYEEMIENHKPGFGDHRWPLVTHFVGCKPCGKFGDYPVERCLRQMDRAFNFGDNQILQMYGFTHKSLGSRRVKPTRNQTDRPLDAKDEFGLLHPPFKAAKLSTTTT

SEQ ID NO: 2152 - protein, 443 aa, Arabidopsis thaliana
MRQGKVTILCLVLTVIVLRGTIGAGKFGTPEKDIEEIREHFFYTRKRGEPHRVLVEVSSKTTSSEDGGNGGNSYETFDINKLFVDEGDEEKSRDRTNKPYSLGPKISDWDEQRRDWLKQNPSFPNFVAPNKPRVLLVTGSAPKPCENPVGDHYLLKSIKNKIDYCRIHGIEIFYNMALLDAEMAGFWAKLPLIRKLLLSHPEIEFLWWMDSDAMFTDMVFELPWERYKDYNLVMHGWNEMVYDQKNWIGLNTGSFLLRNSQWSLDLLDAWAPMGPKGKIREEAGKVLTRELKDRPAFEADDQSAMVYLLATEREKWGGKVYLESGYYLHGYWGILVDRYEEMIENHKPGFGDHRWPLVTHFVGCKPCGKFGDYPVERCLRQMDRAFNFGDNQILQMYGFTHKSLGSRRVKPTRNQTDRPLDAKDEFGLLHPPFKAAKLSTTTT

SEQ ID NO: 2153 - protein, 268 aa, Arabidopsis thaliana
MALLDAEMAGFWAKLPLIRKLLLSHPEIEFLWWMDSDAMFTDMVFELPWERYKDYNLVMHGWNEMVYDQKNWIGLNTGSFLLRNSQWSLDLLDAWAPMGPKGKIREEAGKVLTRELKDRPAFEADDQSAMVYLLATEREKWGGKVYLESGYYLHGYWGILVDRYEEMIENHKPGFGDHRWPLVTHFVGCKPCGKFGDYPVERCLRQMDRAFNFGDNQILQMYGFTHKSLGSRRVKPTRNQTDRPLDAKDEFGLLHPPFKAAKLSTTTT

SEQ ID NO: 2154 - DNA, 1342 bp, Arabidopsis thaliana
atcggaaaattccagattgggaaacaccaaaacaaatcaccggcgatcggaaaccggcgacgtaagctatgagcagtacggcagggaggctcgtgacttcaaaatccgagcttgacctcgatcaccctaacatcgaagattaccttccttctggttcttccatcaatgaacctcgcggcaagctcagcctgcgtgatttgctagacatctctccaacgctcactgaagctgctggtgccattgttgatgactcgttcacaagatgtttcaaatcaaatcctccagaaccttggaactggaatatttacttattcccactatactgctttggggttgttgttagatactgtatcctctttcccttgaggtgcttcactttagcttttgggtggattattttcctttcattgtttatccctgtaaatgcgttgctgaaaggtcaagataggttgaggaaaaagatagagagggtcttggtggaaatgatttgcagcttttttgtcgcctcatggaccggagttgtcaaatatcacgggccacgtcctagcatccgtcctaagcaggtctatgttgccaaccatacttcaatgattgatttcatcgtattggagcagatgaccgcatttgctgttataatgcagaagcatcctggttgggttggtcttctgcaaagcacaatattagagagtgtgggatgtatctggttcaatcgttcagaggcaaaggatcgtgaaattgtagcaaaaaagttaagggaccatgtccaaggagctgacagtaatcctcttctcatatttcccgaagggacatgtgtaaataataattacacagtgatgtttaagaagggtgcttttgaattggactgcactgtttgtccaattgcaattaaatacaacaagatttttgttgacgccttctggaatagcagaaaacaatcatttactatgcacttgctgcaactcatgacatcatgggctgttgtatgtgaagtgtggtacttggaaccacaaaccataaggcccggtgaaacaggaattgaatttgcagagagggtcagagacatgatatctcttcgggcgggtctcaaaaaggtcccttgggatggatacttgaagtattcgagaccaagccccaagcatagtgaacgcaagcaacagagtttcgcagagtcgatcctggctagattggaagagaagtgaatgtaaagatgaagttatatttatgtgttttcatttttccattagagatactcatgagtcatgacttatgttctctatgtttctcaatacaattgtattgttgtgatttgtgaatctctcaataaacataactcacttttgcc

SEQ ID NO: 2155 - protein, 376 aa, Arabidopsis thaliana [sequence omitted]

SEQ ID NO: 2156 - protein, 238 aa, Arabidopsis thaliana
MICSFFVASWTGVVKYHGPRPSIRPKQVYVANHTSMIDFIVLEQMTAFAVIMQKHPGWVGLLQSTILESVGCIWFNRSEAKDREIVAKKLRDHVQGADSNPLLIFPEGTCVNNNYTVMFKKGAFELDCTVCPIAIKYNKIFVDAFWNSRKQSFTMHLLQLMTSWAVVCEVWYLEPQTIRPGETGIEFAERVRDMISLRAGLKKVPWDGYLKYSRPSPKHSERKQQSFAESILARLEEK

SEQ ID NO: 2157 - protein, 203 aa, Arabidopsis thaliana
MIDFIVLEQMTAFAVIMQKHPGWVGLLQSTILESVGCIWFNRSEAKDREIVAKKLRDHVQGADSNPLLIFPEGTCVNNNYTVMFKKGAFELDCTVCPIAIKYNKIFVDAFWNSRKQSFTMHLLQLMTSWAVVCEVWYLEPQTIRPGETGIEFAERVRDMISLRAGLKKVPWDGYLKYSRPSPKHSERKQQSFAESILARLEEK

SEQ ID NO: 2158 - DNA, 1545 bp, Arabidopsis thaliana
aaaaaaaaaaaacaaacagtttagcaaaagattttgagagggagaaaaagggcgatcgattagggtttttgtgttttcgtcttagtatcgaagatgatcggagctgtgaactcggtggaggctgtgataacgtcaatccaaggtttatcggggagtccagaggatttatctgcacttcacgatcttttgagaggagctcaagactcgctccgagccgaaccaggtgttaatttctctactcttgaccagctcgacgcctcgaagcactctctcggttacctgtatttccttgaggttcttacctgtggtccagtgtcgaaggagaaagctgcttatgagataccgataattgcacggttcatcaattcttgtgatgctgggcagattcgtttggcgagctataaatttgtatctctttgtaagatattgaaagaccatgttatagcactgggagatccgttgcgaggagtagggccactgttaaacgctgttcagaagcttcaggtctcctccaagcgtttgactgcattgcatccagatgttcttcaactctgtttgcaggcgaaatcgtacaaatctggtttctccattcttagtgatgatatcgtggagattgaccagccaagagacttttttctctatagctattatgggggaatgatttgtattggactgaagagatttcagaaagcattagagcttctttacaatgttgtgactgctcctatgcatcaagtcaatgccatagctcttgaggcgtacaaaaagtacatattggtgtctctcattcacaatgggcagtttactaacactctccccaagtgtgcttctacagcagcacagaggagcttcaagaactataccggaccttacattgaactgggtaattgttacaacgacgggaagattggtgaactagaggcattggttgtggccaggaatgcagaatttgaagaggataagaaccttggattagttaagcaagcagtgtcatccctttacaagcgtaacattctgagattgacacagaagtacttgaccctgtcgcttcaagatatagccaacatggtccaacttggtaatgctaaggaggcggaaatgcatgtgcttcagatgatccaggatggtcagatacatgcccttatcaaccagaaagacgggatggtcagattcttggaggaccctgagcagtacaaatctagtgagatgattgagatcatggattctgttatacaaaggactattggtctgtcgaagaatctcttagccatggatgagagcttatcatgtgaccctttatacttgggaaaggtaggaagggaaagacaaaggtacgactttggagacgatttcgatactgttcctcagaagttctccatgtaaacagcgaaagtcgagaagcaccaacaaaacttggctcaaagacaaccgtagtgtgaatcttgagaatgttacttttgatttctttgttcatttttgttggtttaaaaagtttcatatttttgtcacaattgccaacaagtagagaagaccattatggacccg

SEQ ID NO: 2159 - protein, 429 aa, Arabidopsis thaliana
MIGAVNSVEAVITSIQGLSGSPEDLSALHDLLRGAQDSLRAEPGVNFSTLDQLDASKHSLGYLYFLEVLTCGPVSKEKAAYEIPIIARFINSCDAGQIRLASYKFVSLCKILKDHVIALGDPLRGVGPLLNAVQKLQVSSKRLTALHPDVLQLCLQAKSYKSGFSILSDDIVEIDQPRDFFLYSYYGGMICIGLKRFQKALELLYNVVTAPMHQVNAIALEAYKKYILVSLIHNGQFTNTLPKCASTAAQRSFKNYTGPYIELGNCYNDGKIGELEALVVARNAEFEEDKNLGLVKQAVSSLYKRNILRLTQKYLTLSLQDIANMVQLGNAKEAEMHVLQMIQDGQIHALINQKDGMVRFLEDPEQYKSSEMIEIMDSVIQRTIGLSKNLLAMDESLSCDPLYLGKVGRERQRYDFGDDFDTVPQKFSM

SEQ ID NO: 2160 - protein, 241 aa, Arabidopsis thaliana
MICIGLKRFQKALELLYNVVTAPMHQVNAIALEAYKKYILVSLIHNGQFTNTLPKCASTAAQRSFKNYTGPYIELGNCYNDGKIGELEALVVARNAEFEEDKNLGLVKQAVSSLYKRNILRLTQKYLTLSLQDIANMVQLGNAKEAEMHVLQMIQDGQIHALINQKDGMVRFLEDPEQYKSSEMIEIMDSVIQRTIGLSKNLLAMDESLSCDPLYLGKVGRERQRYDFGDDFDTVPQKFSM

SEQ ID NO: 2161 - protein, 218 aa, Arabidopsis thaliana
MHQVNAIALEAYKKYILVSLIHNGQFTNTLPKCASTAAQRSFKNYTGPYIELGNCYNDGKIGELEALVVARNAEFEEDKNLGLVKQAVSSLYKRNILRLTQKYLTLSLQDIANMVQLGNAKEAEMHVLQMIQDGQIHALINQKDGMVRFLEDPEQYKSSEMIEIMDSVIQRTIGLSKNLLAMDESLSCDPLYLGKVGRERQRYDFGDDFDTVPQKFSM

SEQ ID NO: 2162 - DNA, 2257 bp, Arabidopsis thaliana
ataaagataataaaatttgtatatttcctctttcctctgagattcctttgtctgatcgtgaacttgtagtagtgttttcgtgatagaaaattttcaaagttaatgtgcatacactagctagtgaagaagaagaagactaactaagaatggaaggaacttgttttctccgtggacaacctctcacaacaataccctctcttcccagcagaaaagggtttcttctccaaagatggaagaccaatcggattgtcaggttttcaggttttaagaatcactcggtttctggaaagtcgaggtctttcgatcttagcctcagagcttcaggtcccattagagcaagctctgtagtaacagaagcaagccctaccaacttaaattccaaagaagaagaccttgtctttgtagccggtgctactggtaaagttggttctagaactgtgagagagctactgaagctgggatttcgggttagagctggagttcgaagtgctcagagagcaggaagtcttgtgcaaagtgttaaggaaatgaagctccagaacacagatgaaggaactcaacctgtagaaaagcttgaaattgtggagtgtgacttggagaagaaagattcaatacagcccgcattgggaaatgcatcggtgattatatgctgtattggtgctagcgagaaagagatctccgatattaccggtccttacaggatcgattacctagccaccaaaaaccttgttgatgctgcaacatcagcaaaagttaataacttcattttggtgacatccttggggacaaataaatttggatttcccgctgcgattctcaacctattctggggagttctttgctggaagagaaaagctgaagaagcattgattgaaagcggtcttaattacgcaatagttagacctggaggaatggagagaccgactgatgcatacaaagaaactcataatctcactcttgctctagacgatacattgtttggtggtcaggtctcaaatctccaggttgcagagttgcttgcttgcatggcaaagaatcctcaactttctttctctaagattgtggaagtggttgctgaaacaactgcaccattaactccaattgaaaagcttcttgaaaagattccttccaaacggccttatgtccctccaccgaaggcatcagttgcaaccaaagaggtcaaaccagtccctactaagcctgtcactcaagaaccaacagctcctaaagaggatgaagcacctccaaaagaaaaaaatgtgaaacctaggccgctgtctccttatgcctcctacgaagacttgaaacctccaacatctcctattccaaattcgaccacatcggtcagtcctgccaaatctaaggaggtagatgccactcaggttcctgttgaggccaatgtagtgccagtgccagatagtacctcaaatgtcccagtagtagaagtaaagcaagttgaggaaaagaaagagaggcctctttccccttatgcccgctatgagaacctaaaaccaccctcatcgccctctcctacagcttcgagtaccagaaagagtgattctttgtcgcctggtccaaccgattctgatactgataaaagctcaacagttgcaaaaactgtcactgagacggcagttgcaacaagtgtcactgagacctcagttgcaacaagtgtacctgagacagcagttgcaacgagtgtcactgagacagcagcaccagccacatcaaaaatgaggcctctttctccttatgcaatttacgcagacctgaaaccaccaacctcaccaactcctgcatcaacaggtcccaaggaagcagcatctgtagaagacaactcagagttacctggaggcaataatgatgtgctgaaaacagttgatggaaatctgaacacaattccaccttctacaccggaagcagtacctgttgttagcagtgcgatagacacttcccttgcttcaggagacaatacagctcagccaaagccaaggcctttatcaccttacacaatgtacgcggacatgaagcctccaacatcaccacttccatctccagtcaccaatcattagctatgtgagacgagaattggcctcctaaaccctggagcttcttcttaattgcaggttgtaaacaatgagtaagagagtgatggggcaattcagttttgcaggtatgaatcagtgagcttatttgtacaataatacaatattcatcaacatgccttatatatgagttctactttttttctcctgtc

SEQ ID NO: 2163 - protein, 641 aa, Arabidopsis thaliana
MEGTCFLRGQPLTTIPSLPSRKGFLLQRWKTNRIVRFSGFKNHSVSGKSRSFDLSLRASGPIRASSVVTEASPTNLNSKEEDLVFVAGATGKVGSRTVRELLKLGFRVRAGVRSAQRAGSLVQSVKEMKLQNTDEGTQPVEKLEIVECDLEKKDSIQPALGNASVIICCIGASEKEISDITGPYRIDYLATKNLVDAATSAKVNNFILVTSLGTNKFGFPAAILNLFWGVLCWKRKAEEALIESGLNYAIVRPGGMERPTDAYKETHNLTLALDDTLFGGQVSNLQVAELLACMAKNPQLSFSKIVEVVAETTAPLTPIEKLLEKIPSKRPYVPPPKASVATKEVKPVPTKPVTQEPTAPKEDEAPPKEKNVKPRPLSPYASYEDLKPPTSPIPNSTTSVSPAKSKEVDATQVPVEANVVPVPDSTSNVPVVEVKQVEEKKERPLSPYARYENLKPPSSPSPTASSTRKSDSLSPGPTDSDTDKSSTVAKTVTETAVATSVTETSVATSVPETAVATSVTETAAPATSKMRPLSPYAIYADLKPPTSPTPASTGPKEAASVEDNSELPGGNNDVLKTVDGNLNTIPPSTPEAVPVVSSAIDTSLASGDNTAQPKPRPLSPYTMYADMKPPTSPLPSPVTNH

SEQ ID NO: 2164 - protein, 514 aa, Arabidopsis thaliana
MKLQNTDEGTQPVEKLEIVECDLEKKDSIQPALGNASVIICCIGASEKEISDITGPYRIDYLATKNLVDAATSAKVNNFILVTSLGTNKFGFPAAILNLFWGVLCWKRKAEEALIESGLNYAIVRPGGMERPTDAYKETHNLTLALDDTLFGGQVSNLQVAELLACMAKNPQLSFSKIVEVVAETTAPLTPIEKLLEKIPSKRPYVPPPKASVATKEVKPVPTKPVTQEPTAPKEDEAPPKEKNVKPRPLSPYASYEDLKPPTSPIPNSTTSVSPAKSKEVDATQVPVEANVVPVPDSTSNVPVVEVKQVEEKKERPLSPYARYENLKPPSSPSPTASSTRKSDSLSPGPTDSDTDKSSTVAKTVTETAVATSVTETSVATSVPETAVATSVTETAAPATSKMRPLSPYAIYADLKPPTSPTPASTGPKEAASVEDNSELPGGNNDVLKTVDGNLNTIPPSTPEAVPVVSSAIDTSLASGDNTAQPKPRPLSPYTMYADMKPPTSPLPSPVTNH

SEQ ID NO: 2165 - protein, 386 aa, Arabidopsis thaliana
MERPTDAYKETHNLTLALDDTLFGGQVSNLQVAELLACMAKNPQLSFSKIVEVVAETTAPLTPIEKLLEKIPSKRPYVPPPKASVATKEVKPVPTKPVTQEPTAPKEDEAPPKEKNVKPRPLSPYASYEDLKPPTSPIPNSTTSVSPAKSKEVDATQVPVEANVVPVPDSTSNVPVVEVKQVEEKKERPLSPYARYENLKPPSSPSPTASSTRKSDSLSPGPTDSDTDKSSTVAKTVTETAVATSVTETSVATSVPETAVATSVTETAAPATSKMRPLSPYAIYADLKPPTSPTPASTGPKEAASVEDNSELPGGNNDVLKTVDGNLNTIPPSTPEAVPVVSSAIDTSLASGDNTAQPKPRPLSPYTMYADMKPPTSPLPSPVTNH

SEQ ID NO: 2166 - DNA, 3214 bp, Arabidopsis thaliana
atgattctcaaaacggctttttctctacccacacctactactactctattatctcccagctctcctcaccagctcaacactctgttcttcactcgccgacgccgtcgattaatttccccatcccgcttgaactcaattttctcgcaacgtagattctctttctctgctgctgcgtcaggaaataatgtatttacttctcccgagacatccaagacctttgatttttcttcggaggagaagatatacaaatggtgggagtcgcaaggctacttcaaaccaaattttgaccaaggaggcagtccttttgtgataccgatgccacctcctaatgttactggttctctgcacatgggccatgcaatgtttgtcactcttgaggatattatggttcgatacaataggatgaatgggagaccaacactttggcttcccgggactgatcatgctggtattgccactcagttggtcgtggaaaagatgctagcgtcagaaggcattaagagagtggacttaggtagagatgagtttaccaaaagagtctgggaatggaaggaaaagtatggcggaaccatcacaaatcagattaaaagactgggtgcttcttgtgattggagtagagagcgctttactcttgacgagcaattgagtcgagctgtggtcgaagcttttgtgaagcttcatgacaaggggttgatatatcaaggatcttacatggtcaactggtccccaaatttacagactgctgtttcagacttggaagtagaatattcggaggaacctgggtttctataccatattaaataccgtgtagctggaagtcctgattttcttactatagcaacgactcgtccagagacattgtttggtgacgtggcccttgccgtgcatcctgaggatgatcgttactcaaaatatgttggtcagacagcaattgtacctatgacatatggtcgtcatgtcccaattattgctgataagtatgttgataaggattttgggactggtgttctgaagataagtcctgggcatgatcacaacgattaccttcttgcaagaaagctaggtctccccattctgaatgtgatgaacaaggatgcaacacttaatgacgtcgctggcttgttttgtggccttgacaggtttgaggtgagggagaaactatgggcagatcttgaggagataggtttagctgttaagaaggagcctcacactttacgagttccaagatctcagcgtggtggagaagttattgagccacttgtaagcaaacaatggtttgtccacatggatcctttagctgagaaggctcttcttgctgttgaaaacaaagaacttactatcatacctgagagatttgagaagatatacaatcactggctgacaaatattaaggattggtgcataagccggcagctgtggtggggacatcgcataccagtttggtatgtggttggaaaggattgcgaggaggactacatagttgctaaaagtgctgaagaagcccttgagaaagcccttgagaagtatggaaaagatgttgaaatatatcaggatccagatgttcttgacacctggttttccagctcgttgtggccattcagcactcttggctggcctgatgtagcagcgaaggatttcaataacttctacccaacaaatatgttagaaacagggcatgacatactatttttttgggtagcaagaatggttatgatgggaatagaatttacagggaccgttccattttctcatgtctaccttcatggacttataagagactcacaagggagaaaaatgtcaaaatctcttgggaatgtgattgatccgcttgacacaattaaagattttggcactgatgctctgagatttacgattgcactaggaactgctggtcaggatctgaacttatctactgagaggttaactgcaaataaagcattcaccaacaaactctggaatgctggaaagtttgtgcttcatagtctgcctagtctaagtgatacatctgcttgggagaatttgctggacctcaagttggacaaagaggaaaccctgcttagtttacccttgcctgagtgttgggcggtgtcaaaactccatattctcattgattctgtcacagcaagctatgagaagttgttctttggggatgtaggaagagaaacatatgatttcttttggagtgactttgctgattggtatattgaagccagcaaatctcgactgtatggatctggaggcaattcagtttctctagcttctcaggcggttttgttatatgtctttgagaatatacttaagctgttgcatccgtttatgccgtttgtaaccgaggatctatggcaggcacttccctacaggaaagaagcgctcattgtgtctccatggccacaaaattcacttccaaggaatgttgaatcaataaaaagatttgagaatttacaagctctgactagagcaattcgaaatgcacgagcagagtattcagtggaaccagtaaagcgtatatctgcctcagttgttggaagtgcagaggtcattgaatatatttcgaaagagaaggaggtattagctcttctatccaggcttgacttaaacaacgtccatttttccaatgcccctcctggtgatgcaaatctatcagtccaccttgtagccagtgaaggactcgaggcatatctacctcttgcagccatggttgatatatcatctgaagtccaacgcatttctaaacgtctctccaagatgcaaactgaatatgacgccctcataactcgtctcagttcaccaaagtttgtggagaaagctccagaagaagtggtgagaggtgtaaaggagcaagtagaagaattagaagagaagataaagttgaccaaagctaggcttgattttctcaagtctactacttctttagtgtctcagtaaattcaggtagttcttattctctcaagttcggacccgaccaatagcggcccatggaccatttaattgtgatcatttgagtcgatgagactacctactattaatatttctgttttttgaggacccaattagtttgaaaatgcccccaaaaatgatcaattgtcaactattttaccagtcctattgtcggggcccataatgccttttaagcagaaagtggattttatttttattttattttgacagcagaaagtggatatattattaatttattatatttgctggttatgtt

SEQ ID NO: 2167 - protein, 974 aa, Arabidopsis thaliana
MILKTAFSLPTPTTTLLSPSSPHQLNTLFFTRRRRRLISPSRLNSIFSQRRFSFSAAASGNNVFTSPETSKTFDFSSEEKIYKWWESQGYFKPNFDQGGSPFVIPMPPPNVTGSLHMGHAMFVTLEDIMVRYNRMNGRPTLWLPGTDHAGIATQLVVEKMLASEGIKRVDLGRDEFTKRVWEWKEKYGGTITNQIKRLGASCDWSRERFTLDEQLSRAVVEAFVKLHDKGLIYQGSYMVNWSPNLQTAVSDLEVEYSEEPGFLYHIKYRVAGSPDFLTIATTRPETLFGDVALAVHPEDDRYSKYVGQTAIVPMTYGRHVPIIADKYVDKDFGTGVLKISPGHDHNDYLLARKLGLPILNVMNKDATLNDVAGLFCGLDRFEVREKLWADLEEIGLAVKKEPHTLRVPRSQRGGEVIEPLVSKQWFVHMDPLAEKALLAVENKELTIIPERFEKIYNHWLTNIKDWCISRQLWWGHRIPVWYVVGKDCEEDYIVAKSAEEALEKALEKYGKDVEIYQDPDVLDTWFSSSLWPFSTLGWPDVAAKDFNNFYPTNMLETGHDILFFWVARMVMMGIEFTGTVPFSHVYLHGLIRDSQGRKMSKSLGNVIDPLDTIKDFGTDALRFTIALGTAGQDLNLSTERLTANKAFTNKLWNAGKFVLHSLPSLSDTSAWENLLDLKLDKEETLLSLPLPECWAVSKLHILIDSVTASYEKLFFGDVGRETYDFFWSDFADWYIEASKSRLYGSGGNSVSLASQAVLLYVFENILKLLHPFMPFVTEDLWQALPYRKEALIVSPWPQNSLPRNVESIKRFENLQALTRAIRNARAEYSVEPVKRISASVVGSAEVIEYISKEKEVLALLSRLDLNNVHFSNAPPGDANLSVHLVASEGLEAYLPLAAMVDISSEVQRISKRLSKMQTEYDALITRLSSPKFVEKAPEEVVRGVKEQVEELEEKIKLTKARLDFLKSTTSLVSQ

SEQ ID NO: 2168 - protein, 869 aa, Arabidopsis thaliana
MPPPNVTGSLHMGHAMFVTLEDIMVRYNRMNGRPTLWLPGTDHAGIATQLVVEKMLASEGIKRVDLGRDEFTKRVWEWKEKYGGTITNQIKRLGASCDWSRERFTLDEQLSRAVVEAFVKLHDKGLIYQGSYMVNWSPNLQTAVSDLEVEYSEEPGFLYHIKYRVAGSPDFLTIATTRPETLFGDVALAVHPEDDRYSKYVGQTAIVPMTYGRHVPIIADKYVDKDFGTGVLKISPGHDHNDYLLARKLGLPILNVMNKDATLNDVAGLFCGLDRFEVREKLWADLEEIGLAVKKEPHTLRVPRSQRGGEVIEPLVSKQWFVHMDPLAEKALLAVENKELTIIPERFEKIYNHWLTNIKDWCISRQLWWGHRIPVWYVVGKDCEEDYIVAKSAEEALEKALEKYGKDVEIYQDPDVLDTWFSSSLWPFSTLGWPDVAAKDFNNFYPTNMLETGHDILFFWVARMVMMGIEFTGTVPFSHVYLHGLIRDSQGRKMSKSLGNVIDPLDTIKDFGTDALRFTIALGTAGQDLNLSTERLTANKAFTNKLWNAGKFVLHSLPSLSDTSAWENLLDLKLDKEETLLSLPLPECWAVSKLHILIDSVTASYEKLFFGDVGRETYDFFWSDFADWYIEASKSRLYGSGGNSVSLASQAVLLYVFENILKLLHPFMPFVTEDLWQALPYRKEALIVSPWPQNSLPRNVESIKRFENLQALTRAIRNARAEYSVEPVKRISASVVGSAEVIEYISKEKEVLALLSRLDLNNVHFSNAPPGDANLSVHLVASEGLEAYLPLAAMVDISSEVQRISKRLSKMQTEYDALITRLSSPKFVEKAPEEVVRGVKEQVEELEEKIKLTKARLDFLKSTTSLVSQ

SEQ ID NO: 2169 - protein, 858 aa, Arabidopsis thaliana
MGHAMFVTLEDIMVRYNRMNGRPTLWLPGTDHAGIATQLVVEKMLASEGIKRVDLGRDEFTKRVWEWKEKYGGTITNQIKRLGASCDWSRERFTLDEQLSRAVVEAFVKLHDKGLIYQGSYMVNWSPNLQTAVSDLEVEYSEEPGFLYHIKYRVAGSPDFLTIATTRPETLFGDVALAVHPEDDRYSKYVGQTAIVPMTYGRHVPIIADKYVDKDFGTGVLKISPGHDHNDYLLARKLGLPILNVMNKDATLNDVAGLFCGLDRFEVREKLWADLEEIGLAVKKEPHTLRVPRSQRGGEVIEPLVSKQWFVHMDPLAEKALLAVENKELTIIPERFEKIYNHWLTNIKDWCISRQLWWGHRIPVWYVVGKDCEEDYIVAKSAEEALEKALEKYGKDVEIYQDPDVLDTWFSSSLWPFSTLGWPDVAAKDFNNFYPTNMLETGHDILFFWVARMVMMGIEFTGTVPFSHVYLHGLIRDSQGRKMSKSLGNVIDPLDTIKDFGTDALRFTIALGTAGQDLNLSTERLTANKAFTNKLWNAGKFVLHSLPSLSDTSAWENLLDLKLDKEETLLSLPLPECWAVSKLHILIDSVTASYEKLFFGDVGRETYDFFWSDFADWYIEASKSRLYGSGGNSVSLASQAVLLYVFENILKLLHPFMPFVTEDLWQALPYRKEALIVSPWPQNSLPRNVESIKRFENLQALTRAIRNARAEYSVEPVKRISASVVGSAEVIEYISKEKEVLALLSRLDLNNVHFSNAPPGDANLSVHLVASEGLEAYLPLAAMVDISSEVQRISKRLSKMQTEYDALITRLSSPKFVEKAPEEVVRGVKEQVEELEEKIKLTKARLDFLKSTTSLVSQ

SEQ ID NO: 2170 - DNA, 1444 bp, Arabidopsis thaliana
actctctcacactcgttgaccaaaaaaaaaactctctctttcactgagaaatgctctgcttcactcatgtcccacctcttcctctgttctccacctccggtatctatcttccggcctccagacgattcactagtttcaggattagaatgtcttcttcttcctccatcgattctgttcctcctccaccggataacgcaatcgtccttggttgtggtggaatcgctgtagatttcttagcgacggtggattcttatcctcaagctgacgacaagatccgaagcactagcctaaaggtgcaaggaggtggaaatgctgcaaatgcgttaacttgtgctgctcgtttgggattgaattcgagactgattagtaaggtagcgaatgactctcaaggaaaaggcatgttggaggagcttgaagctgatggtgtggatacttcttttattgtggtctctaaagagggtaattcaccatttacctatatcttagttgacaaccaaacgaaaacgcgtacttgtattcacacgcctggagacccacctatgttaccaactgacctttctcaatcgagtatgctatcagcgctagaccgagccagcattgtatactttgatgtaagattacacgaaacagctttggttattgcaaaagaggcaagtcgcaagaagatacctattttagttgatacagagaaaaaaagagatggtttagatgatctcttgccattcgccgactacgttgtctgtccagaaaatttccctcagacatggacagaagtgtcttcaactcctggtgcacttgtttccatgttgttgagattgcctaaactgaaatttgtgatcgtgacctcaggtgaacatgggtgcttaatggttcaaagagcttcaaaagcagaagtatttgaatctcaagagacagacattgaaagcttgttggagacactgaagcatagaaaagactcaacgacaacatttccaacatgtgtttcatcggagacaacaaagctgaaggccaacggggtaggaacaatgaccggaagattgtttctcggaacagcggagaaaattcctccagaagagcttgtagacaccactggtgctggcgatgcattcataggagctgttctatatgccatatgcgccggcatgcccccagagaaaatgttaccatttgctgctcaagtggctggttgcagctgccgggctttgggagctcgcacgggtcttcctcaccgtacagatcctagacttgtaccctttctggtttgacactctctgtgttcctttgtcaacctttctgagtcactactttactccattgcccactttcatatattttgaatgttcttctacttattagatgaaataaaagacatggtggtatgcatcaaataatattctggttaggtttgacttttttcttattataaaaagtagtaacatatatg

SEQ ID NO: 2171 - protein, 404 aa, Arabidopsis thaliana
MLCFTHVPPLPLFSTSGIYLPASRRFTSFRIRMSSSSSIDSVPPPPDNAIVLGCGGIAVDFLATVDSYPQADDKIRSTSLKVQGGGNAANALTCAARLGLNSRLISKVANDSQGKGMLEELEADGVDTSFIVVSKEGNSPFTYILVDNQTKTRTCIHTPGDPPMLPTDLSQSSMLSALDRASIVYFDVRLHETALVIAKEASRKKIPILVDTEKKRDGLDDLLPFADYVVCPENFPQTWTEVSSTPGALVSMLLRLPKLKFVIVTSGEHGCLMVQRASKAEVFESQETDIESLLETLKHRKDSTTTFPTCVSSETTKLKANGVGTMTGRLFLGTAEKIPPEELVDTTGAGDAFIGAVLYAICAGMPPEKMLPFAAQVAGCSCRALGARTGLPHRTDPRLVPFLV

SEQ ID NO: 2172 - protein, 372 aa, Arabidopsis thaliana
MSSSSSIDSVPPPPDNAIVLGCGGIAVDFLATVDSYPQADDKIRSTSLKVQGGGNAANALTCAARLGLNSRLISKVANDSQGKGMLEELEADGVDTSFIVVSKEGNSPFTYILVDNQTKTRTCIHTPGDPPMLPTDLSQSSMLSALDRASIVYFDVRLHETALVIAKEASRKKIPILVDTEKKRDGLDDLLPFADYVVCPENFPQTWTEVSSTPGALVSMLLRLPKLKFVIVTSGEHGCLMVQRASKAEVFESQETDIESLLETLKHRKDSTTTFPTCVSSETTKLKANGVGTMTGRLFLGTAEKIPPEELVDTTGAGDAFIGAVLYAICAGMPPEKMLPFAAQVAGCSCRALGARTGLPHRTDPRLVPFLV

SEQ ID NO: 2173 - protein, 288 aa, Arabidopsis thaliana
MLEELEADGVDTSFIVVSKEGNSPFTYILVDNQTKTRTCIHTPGDPPMLPTDLSQSSMLSALDRASIVYFDVRLHETALVIAKEASRKKIPILVDTEKKRDGLDDLLPFADYVVCPENFPQTWTEVSSTPGALVSMLLRLPKLKFVIVTSGEHGCLMVQRASKAEVFESQETDIESLLETLKHRKDSTTTFPTCVSSETTKLKANGVGTMTGRLFLGTAEKIPPEELVDTTGAGDAFIGAVLYAICAGMPPEKMLPFAAQVAGCSCRALGARTGLPHRTDPRLVPFLV

SEQ ID NO: 2174 - DNA, 1192 bp, Arabidopsis thaliana
atttttttttccgattttgagattttgaaacagagcactcaagtctcaaagactccagctcatctgtctgcttcatattgaggtccaaagatgcagaaattggctgatttcaagcttcctcaattcttcaattatcctccatacttcactttgcagcctgtgagggacactcgtgagaaacagatacagctctggaaagagcttattttggattactgcaaatcccaaaagattttcttgattggtgttgaagaagatttccctctcttctcaaactctgccattgatagatctctaagtcatgaagcaagggaaacatttctttcagccattgttggtgaagggcgtgcggagtggttagataaagggcataggaaatgtcttattctgtggtaccggattcaagattgggcagacattgttcttcagtttgtgagagataatggattagaggacagtgttatgactgttgaagaaatacgttcagggacagaatcacttggaacagaacttcaagggatcgatcggacgattctaatgagggccttaaagcttctagagaacaagggcaagcttgcattgttcaagggaacatcagcagatgatgaaggcgtcaagttctctgtctgatgctactctgtgtaaacgtttttgaaattcaccatggattttgcaattgatgtgtccaaaacatctctggtaaatgatctctacaagtacttgagcatagtgcgtccgtctacactaagcttcaatgcttgcatgccccctttcctgatgttcttttgctgcttctggtttttggttagctgtcacaaaggaaacttacgtttttatgtcttttttccatttgccacttggaacaaggttcctcttctcggttaatgtcaaccttcgatggaggacggatcttaaagtccatcgacattgttgttggtattttcgctcttgctcttcctgtccaagttcctcgcctggatattggtttcctgcatttttttcccccattagatttttcagattaccaaaaacaaaattgtttttaagctgaaatgatggtacaaagtccaagttaaacacaaagagaaacttactcataaaggtcaatatctgtattaaagtctctagctcttgttccagacaccttaggagctgttttggtctgtcttcttaatagtattttccgttgctc

SEQ ID NO: 2175 - protein, 179 aa, Arabidopsis thaliana
MQKLADFKLPQFFNYPPYFTLQPVRDTREKQIQLWKELILDYCKSQKIFLIGVEEDFPLFSNSAIDRSLSHEARETFLSAIVGEGRAEWLDKGHRKCLILWYRIQDWADIVLQFVRDNGLEDSVMTVEEIRSGTESLGTELQGIDRTILMRALKLLENKGKLALFKGTSADDEGVKFSV

SEQ ID NO: 2176 - DNA, 1238 bp, Arabidopsis thaliana
agtgagtattcaatctcatagactcatagcaatggcgaatcacaacagtttcacttacatggaccatagcttcagcgatataagtctcaactttgattcctctgctttcagcgattgtaacagtgacatatcctgcgagtttccaacaactacctccgagagccgtcaacgaaaactcttcctctcttgcgccgttgataattccgatgacgtgatcagaaatctcataacgcatcttgagtcatcttcttcgatcgaggaacagaagcaagctgctatggagattagactcttatcaaagaacaaaccagagaatcgtatcaaactcgctaaagccggtgctattaaaccgttggtttctttaatctcgtcttcggatcttcagcttcaagagtatggagtcactgcggtgttgaatctatctctctgcgatgagaacaaagagatgattgtttcttccggtgcggttaaaccgctcgttaatgcgttgagattaggaacaccgacgacgaaagagaacgctgcttgtgctctgctccggttatctcaagtggaggaaaacaaaatcacgattgggagatcaggagcgattcctttactagtgaaccttctagaaaatggcggattcagagcgaagaaagacgcgtcgacggctttatactcgttgtgttcgacgaacgagaacaaaaccagagctgttgaatctgggattatgaagccgttagtggagttaatgattgattttgaatcggatatggttgataaatcagcgtttgttatgaatctgttaatgtcggcgccggaatcgaagccggcggttgtggaagaaggaggagttccggtgttggttgagattgttgaagcgggaacacagagacagaaggagataagtgtgtcgatattgttgcagctttgtgaggagagtgttgtgtatcgaaccatggtggctcgtgaaggagcggttcctccgctcgtggctttatcgcagggtagtgcgagtcgtggtgctaaggtaaaggctgaggcgttgatagagcttcttaggcaacccagacaacaacaacaacaacaacactttgaatctaacgacaacgagagataacactttagtttgggctttttattaatgggcctttgtagaatacatatcttgttaattatttgggcggcccaagctgaacacatatcttgttaattattggtcgatgtgttttgcatcaaagttgcattacttgcgc

SEQ ID NO: 2177 - protein, 366 aa, Arabidopsis thaliana
VSIQSHRLIAMANHNSFTYMDHSFSDISLNFDSSAFSDCNSDISCEFPTTTSESRQRKLFLSCAVDNSDDVIRNLITHLESSSSIEEQKQAAMEIRLLSKNKPENRIKLAKAGAIKPLVSLISSSDLQLQEYGVTAVLNLSLCDENKEMIVSSGAVKPLVNALRLGTPTTKENAACALLRLSQVEENKITIGRSGAIPLLVNLLENGGFRAKKDASTALYSLCSTNENKTRAVESGIMKPLVELMIDFESDMVDKSAFVMNLLMSAPESKPAVVEEGGVPVLVEIVEAGTQRQKEISVSILLQLCEESVVYRTMVAREGAVPPLVALSQGSASRGAKVKAEALIELLRQPRQQQQQQHFESNDNER

SEQ ID NO: 2178 - protein, 356 aa, Arabidopsis thaliana
MANHNSFTYMDHSFSDISLNFDSSAFSDCNSDISCEFPTTTSESRQRKLFLSCAVDNSDDVIRNLITHLESSSSIEEQKQAAMEIRLLSKNKPENRIKLAKAGAIKPLVSLISSSDLQLQEYGVTAVLNLSLCDENKEMIVSSGAVKPLVNALRLGTPTTKENAACALLRLSQVEENKITIGRSGAIPLLVNLLENGGFRAKKDASTALYSLCSTNENKTRAVESGIMKPLVELMIDFESDMVDKSAFVMNLLMSAPESKPAVVEEGGVPVLVEIVEAGTQRQKEISVSILLQLCEESVVYRTMVAREGAVPPLVALSQGSASRGAKVKAEALIELLRQPRQQQQQQHFESNDNER

SEQ ID NO: 2179 - protein, 347 aa, Arabidopsis thaliana
MDHSFSDISLNFDSSAFSDCNSDISCEFPTTTSESRQRKLFLSCAVDNSDDVIRNLITHLESSSSIEEQKQAAMEIRLLSKNKPENRIKLAKAGAIKPLVSLISSSDLQLQEYGVTAVLNLSLCDENKEMIVSSGAVKPLVNALRLGTPTTKENAACALLRLSQVEENKITIGRSGAIPLLVNLLENGGFRAKKDASTALYSLCSTNENKTRAVESGIMKPLVELMIDFESDMVDKSAFVMNLLMSAPESKPAVVEEGGVPVLVEIVEAGTQRQKEISVSILLQLCEESVVYRTMVAREGAVPPLVALSQGSASRGAKVKAEALIELLRQPRQQQQQQHFESNDNER

SEQ ID NO: 2180 - DNA, 1270 bp, Arabidopsis thaliana
gagtgagagagagagagagagagaagatgggggttgatttctataaggttcttgaagttgatcgaagtgctaatgacgacgagcttaagaaagcttatcgcaaactcgccatgaaatggcatcctgataagaaccctaacaacaaaaaagaagccgaagctaaattcaagcagatctctgaagcttacgatgttttgagtgatcctcagaaacgagcaatctacgagcaatacggagaagaaggtttaaaccaagccccacctcccggcgccggtggtggctatcctggaggatcagacgccggagcttctttccggttcaatcccagaagcgctgatgatatcttctccgagttctttggtttcacgaggccttcttttggtacgggaagcgactcacgcgcaggaccttctggctttaggtatggcgatgatatcttcgcttccttcagggctgctactaccggaggagaagcctccattccttctaggaaatctgctcctattgagagacaattgccttgtagcttggaggatttgtataaaggtgtctccaagaagatgaagatctctcgtgatgttcttgactcttccgggaggccaacaccggttgaggagatcttgacgatagaaattaaacccggttggaaaaaaggaacaaagataaccttcctggaaaaaggtaatgagcatcgtggagtcataccatccgatctcgttttcatcgtagacgagaaaccgcatcccgttttcaaacgagacgggaatgatcttgtggtaatgcaaaagatttctctagtggatgctctcacaggttacaccgcacaggtcactactcttgacggaagaaccttaacagttccggtaaacaatgtgatcagtccgtcgtacgaagaggtggtgaaaggagaaggcatgccgatccctaaagatccgtcaagaaaaggaaacttgagaatcagattcatcatcaagttcccttcgaagctaaccactgagcagaaatcagggatcaagcggatgttatcaccttgaatgtccaaagattgaagcatctcgtttcagttttttcaatctgctagcttttttggaatcttttagaagcagaatatgtgcttatggtttttttaatttattttggttgcattttggtaaggtttttaagggaaatacataccaccaaatgatgccggtttagttagtaatgactgacgactagtgaagtaaagtctctccttatatctctttgctaaaagcttcaatatttgttc

SEQ ID NO: 2181 - protein, 343 aa, Arabidopsis thaliana
VREREREKMGVDFYKVLEVDRSANDDELKKAYRKLAMKWHPDKNPNNKKEAEAKFKQISEAYDVLSDPQKRAIYEQYGEEGLNQAPPPGAGGGYPGGSDAGASFRFNPRSADDIFSEFFGFTRPSFGTGSDSRAGPSGFRYGDDIFASFRAATTGGEASIPSRKSAPIERQLPCSLEDLYKGVSKKMKISRDVLDSSGRPTPVEEILTIEIKPGWKKGTKITFLEKGNEHRGVIPSDLVFIVDEKPHPVFKRDGNDLVVMQKISLVDALTGYTAQVTTLDGRTLTVPVNNVISPSYEEVVKGEGMPIPKDPSRKGNLRIRFIIKFPSKLTTEQKSGIKRMLSP

SEQ ID NO: 2182 - protein, 335 aa, Arabidopsis thaliana
MGVDFYKVLEVDRSANDDELKKAYRKLAMKWHPDKNPNNKKEAEAKFKQISEAYDVLSDPQKRAIYEQYGEEGLNQAPPPGAGGGYPGGSDAGASFRFNPRSADDIFSEFFGFTRPSFGTGSDSRAGPSGFRYGDDIFASFRAATTGGEASIPSRKSAPIERQLPCSLEDLYKGVSKKMKISRDVLDSSGRPTPVEEILTIEIKPGWKKGTKITFLEKGNEHRGVIPSDLVFIVDEKPHPVFKRDGNDLVVMQKISLVDALTGYTAQVTTLDGRTLTVPVNNVISPSYEEVVKGEGMPIPKDPSRKGNLRIRFIIKFPSKLTTEQKSGIKRMLSP

SEQ ID NO: 2183 - protein, 307 aa, Arabidopsis thaliana
MKWHPDKNPNNKKEAEAKFKQISEAYDVLSDPQKRAIYEQYGEEGLNQAPPPGAGGGYPGGSDAGASFRFNPRSADDIFSEFFGFTRPSFGTGSDSRAGPSGFRYGDDIFASFRAATTGGEASIPSRKSAPIERQLPCSLEDLYKGVSKKMKISRDVLDSSGRPTPVEEILTIEIKPGWKKGTKITFLEKGNEHRGVIPSDLVFIVDEKPHPVFKRDGNDLVVMQKISLVDALTGYTAQVTTLDGRTLTVPVNNVISPSYEEVVKGEGMPIPKDPSRKGNLRIRFIIKFPSKLTTEQKSGIKRMLSP

SEQ ID NO: 2184 - DNA, 1085 bp, Arabidopsis thaliana
acagattcgatttgggtgtctttggttttggatttggtaaagcttctcggtcacttgcttggtgattgaaattgaatcgattgtgattgtgattgtgagggaattatggctcaagccgtagaagagtggtacaagcagatgccgattataacccggtcgtatctcacggcggctgtagtcaccaccgtcgggtgttcgctcgagattatatctccttataatctctacctaaatcctacccttgtggtgaagcaataccagttctggcgtcttgtcacaaatttcctttatttccgaaagatggatttggactttttgttccatatgttttttctagctcgatactgcaaactgctcgaagaaaactccttcaggggaaagaccgcggatttcctttacatgctcttattcggggcaactgttctaactggtattgttctcattggcggaatgataccttatttgtctgtttcattctccaaaatcatcttcctcagcaattcattgactttcatgatggtctatgtatggagtaaacaaaatccttacatccacatgagtttccttggcctcttcactttcacagcagcttatttaccatgggtacttcttggattctctatccttgttggtgcaagtgcatggggggattttctgggaatgatagcgggccacgcatactacttcttggcatttgtgtatccccgaatgacggatcgacgtcccttgaaaactccatctttcctcaaggccctatttgctgatgagccagtcgtgattgcaaggccagaagatgtgagatttgctcatgcgccttttgatgaaatccaccaagactgaatcttgatcctccacaaaacaccagccacaacgcacagttcaagtgtactcagataatgttattgactcttgacctttatagttgtggataatgtggaagtgagatagtgttggctctgatttttttccctagttttctgtctgcttttcttgtccgatacaaatgtgtttcctccttgtgcatatgaactcaaattgtgtacaaagtcttcaaaagtactagtttatagtttcgtcattagatc

SEQ ID NO: 2185 - protein, 244 aa, Arabidopsis thaliana
MAQAVEEWYKQMPIITRSYLTAAVVTTVGCSLEIISPYNLYLNPTLVVKQYQFWRLVTNFLYFRKMDLDFLFHMFFLARYCKLLEENSFRGKTADFLYMLLFGATVLTGIVLIGGMIPYLSVSFSKIIFLSNSLTFMMVYVWSKQNPYIHMSFLGLFTFTAAYLPWVLLGFSILVGASAWGDFLGMIAGHAYYFLAFVYPRMTDRRPLKTPSFLKALFADEPVVIARPEDVRFAHAPFDEIHQD

SEQ ID NO: 2186 - protein, 233 aa, Arabidopsis thaliana
MPIITRSYLTAAVVTTVGCSLEIISPYNLYLNPTLVVKQYQFWRLVTNFLYFRKMDLDFLFHMFFLARYCKLLEENSFRGKTADFLYMLLFGATVLTGIVLIGGMIPYLSVSFSKIIFLSNSLTFMMVYVWSKQNPYIHMSFLGLFTFTAAYLPWVLLGFSILVGASAWGDFLGMIAGHAYYFLAFVYPRMTDRRPLKTPSFLKALFADEPVVIARPEDVRFAHAPFDEIHQD

SEQ ID NO: 2187 - protein, 179 aa, Arabidopsis thaliana
MDLDFLFHMFFLARYCKLLEENSFRGKTADFLYMLLFGATVLTGIVLIGGMIPYLSVSFSKIIFLSNSLTFMMVYVWSKQNPYIHMSFLGLFTFTAAYLPWVLLGFSILVGASAWGDFLGMIAGHAYYFLAFVYPRMTDRRPLKTPSFLKALFADEPVVIARPEDVRFAHAPFDEIHQD

SEQ ID NO: 2188 - DNA, 1422 bp, Arabidopsis thaliana
aaaaaaaaaaagagttgccatggaagctcttattgcttccacttccttcttcgtccccatctccaactcttcctcctcacacattatcaataacagattcttcccttcattttattctcccaacttaaatttcgggacttttcggaaaacttccttgtcatcatcacacctcgtcttctcatcttctgcaatttccgcaccgccttcttctactgttcttactcgaaacagctattggatggtgttattggataaacctccgcattgggtttcttccaaatcagccatggtagattattatgtcgagattcttgcgaaagtactgggaaacgaaaaagatgcgcaagtgagtatatatgatgcttcctttgatacccatttcgggttttgttgtcatatcgacgaagatgcttcacgacagctcgctagtttacctggagtagtgtctattagacctgaacaggattacagttcagagaagaagaattatggcattggtagccataaaggtgtttcattgtttgatcatgggacagtaaaacattggatggtacgaatagataagccaggagttgggattgttactaaagcacagatggttgatcattgtgttcaattgctatccaaggttttgtggaatgagaaggatgcacagatgtgtctttatcatgtttcctggcagtctgatttcggattttgttgtgatctcgatgaaagaagtgctgtggagttagctggcgtacctggtgttcttgctgttgttcctgataacagtttcgagtcactaaacaaagactatgaaggcgatagtacgcaagattcaagagatcaagatgattcagagtctcctcccgtaaagacaaagaagctgtttataactggactgtctttctacacatctgagaagacattacgtgcagcatttgaagggtttggtgaactagtggaagtcaaaataattatggacaaaatatcgaagagatcaaagggctatgcctttctagagtacacgacagaggaagccgcaggcactgcactaaaagagatgaatggaaagattatcaacgggtggatgatagtagtagatgtagccaagaccaaaccgttcaggcaaaacagaagtcaaccaagtttcgggctctagaatctgagtgttagggtgatacaaccatggggatttaagatgcttcaggcgaagaaagataaggcaagtagtatcatttttcatactagatcaaatataaatttcacactatgtgacagctctgcaaaaaaaattcacatgtacatatctatatttgagtttacaagatttcggccgaatgaaaggcctactgatacaagtattatatagttgtcaccttggggcttgggcgattaacacgcttaacgagtaaataaactactactatttattttttc

SEQ ID NO: 2189 - protein, 380 aa, Arabidopsis thaliana
KKKRVAMEALIASTSFFVPISNSSSSHIINNRFFPSFYSPNLNFGTFRKTSLSSSHLVFSSSAISAPPSSTVLTRNSYWMVLLDKPPHWVSSKSAMVDYYVEILAKVLGNEKDAQVSIYDASFDTHFGFCCHIDEDASRQLASLPGVVSIRPEQDYSSEKKNYGIGSHKGVSLFDHGTVKHWMVRIDKPGVGIVTKAQMVDHCVQLLSKVLWNEKDAQMCLYHVSWQSDFGFCCDLDERSAVELAGVPGVLAVVPDNSFESLNKDYEGDSTQDSRDQDDSESPPVKTKKLFITGLSFYTSEKTLRAAFEGFGELVEVKIIMDKISKRSKGYAFLEYTTEEAAGTALKEMNGKIINGWMIVVDVAKTKPFRQNRSQPSFGL

SEQ ID NO: 2190 - protein, 374 aa, Arabidopsis thaliana
MEALIASTSFFVPISNSSSSHIINNRFFPSFYSPNLNFGTFRKTSLSSSHLVFSSSAISAPPSSTVLTRNSYWMVLLDKPPHWVSSKSAMVDYYVEILAKVLGNEKDAQVSIYDASFDTHFGFCCHIDEDASRQLASLPGVVSIRPEQDYSSEKKNYGIGSHKGVSLFDHGTVKHWMVRIDKPGVGIVTKAQMVDHCVQLLSKVLWNEKDAQMCLYHVSWQSDFGFCCDLDERSAVELAGVPGVLAVVPDNSFESLNKDYEGDSTQDSRDQDDSESPPVKTKKLFITGLSFYTSEKTLRAAFEGFGELVEVKIIMDKISKRSKGYAFLEYTTEEAAGTALKEMNGKIINGWMIVVDVAKTKPFRQNRSQPSFGL

SEQ ID NO: 2191 - protein, 301 aa, Arabidopsis thaliana
MVLLDKPPHWVSSKSAMVDYYVEILAKVLGNEKDAQVSIYDASFDTHFGFCCHIDEDASRQLASLPGVVSIRPEQDYSSEKKNYGIGSHKGVSLFDHGTVKHWMVRIDKPGVGIVTKAQMVDHCVQLLSKVLWNEKDAQMCLYHVSWQSDFGFCCDLDERSAVELAGVPGVLAVVPDNSFESLNKDYEGDSTQDSRDQDDSESPPVKTKKLFITGLSFYTSEKTLRAAFEGFGELVEVKIIMDKISKRSKGYAFLEYTTEEAAGTALKEMNGKIINGWMIVVDVAKTKPFRQNRSQPSFGL

SEQ ID NO: 2192 - DNA, 1531 bp, Arabidopsis thaliana
atgatattttttgaccagctcgattcagaaatttggaaagactagcttttttttctctcgggtttcactttttaaaggtcgtgaaaatttgggaatcactgatcaattttgttaatatgatttcctgatttagggtttctctgcatgcctctagaatcagcaagtgtaaagcaattaccatggtgactccgaagcagatcgatttctcttcctgtggtggtggtgataactccgacgataccctctcccatcgagaatctccacggaatccttcctcaaagcgtgctgctgcttccttcgcagcagaagcaggcgaagagactatgaagaagaaaaagaagaagaagaagaagaatttgggtccgccgttgatcgtccggatctggaacgaggaagatgagctctctatcttaaagggattagttgattacagagctaagacaggattcaatcccaaaattgattgggatgcgttttacagtttcctcggaagttctatcgttgcgaaattctccaaggagcaggttttgagtaagatcaggaagttgaaaaggagatttcatgttcattgggagaaaatcagtgaagggaatgatccgaaatttactaggtctagtgattctgaagcctttggattttcttcgatgatttggggacaaggtgaatttggtaatgatgatggtatggataaggagatggtgaaggagcacgatgtaaacggaaatggcgcagctgaaaatgggactgctcgaatagcacaggagaacgagagtggggaggagatgttaaaggagcatgaggaaacgttaaatgagaatggtgcagaggagataagagacaacgacgagactgctcggaaagcacagcagctcgagagcgagagcgaggaggagatgttgaaggagcatgaggaaccctttaatgagaatggtgcagagaatataagagacaataacgggactactcaaatagcacagcagagcgagagcgagagtgaggagatgttgaaggagcatgaggaagtggctaatactgaacttgtaaatgagaatggggcagcgaaaacaacagagaacgggactactggtggaaaagagagacatgatgacgatgatgatgatgagttatgcgctgtgcaggatgcatttgaggctgtaatgtcgcaaggtttaagtggttatcaaaagaagttgcagcttgagaagctgatgaaccttggaactggaaaaagaagagagttgagtgatgaatggaaagcgttatgtgttgaggaaagaagattgaatatcaagaagcttagattttccgccaagcttgcagaggcagctaatgatagttagatgaaaccaataagccgttgtagcatttggtgttaattaggttcttagtaagccataagctttagtctgttcagtgtatatctttggatgttgtctttgttctgtttgggcaagtgtttgtaagacattccagttttaactgaagtatccagaagagccatccatgtccattgttggatataataaatttc

SEQ ID NO: 2193 - protein, 386 aa, Arabidopsis thaliana
MVTPKQIDFSSCGGGDNSDDTLSHRESPRNPSSKRAAASFAAEAGEETMKKKKKKKKKNLGPPLIVRIWNEEDELSILKGLVDYRAKTGFNPKIDWDAFYSFLGSSIVAKFSKEQVLSKIRKLKRRFHVHWEKISEGNDPKFTRSSDSEAFGFSSMIWGQGEFGNDDGMDKEMVKEHDVNGNGAAENGTARIAQENESGEEMLKEHEETLNENGAEEIRDNDETARKAQQLESESEEEMLKEHEEPFNENGAENIRDNNGTTQIAQQSESESEEMLKEHEEVANTELVNENGAAKTTENGTTGGKERHDDDDDDELCAVQDAFEAVMSQGLSGYQKKLQLEKLMNLGTGKRRELSDEWKALCVEERRLNIKKLRFSAKLAEAANDS

SEQ ID NO: 2194 - protein, 338 aa, Arabidopsis thaliana
MKKKKKKKKKNLGPPLIVRIWNEEDELSILKGLVDYRAKTGFNPKIDWDAFYSFLGSSIVAKFSKEQVLSKIRKLKRRFHVHWEKISEGNDPKFTRSSDSEAFGFSSMIWGQGEFGNDDGMDKEMVKEHDVNGNGAAENGTARIAQENESGEEMLKEHEETLNENGAEEIRDNDETARKAQQLESESEEEMLKEHEEPFNENGAENIRDNNGTTQIAQQSESESEEMLKEHEEVANTELVNENGAAKTTENGTTGGKERHDDDDDDELCAVQDAFEAVMSQGLSGYQKKLQLEKLMNLGTGKRRELSDEWKALCVEERRLNIKKLRFSAKLAEAANDS

SEQ ID NO: 2195 - protein, 231 aa, Arabidopsis thaliana
MIWGQGEFGNDDGMDKEMVKEHDVNGNGAAENGTARIAQENESGEEMLKEHEETLNENGAEEIRDNDETARKAQQLESESEEEMLKEHEEPFNENGAENIRDNNGTTQIAQQSESESEEMLKEHEEVANTELVNENGAAKTTENGTTGGKERHDDDDDDELCAVQDAFEAVMSQGLSGYQKKLQLEKLMNLGTGKRRELSDEWKALCVEERRLNIKKLRFSAKLAEAANDS

SEQ ID NO: 2196 - DNA, 1626 bp, Arabidopsis thaliana
agtatttttttgttttctgttatttttcgcctgagactgggtccctgagatttcacaaaactcgttattgaaacttaacaaaacagcaacctccgttattaaagttcccttctcgatttccgtgaaaatttcactttagccatggaacctcctagtagcgtagtcgacgatgctgagttttggcttccgacggagtttctcactgacgatgattttctcgttgagaaggagaataacagtgtaggaatcgatgactccttgttcccgtacgagcctcgtcatggatttgggacttttggctctaccgttaagcctaacacggtgaaggaagatgacgaggagagtttcttagccggattgactcggcagatggttatgtcatctctcaaagatgatttctccggtggagtttgcggtaatcacgcttttccggccggtaatgaccacaaggcgtgggaaatgaatcgttcgcctccgtgtgtcgccggaactggctgttgttgcttgaatcagcggtttaaccagaaccttaattcgcgagtttcttcatgggatctgtactgtgctgcggagaggatgagtatcaacgacgaaccataccatagtggcagaggacttctcggatctcccgcaaaactttccgctaccgtcaaaaaccactctaacaacggcaccggttactacaacaatcatcaatctctccaataccagaagctacaagctatccagtttcagcagctaaagcagcaacagttaatgaaacatcgtcgccaattggtgcgtcagaacagaggagtaagagttaatggcaacaaaaatgttggtccagtggatttgtcgtcttctgcatggtctaatcagtttccgaggcgtgatgttatgagagctgtattcatcggggaccataccggaaaacgtggctcaaccggaaccggtgtcttcttacctcgaagtgttaaccatacttcaagaactgagactcgagagaagcctactatatcgacggttttggttccggctagactggctcaggtcctgaatctgaatttaggcgaaccggtccggtctacggctactctcaacgatgtgtcgtggagacagaggagcaacaatggtgggttctcgagccagatggtcggtggcgtgagggcggagcagtcagtgcaagagcctcggttaccatcggagtgggcttattgactgattttatgttcgtaacttttgggtgtgtttagggggaagattttatgatgggtttggtttgaagaaagattagagttgatgacaggtagtgaaatagtggaaaaaaggttagggttaatgtagagatagtggaagatttggaagaagaataaagaaagttggaagtgtggagaggacgaggttttggatcgtttaaccaccattgatggcttgatagatgaagaaaagagctttgagacagacagagataggtgactctcttttctttttttttgggtttttcttttttacttttttactgggaaatgaaatgtcagtctgtcacggggctgttcctttagtgtcatccctctctgcctctcttttgttcacacaactcttaagcaatggataagtaagtaattagtaaaagaaaagtttgtt

SEQ ID NO: 2197 - protein, 352 aa, Arabidopsis thaliana
MEPPSSVVDDAEFWLPTEFLTDDDFLVEKENNSVGIDDSLFPYEPRHGFGTFGSTVKPNTVKEDDEESFLAGLTRQMVMSSLKDDFSGGVCGNHAFPAGNDHKAWEMNRSPPCVAGTGCCCLNQRFNQNLNSRVSSWDLYCAAERMSINDEPYHSGRGLLGSPAKLSATVKNHSNNGTGYYNNHQSLQYQKLQAIQFQQLKQQQLMKHRRQLVRQNRGVRVNGNKNVGPVDLSSSAWSNQFPRRDVMRAVFIGDHTGKRGSTGTGVFLPRSVNHTSRTETREKPTISTVLVPARLAQVLNLNLGEPVRSTATLNDVSWRQRSNNGGFSSQMVGGVRAEQSVQEPRLPSEWAY

SEQ ID NO: 2198 - protein, 276 aa, Arabidopsis thaliana
MVMSSLKDDFSGGVCGNHAFPAGNDHKAWEMNRSPPCVAGTGCCCLNQRFNQNLNSRVSSWDLYCAAERMSINDEPYHSGRGLLGSPAKLSATVKNHSNNGTGYYNNHQSLQYQKLQAIQFQQLKQQQLMKHRRQLVRQNRGVRVNGNKNVGPVDLSSSAWSNQFPRRDVMRAVFIGDHTGKRGSTGTGVFLPRSVNHTSRTETREKPTISTVLVPARLAQVLNLNLGEPVRSTATLNDVSWRQRSNNGGFSSQMVGGVRAEQSVQEPRLPSEWAY

SEQ ID NO: 2199 - protein, 274 aa, Arabidopsis thaliana
MSSLKDDFSGGVCGNHAFPAGNDHKAWEMNRSPPCVAGTGCCCLNQRFNQNLNSRVSSWDLYCAAERMSINDEPYHSGRGLLGSPAKLSATVKNHSNNGTGYYNNHQSLQYQKLQAIQFQQLKQQQLMKHRRQLVRQNRGVRVNGNKNVGPVDLSSSAWSNQFPRRDVMRAVFIGDHTGKRGSTGTGVFLPRSVNHTSRTETREKPTISTVLVPARLAQVLNLNLGEPVRSTATLNDVSWRQRSNNGGFSSQMVGGVRAEQSVQEPRLPSEWAY

SEQ ID NO: 2200 - DNA, 1200 bp, Arabidopsis thaliana
aagaagaggagccaagtaccaaactttttccttcagggttttcctctcaaaatcccaacttggcctctgtttttgctttcttttatgttctcttcttctctaaaaaccatctcatacttccaagaatttctctcacaaagaccaagaactcaaaatgtatcaagattctggattaatgctccgttacatgcaaaactgtcccccagatattcaacaattcgaagacctcttcaaatcatacaaactctccgatgaaatgaacaacacttttgttgagtcatcaaacatatctgagtatgatattggagaagaaagtgatctttttagagctcctgatccaattcttgaagaaccaatcttaaccgttgatccactctctgctgctttgactatgatctcttgtggtgaagacacttcacaaggtctttgtgagcttcctgatcttggttcattgcagagtggtcaacagcttcttgacaaagctttttatgaatgtgagcaagatcttatgatgaaatcagctatggagtctccattctctgatgttttagacatcaagaacatctctgttgtgacgacaatcaatgagaaccaggatatgcaaaagagtgttagctcggggaatttgagctctatggattggtcacatgcacaacaagagactgtaatgattcagaattttcctgatttcgattttggttatggaatgcgaagagcctttagtgaaggcgacatacagaaacttggggcaggtcttgttcaatctccactagataggattattgtgagctgcacttcagaagatcgccgtgagaagctttctcgatacaagaacaagaagagcaggcgaaatttcgggcgtaagattaagtatgcttgcaggaaagctcttgcagatagccaaccgagagtccgaggaaggtttgcgaaaacagaggagaggaaatagaatggttcaagaaaagggctcaaaggaaggagactaagcaaaaggaagaaacatgaagaataaggagataaagcccatctcattagaaactagttttgttttatatatctatgtataaactttaaaatcttataagcatccaattagttttttgtatataaagggtttctctaaataagctttaagtaaagaaattgtagctaaagaaagtttgtattattgtagtttaaagaagtaatgtatcagtgggt

SEQ ID NO: 2201 - protein, 264 aa, Arabidopsis thaliana
MYQDSGLMLRYMQNCPPDIQQFEDLFKSYKLSDEMNNTFVESSNISEYDIGEESDLFRAPDPILEEPILTVDPLSAALTMISCGEDTSQGLCELPDLGSLQSGQQLLDKAFYECEQDLMMKSAMESPFSDVLDIKNISVVTTINENQDMQKSVSSGNLSSMDWSHAQQETVMIQNFPDFDFGYGMRRAFSEGDIQKLGAGLVQSPLDRIIVSCTSEDRREKLSRYKNKKSRRNFGRKIKYACRKALADSQPRVRGRFAKTEERK

SEQ ID NO: 2202 - protein, 257 aa, Arabidopsis thaliana
MLRYMQNCPPDIQQFEDLFKSYKLSDEMNNTFVESSNISEYDIGEESDLFRAPDPILEEPILTVDPLSAALTMISCGEDTSQGLCELPDLGSLQSGQQLLDKAFYECEQDLMMKSAMESPFSDVLDIKNISVVTTINENQDMQKSVSSGNLSSMDWSHAQQETVMIQNFPDFDFGYGMRRAFSEGDIQKLGAGLVQSPLDRIIVSCTSEDRREKLSRYKNKKSRRNFGRKIKYACRKALADSQPRVRGRFAKTEERK

SEQ ID NO: 2203 - protein, 253 aa, Arabidopsis thaliana
MQNCPPDIQQFEDLFKSYKLSDEMNNTFVESSNISEYDIGEESDLFRAPDPILEEPILTVDPLSAALTMISCGEDTSQGLCELPDLGSLQSGQQLLDKAFYECEQDLMMKSAMESPFSDVLDIKNISVVTTINENQDMQKSVSSGNLSSMDWSHAQQETVMIQNFPDFDFGYGMRRAFSEGDIQKLGAGLVQSPLDRIIVSCTSEDRREKLSRYKNKKSRRNFGRKIKYACRKALADSQPRVRGRFAKTEERK

SEQ ID NO: 2204 - DNA, 1761 bp, Arabidopsis thaliana
gcagcagcaaatactatcatcacccatctccttagttctattttataattcctcttctttttgttcatagctttgtaattatagtcttatttctctttaaggctcaataagaggagatgggtgaaaccgctgccgccaataaccaccgtcaccaccaccatcacggccaccaggtctttgacgtggccagccacgatttcgtccctccacaaccggcttttaaatgcttcgatgatgatggccgcctcaaaagaactgggactgtttggaccgcgagcgctcatataataactgcggttatcggatccggcgttttgtcattggcgtgggcgattgcacagctcggatggatcgctggccctgctgtgatgctattgttctctcttgttactctttactcctccacacttcttagcgactgctacagaaccggcgatgcagtgtctggcaagagaaactacacttacatggatgccgttcgatcaattctcggtgggttcaagttcaagatttgtgggttgattcaatacttgaatctctttggtatcgcaattggatacacgatagcagcttccataagcatgatggcgatcaagagatccaactgcttccacaagagtggaggaaaagacccatgtcacatgtccagtaatccttacatgatcgtatttggtgtggcagagatcttgctctctcaggttcctgatttcgatcagatttggtggatctccattgttgcagctgttatgtccttcacttactctgccattggtctagctcttggaatcgttcaagttgcagcgaatggagttttcaaaggaagtctcactggaataagcatcggaacagtgactcaaacacagaagatatggagaaccttccaagcacttggagacattgcctttgcgtactcatactctgttgtcctaatcgagattcaggatactgtaagatccccaccggcggaatcgaaaacgatgaagaaagcaacaaaaatcagtattgccgtcacaactatcttctacatgctatgtggctcaatgggttatgccgcttttggagatgcagcaccgggaaacctcctcaccggttttggattctacaacccgttttggctccttgacatagctaacgccgccattgttgtccacctcgttggagcttaccaagtctttgctcagcccatctttgcctttattgaaaaatcagtcgcagagagatatccagacaatgacttcctcagcaaggaatttgaaatcagaatccccggatttaagtctccttacaaagtaaacgttttcaggatggtttacaggagtggctttgtcgttacaaccaccgtgatatcgatgctgatgccgttttttaacgacgtggtcgggatcttaggggcgttagggttttggcccttgacggtttattttccggtggagatgtatattaagcagaggaaggttgagaaatggagcacgagatgggtgtgtttacagatgcttagtgttgcttgtcttgtgatctcggtggtcgccggggttggatcaatcgccggagtgatgcttgatcttaaggtctataagccattcaagtctacatattgatgattatggaccatgaacaacagagagagttggtgtgtaaagtttaccatttcaaagaaaactccaaaaatgtgtatattgtatgttgttctcatttcgtatggtctcatctttgtaataaaatttaaaacttatgttataaattataaaaccgtgtgtttcc

SEQ ID NO: 2205 - protein, 493 aa, Arabidopsis thaliana
MGETAAANNHRHHHHHGHQVFDVASHDFVPPQPAFKCFDDDGRLKRTGTVWTASAHIITAVIGSGVLSLAWAIAQLGWIAGPAVMLLFSLVTLYSSTLLSDCYRTGDAVSGKRNYTYMDAVRSILGGFKFKICGLIQYLNLFGIAIGYTIAASISMMAIKRSNCFHKSGGKDPCHMSSNPYMIVFGVAEILLSQVPDFDQIWWISIVAAVMSFTYSAIGLALGIVQVAANGVFKGSLTGISIGTVTQTQKIWRTFQALGDIAFAYSYSVVLIEIQDTVRSPPAESKTMKKATKISIAVTTIFYMLCGSMGYAAFGDAAPGNLLTGFGFYNPFWLLDIANAAIVVHLVGAYQVFAQPIFAFIEKSVAERYPDNDFLSKEFEIRIPGFKSPYKVNVFRMVYRSGFVVTTTVISMLMPFFNDVVGILGALGFWPLTVYFPVEMYIKQRKVEKWSTRWVCLQMLSVACLVISVVAGVGSIAGVMLDLKVYKPFKSTY

SEQ ID NO: 2206 - protein, 409 aa, Arabidopsis thaliana
MLLFSLVTLYSSTLLSDCYRTGDAVSGKRNYTYMDAVRSILGGFKFKICGLIQYLNLFGIAIGYTIAASISMMAIKRSNCFHKSGGKDPCHMSSNPYMIVFGVAEILLSQVPDFDQIWWISIVAAVMSFTYSAIGLALGIVQVAANGVFKGSLTGISIGTVTQTQKIWRTFQALGDIAFAYSYSVVLIEIQDTVRSPPAESKTMKKATKISIAVTTIFYMLCGSMGYAAFGDAAPGNLLTGFGFYNPFWLLDIANAAIVVHLVGAYQVFAQPIFAFIEKSVAERYPDNDFLSKEFEIRIPGFKSPYKVNVFRMVYRSGFVVTTTVISMLMPFFNDVVGILGALGFWPLTVYFPVEMYIKQRKVEKWSTRWVCLQMLSVACLVISVVAGVGSIAGVMLDLKVYKPFKSTY

SEQ ID NO: 2207 - protein, 376 aa, Arabidopsis thaliana
MDAVRSILGGFKFKICGLIQYLNLFGIAIGYTIAASISMMAIKRSNCFHKSGGKDPCHMSSNPYMIVFGVAEILLSQVPDFDQIWWISIVAAVMSFTYSAIGLALGIVQVAANGVFKGSLTGISIGTVTQTQKIWRTFQALGDIAFAYSYSVVLIEIQDTVRSPPAESKTMKKATKISIAVTTIFYMLCGSMGYAAFGDAAPGNLLTGFGFYNPFWLLDIANAAIVVHLVGAYQVFAQPIFAFIEKSVAERYPDNDFLSKEFEIRIPGFKSPYKVNVFRMVYRSGFVVTTTVISMLMPFFNDVVGILGALGFWPLTVYFPVEMYIKQRKVEKWSTRWVCLQMLSVACLVISVVAGVGSIAGVMLDLKVYKPFKSTY

SEQ ID NO: 2208 - DNA, 1483 bp, Arabidopsis thaliana
acacattttagccttctaaaacgctcaggttgggaacaactatttgccttaaagagtggtaaagatatttccagcaaaattcaactacaaactttcgtattttacccgtccaacaaactttccattcgcgcaggttagcaatcactaaacacgttcactcctctagacgtgcaagttagtaaccacactaaaattgctaataaatctttggttggtgaaattcaaactttccgcttatgtctcttcccaaatacatcatttgttgaatagcgtacgttggcaactattgccaaacttttaatgatatttccatctaattcaacttcctatgcgcgcatgttagcaatcatcccaaatacatcattcgttgaatagtgtatgttctatttgccaaactttcaatgatgtatatccatctaaaccagcttttattcgcgcatgttagcaatcacaataacacgtctactcttcttagcgactagtattttgtcaaaagtcggaagaaaatctccggccaagtcaacttctatcgctttaaaaagcgcatgttagctattaaaaagcgcacgttagcatcattttcgggaaattgctaatcaaactttccactttcgtcttcttcccgtgtatatctttaatctcctctgtttggtgactattatccaatttccaccgatcttctcctcataaaaacacctcttcctcaacgaattttttatccatgagtcgcataatgggattgttcgatctcgagaaacacttcgccttctacggtgcttaccatagcaatccgatcaacattctaatccacatcatcttcgtttggccaatcttcttctcagttttacttctcctccactcgtcgaccccaattttcgacccctctcaattagggttttctcaatcgttgaccctcgacggcgttttgcgatttaacgttgggtttatattcgccttgatttatgctctgttctatatcggtttggataagaaatctggatttgtagctgctcttatgtgtttctcttgctgggttggttccagttttcttgctgttcgactaggatcttctcttgccttaaaggttgggttagcatctcagctgttatgttggaccgggcagttcgttggccatggagtattcgagaaacgggcacctgcgctgttagacaatttactccaagcttttctcatggctcctttcttcgtgttgctcgaggttcttcaatcggttttcgggtatgaaccatatcccggttttcaagcgcgtgtgaatgccaaggtagaaagtgacatcaaggaatatagggcaaagaagcagaagaagaataagatcacataagcttggattatatataactgaagaacttgaacccattgtcgtgtttctataaccgaaatgataataagaccaccatgatccatggattgatgtatttgtgtgtaaactatgtttcaatatattgaatataatatgtttcag

SEQ ID NO: 2209 - protein, 206 aa, Arabidopsis thaliana
MSRIMGLFDLEKHFAFYGAYHSNPINILIHIIFVWPIFFSVLLLLHSSTPIFDPSQLGFSQSLTLDGVLRFNVGFIFALIYALFYIGLDKKSGFVAALMCFSCWVGSSFLAVRLGSSLALKVGLASQLLCWTGQFVGHGVFEKRAPALLDNLLQAFLMAPFFVLLEVLQSVFGYEPYPGFQARVNAKVESDIKEYRAKKQKKNKIT

SEQ ID NO: 2210 - protein, 202 aa, Arabidopsis thaliana
MGLFDLEKHFAFYGAYHSNPINILIHIIFVWPIFFSVLLLLHSSTPIFDPSQLGFSQSLTLDGVLRFNVGFIFALIYALFYIGLDKKSGFVAALMCFSCWVGSSFLAVRLGSSLALKVGLASQLLCWTGQFVGHGVFEKRAPALLDNLLQAFLMAPFFVLLEVLQSVFGYEPYPGFQARVNAKVESDIKEYRAKKQKKNKIT

SEQ ID NO: 2211 - protein, 108 aa, Arabidopsis thaliana
MCFSCWVGSSFLAVRLGSSLALKVGLASQLLCWTGQFVGHGVFEKRAPALLDNLLQAFLMAPFFVLLEVLQSVFGYEPYPGFQARVNAKVESDIKEYRAKKQKKNKIT

SEQ ID NO: 2212 - DNA, 1683 bp, Arabidopsis thaliana
gtcttcttcttcttcttctttttttttcgtaaaaattcttcttcttcttcttcttctccgagctccgtccgagcagagaagaagagtaaggtaagttttagagtgcacttgtgtggcactctcatttcttatcctgcgcctcttacgatttcttatggtgcgcttctccgactagtttcggtgtctaatggactcttcctcttcttctctatctctccaagaaaaaatctcttctggttatttctagggtttcgttggttcttttttcgaaatgctttggataacgagatttgctggattattctccgccgcgatggcagtgatcgtgttatctccgtcgcttcagtcatttcctccggcggcggcaatccgttcttctccatcaccgatcttcagaaaagctccagcggtgttcaacaacggcgacgaatgtctctcctccggcggcgtctgcaatccgtcgttggtccacgtggcgatcacgttagacgtagagtacctgcgtggctcaatcgcagccgttaactcgatccttcagcactcggtgtgtccagagagcgtcttcttccacttcatcgccgtctccgaggaaacaaacctgttggagtcgctggtgagatcggttttcccgagactgaaattcaatatttacgattttgcccctgagacagttcgtggtttgatttcttcttccgtgagacaagctctcgagcagcctctgaactacgctagaagctacttagcggatctgctggagccttgtgttaaccgtgtcatatacttggattcggatcttgtcgtcgtcgatgacatcgctaagctttggaaaactagcctaggctcgaggataatcggagctccggagtattgtcacgcgaatttcacgaaatacttcaccggaggattctggtcggaggagagattctccggtacctttagagggaggaagccatgttacttcaacacaggtgtgatggtgatagatcttaagaaatggagaagaggtggttacacgaaacgtatcgagaaatggatggagattcagagaagagagaggatttacgaactaggctcgcttccaccgtttcttctagttttctccggtcacgtggctcccatctctcaccggtggaaccagcatggacttggtggtgacaatgttagaggtagctgtcgtgatttgcatcctggtcctgtgagtttgctgcattggtctggtagtggcaagccctggataagactcgattccaaacggccttgtcccttagacgcattatggacgccttacgacttgtatcgacattcgcattgacgtttcagcgaatggtggtgctatatgaggagagagtagaggaaggtttcattggtcttgaccggcccagtctgaaagaaaatcaaaggtagcttttgtagtagaagatgaaaaccctttgccgataaaatgggtttggtttagccaaaccggagacacaactgagatgtgggaattttattttcaaaccggcgggttggatcatatttttttttgttttgttgggggacaagaaaaatcaatcagagttaggttattcatgtggatgagattctgtttttttttttatcattaatttgtgtttaaaaaacattctttcttattttgtgcagatacttattctctttgaaaaataataattagaattaccc

SEQ ID NO: 2213 - protein, 346 aa, Arabidopsis thaliana
MLWITRFAGLFSAAMAVIVLSPSLQSFPPAAAIRSSPSPIFRKAPAVFNNGDECLSSGGVCNPSLVHVAITLDVEYLRGSIAAVNSILQHSVCPESVFFHFIAVSEETNLLESLVRSVFPRLKFNIYDFAPETVRGLISSSVRQALEQPLNYARSYLADLLEPCVNRVIYLDSDLVVVDDIAKLWKTSLGSRIIGAPEYCHANFTKYFTGGFWSEERFSGTFRGRKPCYFNTGVMVIDLKKWRRGGYTKRIEKWMEIQRRERIYELGSLPPFLLVFSGHVAPISHRWNQHGLGGDNVRGSCRDLHPGPVSLLHWSGSGKPWIRLDSKRPCPLDALWTPYDLYRHSH

SEQ ID NO: 2214 - protein, 332 aa, Arabidopsis thaliana
MAVIVLSPSLQSFPPAAAIRSSPSPIFRKAPAVFNNGDECLSSGGVCNPSLVHVAITLDVEYLRGSIAAVNSILQHSVCPESVFFHFIAVSEETNLLESLVRSVFPRLKFNIYDFAPETVRGLISSSVRQALEQPLNYARSYLADLLEPCVNRVIYLDSDLVVVDDIAKLWKTSLGSRIIGAPEYCHANFTKYFTGGFWSEERFSGTFRGRKPCYFNTGVMVIDLKKWRRGGYTKRIEKWMEIQRRERIYELGSLPPFLLVFSGHVAPISHRWNQHGLGGDNVRGSCRDLHPGPVSLLHWSGSGKPWIRLDSKRPCPLDALWTPYDLYRHSH

SEQ ID NO: 2215 - protein, 174 aa, Arabidopsis thaliana
VFFFFFFFFRKNSSSSSSSPSSVRAEKKSKVSFRVHLCGTLISYPAPLTISYGALLRLVSVSNGLFLFFSISPRKNLFWLFLGFRWFFFRNALDNEICWIILRRDGSDRVISVASVISSGGGNPFFSITDLQKSSSGVQQRRRMSLLRRRLQSVVGPRGDHVRRRVPAWLNRSR

SEQ ID NO: 2216 - DNA, 1303 bp, Arabidopsis thaliana
acaacgcacttcttctgttgtcatcatcatcgtccacttgaaacaaacctgacgatcaaagagaagattgcgatcgcaaatttctccattttttcagatcgaaattgatgtcgaaagctagggtttatacagatgttaacgttgttcgtcctaaagagtattgggactacgagtctctcgttgttcaatggggtcatcaagatgattatgaggttgtgagaaaagttggtagaggaaaatacagtgaagttttcgaaggtaaaaacgtcaatacgaatgagcgttgcgttatcaagatcctcaaacccgtaaaaaagaagaagataaagagagagatcaaaatacttcagaacctatgtggtggaccaaatattgttaagctgtatgatattgttagagatgagcactccaaaacacctagcttggtatttgagtttgtcaacagtgtggactttaaagtattgtatccaacattgactgattacgatatccggtactatatttatgagcttctgaaggcattggatttctgtcactctcaaggaataatgcatagggatgttaagcctcataatgtcatgatagatcatcagctgcgtaaacttcgtctgatagattggggccttgctgagttttaccatcccggaaaagagtataatgttcgcgtggcctcgagatacttcaagggtcccgagcttttagttgatctacaggattatgactattctttagacatgtggagtcttggttgcatgtttgctggcatgatattccgtaaggaaccgttcttttatggccatgataatcatgatcaacttgtcaaaattgccaaggtgttgggaaccaatgagttagatcattacctaaacaaatatcagctagatcttgaccctcaactggaagcacttgttggaagacatgtccccaaaccatggtccaagtttatcaacgcggacaaccaacatttggtctcacctgaggcaattgattttctcgataagcttcttcagtatgatcatcaagacagattaaccgcaagagaagccatggatcatccatacttcgctcaagttaaagccgcagagagcagcagactacgaactcagtaaaaccgaagcttgattgatgatgcttactactatttttcaaccaaaaactttgtaatgattttgttgtatcaaaattgtggtaatctttactttcatagaaacataatcaacagcgaaaagaagccaacttatattaaaaaaaaaggttccacacaaagcttcattatataatcatagcaagagacttattgttg

SEQ ID NO: 2217 - protein, 333 aa, Arabidopsis thaliana
MSKARVYTDVNVVRPKEYWDYESLVVQWGHQDDYEVVRKVGRGKYSEVFEGKNVNTNERCVIKILKPVKKKKIKREIKILQNLCGGPNIVKLYDIVRDEHSKTPSLVFEFVNSVDFKVLYPTLTDYDIRYYIYELLKALDFCHSQGIMHRDVKPHNVMIDHQLRKLRLIDWGLAEFYHPGKEYNVRVASRYFKGPELLVDLQDYDYSLDMWSLGCMFAGMIFRKEPFFYGHDNHDQLVKIAKVLGTNELDHYLNKYQLDLDPQLEALVGRHVPKPWSKFINADNQHLVSPEAIDFLDKLLQYDHQDRLTAREAMDHPYFAQVKAAESSRLRTQ

SEQ ID NO: 2218 - protein, 186 aa, Arabidopsis thaliana
MHRDVKPHNVMIDHQLRKLRLIDWGLAEFYHPGKEYNVRVASRYFKGPELLVDLQDYDYSLDMWSLGCMFAGMIFRKEPFFYGHDNHDQLVKIAKVLGTNELDHYLNKYQLDLDPQLEALVGRHVPKPWSKFINADNQHLVSPEAIDFLDKLLQYDHQDRLTAREAMDHPYFAQVKAAESSRLRTQ

SEQ ID NO: 2219 - protein, 176 aa, Arabidopsis thaliana
MIDHQLRKLRLIDWGLAEFYHPGKEYNVRVASRYFKGPELLVDLQDYDYSLDMWSLGCMFAGMIFRKEPFFYGHDNHDQLVKIAKVLGTNELDHYLNKYQLDLDPQLEALVGRHVPKPWSKFINADNQHLVSPEAIDFLDKLLQYDHQDRLTAREAMDHPYFAQVKAAESSRLRTQ

SEQ ID NO: 2220 - DNA, 1488 bp, Arabidopsis thaliana
gcggctctgttgttgatcttcttctccggtgactcttactctctgtgtaaaaaagcaaaatgatgcgttccgttgacgtctacgtgaaaactctaggccctcccgtccgttcaattctctactcgatctttacctctcagcaaaaaccttcgtcgctgccttcgcttccatttcacttttcgttgcgttcgtcgtcgaatattcccactcgttgtttctccaatgtcgttgcgaaatccaattctccgatttacgattttcaaggattccgaaatctcttcactgagagggctatctcttcgtctacgacgacccccgtcgcctctgctcagccgcagcagcttcagaatcagaatcagcatccagctgaggttgatgaagagatttctatgggcttagaggacgaagccaagctttctattcctgtgcgagcttatttcttctccactagcgttgatttgagaagcttaatagagcagaacaagcagaacttcatcccacctacttcgcgtatgactaactatgttgttcttaagtttggcaatcattctgatcccactgatactactcgaggacgcataagtgggagtgagtctatttacatggtagtatttcattatggatcgattgtcttgtttaatgtaagggaacatgaggttgatgaatatcttaaagtagtggagaggcatgcctctgggttgcttccagaaatgagaaaagatgaatatgaagtaagagagaatccaaatctggacacatggatggaggtaggacgggattttatcaggttgcagttcttgaatactgatgggatcagaaccataggatgtgttctgggccagagtattgctctggattactatggccggcaggttgatggtatggtagcagaatttactgagataaaccgtcagttggagataacaggaacgtttacaatgaaaaggaaaaagctgttccagttggttggaaaggctaatgtgattctggctgatgtgattctgaagcttggtctttttgagaggtcagatatagcttggaaggatgcgaaatatggtcagatatgggagtttctgagagatgaatttgaactgacacagagttttgcaaaccttgattataagctcaagtttgtagagcacaacgttcgtttccttcaagaaatacttcagaacaggaaatcagctactctggagtggctaatcattatcctgattagtatggagatcgcgatttctttctataatatgtctcgggcatccttgtgatcgagatcatcctctgccatttctaaagcatattcatattctttattatggttaccacttttcttcacaatgcaaagtgataactttataacaaagctcataaataagaatgagtttaggagttaggactacgtttgttacagattctctttgcatttaagagcctgcttcttttcagtccaacaagacttggttatgcatataaaatcatttatttcac

SEQ ID NO: 2221 - protein, 402 aa, Arabidopsis thaliana
MMRSVDVYVKTLGPPVRSILYSIFTSQQKPSSLPSLPFHFSLRSSSNIPTRCFSNVVAKSNSPIYDFQGFRNLFTERAISSSTTTPVASAQPQQLQNQNQHPAEVDEEISMGLEDEAKLSIPVRAYFFSTSVDLRSLIEQNKQNFIPPTSRMTNYVVLKFGNHSDPTDTTRGRISGSESIYMVVFHYGSIVLFNVREHEVDEYLKVVERHASGLLPEMRKDEYEVRENPNLDTWMEVGRDFIRLQFLNTDGIRTIGCVLGQSIALDYYGRQVDGMVAEFTEINRQLEITGTFTMKRKKLFQLVGKANVILADVILKLGLFERSDIAWKDAKYGQIWEFLRDEFELTQSFANLDYKLKFVEHNVRFLQEILQNRKSATLEWLIIILISMEIAISFYNMSRASL

SEQ ID NO: 2222 - protein, 401 aa, Arabidopsis thaliana
MRSVDVYVKTLGPPVRSILYSIFTSQQKPSSLPSLPFHFSLRSSSNIPTRCFSNVVAKSNSPIYDFQGFRNLFTERAISSSTTTPVASAQPQQLQNQNQHPAEVDEEISMGLEDEAKLSIPVRAYFFSTSVDLRSLIEQNKQNFIPPTSRMTNYVVLKFGNHSDPTDTTRGRISGSESIYMVVFHYGSIVLFNVREHEVDEYLKVVERHASGLLPEMRKDEYEVRENPNLDTWMEVGRDFIRLQFLNTDGIRTIGCVLGQSIALDYYGRQVDGMVAEFTEINRQLEITGTFTMKRKKLFQLVGKANVILADVILKLGLFERSDIAWKDAKYGQIWEFLRDEFELTQSFANLDYKLKFVEHNVRFLQEILQNRKSATLEWLIIILISMEIAISFYNMSRASL

SEQ ID NO: 2223 - protein, 292 aa, Arabidopsis thaliana
MGLEDEAKLSIPVRAYFFSTSVDLRSLIEQNKQNFIPPTSRMTNYVVLKFGNHSDPTDTTRGRISGSESIYMVVFHYGSIVLFNVREHEVDEYLKVVERHASGLLPEMRKDEYEVRENPNLDTWMEVGRDFIRLQFLNTDGIRTIGCVLGQSIALDYYGRQVDGMVAEFTEINRQLEITGTFTMKRKKLFQLVGKANVILADVILKLGLFERSDIAWKDAKYGQIWEFLRDEFELTQSFANLDYKLKFVEHNVRFLQEILQNRKSATLEWLIIILISMEIAISFYNMSRASL

SEQ ID NO: 2224 - DNA, 1681 bp, Arabidopsis thaliana
gaagaagtggtaaaacaataatagaaacaggagaagcagaagtactacttcttcttcttctgctctcttctcagaccttgttttgtactttcttcttcttcttcttcttcttgtttgcgaactccgatatcttcttcactacctttgactccatttctttttcttcttcaggtgtaggcattgtcttgttatgagaagcaactgtagctggaagctcaagtatttgtttttagctgtggagcttgaatcttgatagttttcgacttctatgttattacctgtggggatatagaaacaatcatgggcttactctgcagtagaagtcgacatcatactgaagatactgatgagaatacacaggctgctgaaatcgaaagacggatagagcaagaagcaaaggctgaaaagcatattcggaagcttttgctacttggtgctggggaatctggaaaatctacaatttttaagcagataaaacttctattccaaacgggatttgatgaaggagaactaaagagctatgttccagtcattcatgccaatgtctatcagactataaaattattgcatgatggaacaaaggagtttgctcaaaatgaaacagattctgctaaatatatgttatcttctgaaagtattgcaattggggagaaactatctgagattggtggtaggttagactatccacgtcttaccaaggacatcgctgagggaatagaaacactatggaaggatcctgcaattcaggaaacttgtgctcgtggtaatgagcttcaggttcctgattgtacgaaatatctgatggagaacttgaagagactatcagatataaattatattccaactaaggaggatgtactttatgcaagagttcgcacaactggtgtcgtggaaatacagttcagccctgtgggagagaataaaaaaagtggtgaagtgtaccgattgtttgacgtgggtggacagagaaatgagaggaggaaatggattcatctgtttgaaggtgtaacagctgtgatattttgtgctgccatcagcgagtacgaccaaacgctctttgaggacgagcagaaaaacaggatgatggagaccaaggaattattcgactgggtcctgaaacaaccctgttttgagaaaacatccttcatgctgttcttgaacaagttcgacatatttgagaagaaagttcttgacgttccgttgaacgtttgcgagtggttcagagattaccaaccagtttcaagtgggaaacaagagattgagcatgcatacgagtttgtgaagaagaagtttgaggagttatattaccagaacacggcgccggatagagtggacagggtattcaaaatctacaggacgacggctttggaccagaagcttgtaaagaaaacgttcaagctcgtagatgagacactaagaaggagaaatttactggaggctggccttttatgaccttattattacatatctctagtaaattacctctccttattattataagaaaaactcgaaaactgaatgaccgtgtaatttatctttcgggacaaaagacttagcgattcaaaatctaatgtgtctcgatggctacgactagtttctattttatcattgtttttgttaacattcctctgtctttgacttcttattttttttctcatcaaaaacatctcattttgatctc

SEQ ID NO: 2225 - protein, 383 aa, Arabidopsis thaliana
MGLLCSRSRHHTEDTDENTQAAEIERRIEQEAKAEKHIRKLLLLGAGESGKSTIFKQIKLLFQTGFDEGELKSYVPVIHANVYQTIKLLHDGTKEFAQNETDSAKYMLSSESIAIGEKLSEIGGRLDYPRLTKDIAEGIETLWKDPAIQETCARGNELQVPDCTKYLMENLKRLSDINYIPTKEDVLYARVRTTGVVEIQFSPVGENKKSGEVYRLFDVGGQRNERRKWIHLFEGVTAVIFCAAISEYDQTLFEDEQKNRMMETKELFDWVLKQPCFEKTSFMLFLNKFDIFEKKVLDVPLNVCEWFRDYQPVSSGKQEIEHAYEFVKKKFEELYYQNTAPDRVDRVFKIYRTTALDQKLVKKTFKLVDETLRRRNLLEAGLL

SEQ ID NO: 2226 - protein, 277 aa, Arabidopsis thaliana
MLSSESIAIGEKLSEIGGRLDYPRLTKDIAEGIETLWKDPAIQETCARGNELQVPDCTKYLMENLKRLSDINYIPTKEDVLYARVRTTGVVEIQFSPVGENKKSGEVYRLFDVGGQRNERRKWIHLFEGVTAVIFCAAISEYDQTLFEDEQKNRMMETKELFDWVLKQPCFEKTSFMLFLNKFDIFEKKVLDVPLNVCEWFRDYQPVSSGKQEIEHAYEFVKKKFEELYYQNTAPDRVDRVFKIYRTTALDQKLVKKTFKLVDETLRRRNLLEAGLL

SEQ ID NO: 2227 - protein, 216 aa, Arabidopsis thaliana
MENLKRLSDINYIPTKEDVLYARVRTTGVVEIQFSPVGENKKSGEVYRLFDVGGQRNERRKWIHLFEGVTAVIFCAAISEYDQTLFEDEQKNRMMETKELFDWVLKQPCFEKTSFMLFLNKFDIFEKKVLDVPLNVCEWFRDYQPVSSGKQEIEHAYEFVKKKFEELYYQNTAPDRVDRVFKIYRTTALDQKLVKKTFKLVDETLRRRNLLEAGLL

SEQ ID NO: 2228 - DNA, 1980 bp, Arabidopsis thaliana
ctacgtcagggaaaaaacaatggcatcatcatcatcatcacatttgttttgacgctccaagaaaatttgcatggcgacacattctatgatcattccttctccttcttcttcttcctcgtctctcgctactgctgcgtctccgtttaaagagactctaccactctttagtagatctctcacattcccgagaaaatccttgttttctcaggttcgcttgagattcttcgccgagaaacattctcagcttgatacttcaaatgggtgtgccactaatttcgcttctttacaagattctggagatcaacttacagaggaacatgttacaaaaggagagtctactcttagtattacagttgttggagcgtcaggggacttagccaagaagaagatatttcctgcattgtttgctctcttttatgagggttgtcttcctcaggacttttctgtttttggttatgctcggactaaactcactcatgaagagcttcgtgacatgattagtagtactttaacttgccggattgatcagagggaaaaatgtggggataagatggagcagttcttgaaaagatgcttttaccattcgggtcagtataactcggaagaggattttgcggaactaaacaagaagctcaaagagaaagaggcaggaaagatatcaaacaggctgtactatttgtcgatacccccaaacatattcgttgatgtggttaggtgtgcaagtcttagagcctcctcagagaatggctggacaagggtcattgtggaaaagccatttggtcgtgactctgaatcatccggagagttaactagatgtctgaaacagtatcttacagaggagcaaatcttcaggattgatcactatttgggaaaggagcttgttgagaacctttcagtgctccgattctcaaatcttgttttcgagcctctgtggtcaagaaattacatacgcaacgttcagctgattttttctgaggatttcggaacagaagggcgtggaggttactttgatcaatatggaatcatacgagacatcatgcaaaaccatctcttgcaaatacttgcactttttgcaatggagacgccagtgagcttagatgctgaggacataagaagtgaaaaggtgaaagttttgagatcaatgaaaccgttgcggcttgaagatgtggttgttggtcaatacaaaggccataacaagggaggaaaaacttatccaggttatacagacgatccaacggttccaaatcacagtctcactcctacatttgctgcagcagccatgttcatcaacaatgcgagatgggacggtgttccttttcttatgaaagctggaaaagctctccataccagaggagcagagatcagagttcagttcagacatgtcccaggaaacttgtacaagaaaagttttgctactaatttagacaatgcaacaaatgaactagtgattagagttcagcctgatgaagggatatacctgaggatcaacaacaaagttcctggtcttggaatgagactagatcgcagcgaccttaaccttctatatcgatccaggtatccaagagagataccagatgcatatgaaagactgcttctcgatgcaatcgaaggagagaggaggttgtttatcagaagtgatgagctagatgcagcatgggatctattcacaccggctttgaaggaactagaggagaagaaaatcattcctgagctctatccatatggaagcagaggtcctgttggtgcacattaccttgcatctaagtacaatgtgagatggggagatcttggagaagcttaagctttcgacagaaacaatatgatttggtgttaatatgagtaaactaacttgtcgatattatcaatgcgtagataaatccttgttaccaaaacttgctttttctctgacattttttgattgtttttggttctaaatcgagcatttcggaggaatgtaccaaaactcttgcaggaatagac

SEQ ID NO: 2229 - protein, 576 aa, Arabidopsis thaliana
MATHSMIIPSPSSSSSSLATAASPFKETLPLFSRSLTFPRKSLFSQVRLRFFAEKHSQLDTSNGCATNFASLQDSGDQLTEEHVTKGESTLSITVVGASGDLAKKKIFPALFALFYEGCLPQDFSVFGYARTKLTHEELRDMISSTLTCRIDQREKCGDKMEQFLKRCFYHSGQYNSEEDFAELNKKLKEKEAGKISNRLYYLSIPPNIFVDVVRCASLRASSENGWTRVIVEKPFGRDSESSGELTRCLKQYLTEEQIFRIDHYLGKELVENLSVLRFSNLVFEPLWSRNYIRNVQLIFSEDFGTEGRGGYFDQYGIIRDIMQNHLLQILALFAMETPVSLDAEDIRSEKVKVLRSMKPLRLEDVVVGQYKGHNKGGKTYPGYTDDPTVPNHSLTPTFAAAAMFINNARWDGVPFLMKAGKALHTRGAEIRVQFRHVPGNLYKKSFATNLDNATNELVIRVQPDEGIYLRINNKVPGLGMRLDRSDLNLLYRSRYPREIPDAYERLLLDAIEGERRLFIRSDELDAAWDLFTPALKELEEKKIIPELYPYGSRGPVGAHYLASKYNVRWGDLGEA

SEQ ID NO: 2230 - protein, 571 aa, Arabidopsis thaliana
MIIPSPSSSSSSLATAASPFKETLPLFSRSLTFPRKSLFSQVRLRFFAEKHSQLDTSNGCATNFASLQDSGDQLTEEHVTKGESTLSITVVGASGDLAKKKIFPALFALFYEGCLPQDFSVFGYARTKLTHEELRDMISSTLTCRIDQREKCGDKMEQFLKRCFYHSGQYNSEEDFAELNKKLKEKEAGKISNRLYYLSIPPNIFVDVVRCASLRASSENGWTRVIVEKPFGRDSESSGELTRCLKQYLTEEQIFRIDHYLGKELVENLSVLRFSNLVFEPLWSRNYIRNVQLIFSEDFGTEGRGGYFDQYGIIRDIMQNHLLQILALFAMETPVSLDAEDIRSEKVKVLRSMKPLRLEDVVVGQYKGHNKGGKTYPGYTDDPTVPNHSLTPTFAAAAMFINNARWDGVPFLMKAGKALHTRGAEIRVQFRHVPGNLYKKSFATNLDNATNELVIRVQPDEGIYLRINNKVPGLGMRLDRSDLNLLYRSRYPREIPDAYERLLLDAIEGERRLFIRSDELDAAWDLFTPALKELEEKKIIPELYPYGSRGPVGAHYLASKYNVRWGDLGEA

SEQ ID NO: 2231 - protein, 435 aa, Arabidopsis thaliana
MISSTLTCRIDQREKCGDKMEQFLKRCFYHSGQYNSEEDFAELNKKLKEKEAGKISNRLYYLSIPPNIFVDVVRCASLRASSENGWTRVIVEKPFGRDSESSGELTRCLKQYLTEEQIFRIDHYLGKELVENLSVLRFSNLVFEPLWSRNYIRNVQLIFSEDFGTEGRGGYFDQYGIIRDIMQNHLLQILALFAMETPVSLDAEDIRSEKVKVLRSMKPLRLEDVVVGQYKGHNKGGKTYPGYTDDPTVPNHSLTPTFAAAAMFINNARWDGVPFLMKAGKALHTRGAEIRVQFRHVPGNLYKKSFATNLDNATNELVIRVQPDEGIYLRINNKVPGLGMRLDRSDLNLLYRSRYPREIPDAYERLLLDAIEGERRLFIRSDELDAAWDLFTPALKELEEKKIIPELYPYGSRGPVGAHYLASKYNVRWGDLGEA

SEQ ID NO: 2232 - DNA, 828 bp, Arabidopsis thaliana
atcgtcatctgtggaacggataggacgaaggaaaaagaagaagagtgaaagttgcagagcgagaaaaaatggcaaccatgtctgctcttcagagctcttttacttctctttctctatctcccagctcttccttcctcggccagcgtttaatttccccgatttccctctccgtcacttctccggtcaagcccgctgagaacccatgtcttgttcttgcaaagctcaagcgttgggaacgaaaagaatgcaaaccaaacagtcttccgattctccacaaaatgcatgtcaagtttggagatacagtcaaagtaatatctggacgcgacaagggtaaaatcggagaggttactaagattttcactcacaacagtaccattgtgatcaaagatgtgaacctcaaaacaaaacacatgaagagccgagaagagggagagcctggtcaaattgtcaagatagaagcacctatccacagctcaaatgtgatgttgtattcaaaagaaaaagacgtagtaagccgggtgggtcacaaggtacttgaagatggacagaaggtaagatatctgatcaaaacaggggaactcatcgacaccattgagaagtggaagctacttaaggaggctaaggataaggaaaccacccaagttgcagttacctccgcatcttagcgtctcatttctttcttcttcagtgcacttttgatataatagacctatgcattggatggatgtattgaatcccttttaaggtaaattataatatttctgctcccctcatgaacacctcttagcatgatttaacatattaatcgaactaaagccgggtactctt

SEQ ID NO: 2233 - protein, 198 aa, Arabidopsis thaliana
MATMSALQSSFTSLSLSPSSSFLGQRLISPISLSVTSPVKPAENPCLVLAKLKRWERKECKPNSLPILHKMHVKFGDTVKVISGRDKGKIGEVTKIFTHNSTIVIKDVNLKTKHMKSREEGEPGQIVKIEAPIHSSNVMLYSKEKDVVSRVGHKVLEDGQKVRYLIKTGELIDTIEKWKLLKEAKDKETTQVAVTSAS

SEQ ID NO: 2234 - protein, 195 aa, Arabidopsis thaliana
MSALQSSFTSLSLSPSSSFLGQRLISPISLSVTSPVKPAENPCLVLAKLKRWERKECKPNSLPILHKMHVKFGDTVKVISGRDKGKIGEVTKIFTHNSTIVIKDVNLKTKHMKSREEGEPGQIVKIEAPIHSSNVMLYSKEKDVVSRVGHKVLEDGQKVRYLIKTGELIDTIEKWKLLKEAKDKETTQVAVTSAS

SEQ ID NO: 2235 - protein, 128 aa, Arabidopsis thaliana
MHVKFGDTVKVISGRDKGKIGEVTKIFTHNSTIVIKDVNLKTKHMKSREEGEPGQIVKIEAPIHSSNVMLYSKEKDVVSRVGHKVLEDGQKVRYLIKTGELIDTIEKWKLLKEAKDKETTQVAVTSAS

SEQ ID NO: 2236 - DNA, 878 bp, Arabidopsis thaliana
atgaagacaacaatggagtgctctctctcatccatcctccttctccttgtactctgcttcactcatcccattccttctctaaccttcgagccactaatctcttctcttgatcttcatgaagaagaaagctgcccttacactgtaattgttaccacaagctgtttctctcctgattggtctagagatcaggtcactatcgctttgggtgacgccgacgataaccaggtggtcgcaccgagactagacaaaccgctaagtggaggaggtggttttgagaaatgttcatcggacacattccaagtcaaaggtaaatgtctcaacactatctgctccgtctacatctaccgttccggtaccgacggctggatcccggagaccgtcgagatatacaaggaaggttccaaatccgtgaaattcgatttcaacaagaacgtccctgaaaacatttggtacggaaacaactattgtaacaacaccgatttgccaccgccttccccggatttccctccgttttctccatccatcccaccgccttcaccaccttattttcctcctgaaccaccttcaatcccgccgccaccaccaccatcaccgccgtctgctgcctctggacgtggaagtggtcagagtttggttgttgcgtttgctgcgtttgtgtttgcgtttgcggctgtggttgtttgagttattttgttaagaattaagagttgtctcaataagtaacgagtatcgtgtaatccctctgttttgtctttgactctttgtagttgaacattgacaatttcatattgtggtaacattaattagttaactaatgtatgagttcgagtttttaacgtactattccttataaattctgcatcaatgttttgtatgtg

SEQ ID NO: 2237 - protein, 227 aa, Arabidopsis thaliana
MKTTMECSLSSILLLLVLCFTHPIPSLTFEPLISSLDLHEEESCPYTVIVTTSCFSPDWSRDQVTIALGDADDNQVVAPRLDKPLSGGGGFEKCSSDTFQVKGKCLNTICSVYIYRSGTDGWIPETVEIYKEGSKSVKFDFNKNVPENIWYGNNYCNNTDLPPPSPDFPPFSPSIPPPSPPYFPPEPPSIPPPPPPSPPSAASGRGSGQSLVVAFAAFVFAFAAVVV

SEQ ID NO: 2238 - protein, 223 aa, Arabidopsis thaliana
MECSLSSILLLLVLCFTHPIPSLTFEPLISSLDLHEEESCPYTVIVTTSCFSPDWSRDQVTIALGDADDNQVVAPRLDKPLSGGGGFEKCSSDTFQVKGKCLNTICSVYIYRSGTDGWIPETVEIYKEGSKSVKFDFNKNVPENIWYGNNYCNNTDLPPPSPDFPPFSPSIPPPSPPYFPPEPPSIPPPPPPSPPSAASGRGSGQSLVVAFAAFVFAFAAVVV

SEQ ID NO: 2239 - DNA, 1617 bp, Arabidopsis thaliana
gggtgcttattaaaacaaaataacatacaaatggatagcatttggattctatcacttctcttcttcatcatctttcttcttctggccgccttcaaacgcaaaaatcatgggaaacatcgacgaataccatctcctcctggttttccaatcatcggaaacttacatcagctcggagaattacaacatcagtctctatggaagctctcaaagaagtatggccctgtgatgcttttgaagcttggaaaagtccccacactcatactttcttcatcagaaacagcaaaacaagctctaagagactatgatctccattgttgtagccgtccttccttagcaggaggaagagagctctcttacaacaatctagatatgtcttcatctccttataatgaatattggaaggaactaaggaagctctgcagtcaagaactctttagtgctaataaaattcaatcgattcaacctattaaggacgaggaggtcaagaaagttatcgattcaatcgcggaatcatcttctctaaagaatccggttaacttgagcaagacgtttcttgctttaactacaagtgtagtatgcaaggcagcatttggtgtgagttttgagggaagtgtgctcaacagtgatagattcaataagttagtccgagatactttcgagatgttgggaagcttctctgcctcagattttattccgtatgtcggatggatcatcgataagttcaatggtttacaagggtggagaaagaaaagctttcgagatcttgatgcgttctatgaacaaatttttgatctgcataaggaagagaaggaagtaggaagtgaagatttagtggatgtgctcttgaggttggagaaagaagaaattgttgttggaaatggcaagctcacaagaaatcatatcaaagcaattttgatgaacattcttttaggaggaatcgatacttctgcaataacaatgacatgggcaatggcagaacttgctaaaaaccctagagtgatgaagaaagttcaagcagaaatcagaaaccaaatcaagaacaaagaaagaatcagctttgatgacactgataagctcgagtacttgaaaatggtgatcaaagaaacatggaggttacatcctccaacacctcttctcctcccaagagatgtaatcactgaatttgagatcaatggctacacgattcctgccaaaacacggcttcatgtgaatgtttgggctatcgggcgtgatcctgatacatggaaagatccagaaatgtttctccccgaaaggtttaatgatagtaacattgatgcaaaaggacagaactttgagttgttgtcgtttgggagtggtaggagaatttgtcctggactgtacatgggaacaacaatggtggagtttggcctagctaatatgttgtatcattttgattggaagttaccagaaggcatggtagtcgaagatatcgatatggaagaagctcctggacttactgtgagcaaaaaaagtgagcttgtacttgttccagtgaagtatttagaccattgattcacgtgaattagttcttcatcgattgtactatgaatgagaacgaaatgataatgataattttcaatgtaatattttttttct

SEQ ID NO: 2240 - protein, 510 aa, Arabidopsis thaliana
GCLLKQNNIQMDSIWILSLLFFIIFLLLAAFKRKNHGKHRRIPSPPGFPIIGNLHQLGELQHQSLWKLSKKYGPVMLLKLGKVPTLILSSSETAKQALRDYDLHCCSRPSLAGGRELSYNNLDMSSSPYNEYWKELRKLCSQELFSANKIQSIQPIKDEEVKKVIDSIAESSSLKNPVNLSKTFLALTTSVVCKAAFGVSFEGSVLNSDRFNKLVRDTFEMLGSFSASDFIPYVGWIIDKFNGLQGWRKKSFRDLDAFYEQIFDLHKEEKEVGSEDLVDVLLRLEKEEIVVGNGKLTRNHIKAILMNILLGGIDTSAITMTWAMAELAKNPRVMKKVQAEIRNQIKNKERISFDDTDKLEYLKMVIKETWRLHPPTPLLLPRDVITEFEINGYTIPAKTRLHVNVWAIGRDPDTWKDPEMFLPERFNDSNIDAKGQNFELLSFGSGRRICPGLYMGTTMVEFGLANMLYHFDWKLPEGMVVEDIDMEEAPGLTVSKKSELVLVPVKYLDH

SEQ ID NO: 2241 - protein, 500 aa, Arabidopsis thaliana
MDSIWILSLLFFIIFLLLAAFKRKNHGKHRRIPSPPGFPIIGNLHQLGELQHQSLWKLSKKYGPVMLLKLGKVPTLILSSSETAKQALRDYDLHCCSRPSLAGGRELSYNNLDMSSSPYNEYWKELRKLCSQELFSANKIQSIQPIKDEEVKKVIDSIAESSSLKNPVNLSKTFLALTTSVVCKAAFGVSFEGSVLNSDRFNKLVRDTFEMLGSFSASDFIPYVGWIIDKFNGLQGWRKKSFRDLDAFYEQIFDLHKEEKEVGSEDLVDVLLRLEKEEIVVGNGKLTRNHIKAILMNILLGGIDTSAITMTWAMAELAKNPRVMKKVQAEIRNQIKNKERISFDDTDKLEYLKMVIKETWRLHPPTPLLLPRDVITEFEINGYTIPAKTRLHVNVWAIGRDPDTWKDPEMFLPERFNDSNIDAKGQNFELLSFGSGRRICPGLYMGTTMVEFGLANMLYHFDWKLPEGMVVEDIDMEEAPGLTVSKKSELVLVPVKYLDH

SEQ ID NO: 2242 - protein, 435 aa, Arabidopsis thaliana
MLLKLGKVPTLILSSSETAKQALRDYDLHCCSRPSLAGGRELSYNNLDMSSSPYNEYWKELRKLCSQELFSANKIQSIQPIKDEEVKKVIDSIAESSSLKNPVNLSKTFLALTTSVVCKAAFGVSFEGSVLNSDRFNKLVRDTFEMLGSFSASDFIPYVGWIIDKFNGLQGWRKKSFRDLDAFYEQIFDLHKEEKEVGSEDLVDVLLRLEKEEIVVGNGKLTRNHIKAILMNILLGGIDTSAITMTWAMAELAKNPRVMKKVQAEIRNQIKNKERISFDDTDKLEYLKMVIKETWRLHPPTPLLLPRDVITEFEINGYTIPAKTRLHVNVWAIGRDPDTWKDPEMFLPERFNDSNIDAKGQNFELLSFGSGRRICPGLYMGTTMVEFGLANMLYHFDWKLPEGMVVEDIDMEEAPGLTVSKKSELVLVPVKYLDH

SEQ ID NO: 2243 - DNA, 1488 bp, Arabidopsis thaliana
tgactctcgaaaagccacacaacaatgtctctccttctccctacgaatttacaacaatacccttcttcttcctccttcccatcttcaacacctatcctatctccgcctccttccaccgctttctccgtcatcgtacctcgtcggagatgtctcagattggttacttcttgtgtctccaccgttcaaagctccgtcgcaacaaacggttcctctccagctcctgctccggccgctgttgtcgttgagcgtgaccagattcgtcttggtcttcctagtaaaggacgtatggctgctgatgcaatcgatcttctcaaggactgtcaactgtttgttaaacaagtcaatcctaggcaatatgttgcacagattccccagttaccaaacactgaagtctggtttcaacggccaaaagatattgtcagaaagttactctcaggagatttggatctaggtatcgttggtcttgacacacttagtgaatatggtcaggaaaatgaagatcttatcattgtccatgaagctctcaactttggagactgtcacctgtctattgcgattccaaactatgggatatttgagaatataaattctctgaaggagctagcgcaaatgccccaatggagtgaagagagacccttacgcttagctactggcttcacttatctcggccccaaatttatgaaagaaaatggcataaagcatgtggtgttttcaactgcagacggagcactggaggcagctccagcgatggggatagctgatgccattttggatcttgtgagtagtggtataacactcaaagagaacaacttgaaagaaattgaaggaggtgttgtgctggaaagccaggcggcacttgtggcaagtagaagagcattaaacgagagaaaaggggcactaaacacagtacacgagattcttgagagattggaggcccatctaaaggcggatggccaattcactgttgttgcaaacatgagaggaaatagtgctcaggaagtggctgagcgtgtgctgagccaaccatcattgtcaggattgcagggaccgacaataagcccagtgtactgtacacaaaatggaaaagtatcggttgactactatgccatcgtgatttgtgtaccaaaaaaggccctatacgactctgtgaagcaacttagagcggccggaggcagtggggtattagtttcacctttgacctacatttttgatgaggatactccaagatggggtcagctcctgagaaacctcgggatttaaatgctttggtaaggaagatgcatatgctgaacaagttttaagaagactctttggtgtaaatctctgagttttttggtacctttgcgtgtctcttttttttttttctttcccttttctgctgcagtcgtcgtcctccgtgctgttgtaatttttacatctcttttctgtatggatcctattcgttgttgttaatcccgttggaacaataaaaacaagcctttttttaat

SEQ ID NO: 2244 - protein, 411 aa, Arabidopsis thaliana
MSLLLPTNLQQYPSSSSFPSSTPILSPPPSTAFSVIVPRRRCLRLVTSCVSTVQSSVATNGSSPAPAPAAVVVERDQIRLGLPSKGRMAADAIDLLKDCQLFVKQVNPRQYVAQIPQLPNTEVWFQRPKDIVRKLLSGDLDLGIVGLDTLSEYGQENEDLIIVHEALNFGDCHLSIAIPNYGIFENINSLKELAQMPQWSEERPLRLATGFTYLGPKFMKENGIKHVVFSTADGALEAAPAMGIADAILDLVSSGITLKENNLKEIEGGVVLESQAALVASRRALNERKGALNTVHEILERLEAHLKADGQFTVVANMRGNSAQEVAERVLSQPSLSGLQGPTISPVYCTQNGKVSVDYYAIVICVPKKALYDSVKQLRAAGGSGVLVSPLTYIFDEDTPRWGQLLRNLGI

SEQ ID NO: 2245 - protein, 324 aa, Arabidopsis thaliana
MAADAIDLLKDCQLFVKQVNPRQYVAQIPQLPNTEVWFQRPKDIVRKLLSGDLDLGIVGLDTLSEYGQENEDLIIVHEALNFGDCHLSIAIPNYGIFENINSLKELAQMPQWSEERPLRLATGFTYLGPKFMKENGIKHVVFSTADGALEAAPAMGIADAILDLVSSGITLKENNLKEIEGGVVLESQAALVASRRALNERKGALNTVHEILERLEAHLKADGQFTVVANMRGNSAQEVAERVLSQPSLSGLQGPTISPVYCTQNGKVSVDYYAIVICVPKKALYDSVKQLRAAGGSGVLVSPLTYIFDEDTPRWGQLLRNLGI

SEQ ID NO: 2246 - protein, 216 aa, Arabidopsis thaliana
MPQWSEERPLRLATGFTYLGPKFMKENGIKHVVFSTADGALEAAPAMGIADAILDLVSSGITLKENNLKEIEGGVVLESQAALVASRRALNERKGALNTVHEILERLEAHLKADGQFTVVANMRGNSAQEVAERVLSQPSLSGLQGPTISPVYCTQNGKVSVDYYAIVICVPKKALYDSVKQLRAAGGSGVLVSPLTYIFDEDTPRWGQLLRNLGI

SEQ ID NO: 2247 - DNA, 1326 bp, Arabidopsis thaliana
atcaagctccggactcaaaacccaaatctctgagaaagaatcaaagccaatattcgatcaatcaagctggagtggaagaaagggaaagtgaacccattcgtgaggggaataagatagaggttaattaggcccaaatcgatgcctttaaatgtagtcaatgatcgtgatggctcttctcgcattcttttgaccgaccctgccggatcaactgctgaggtgcttttgtatggagggcaagtggtttcttggaaaaacgaaaggagagagaagttgctttatatgagcaccaaggcgcaattgaagccaccaaaggcgatcaggggagggttacctatcagctttccacagtttggaaattttggtgcacttgagcgacatggatttgcccgtaacagattctggtcacttgataatgatccttcacctctgcctccggctaaccagcaatcaactgttgatttagtattgaagtctactgaagatgatttgaagatatggcctcatagctttgaacttcgtgttcgcatatctatcagtcctggaaaacttacaataatcccgcgtgtgaggaacactgacacaaaggcattttcctttatgttttcacttcgtaactacttatatgtatccgatataagtgaagttcgggttgagggtctggagacgcttgattatctggacaacttggtgcgtagagaaagattcacggagcaggcagatgcaattacctttgacggcgaggttgataaagtgtacttgaacacgccgacaaagattgccatcatagatcatgagaggaaaagaactatcgagttgcgaaaggaaggcatgccaaatgcagctgtgtggaacccttgggacaagaaggccaagagtattgcagatatgggagatgaggattacacaacaatgctgtgtgtagattctggtgctatagaaagcccaattgtgttgaagccacatgaagagtggaaaggaagacaagaactctctatcgtctcctcaagctactgcagcggtcagctcgatccacgtaaggttctttatggggattactgataatatatatgaaatcaaacttggaaacatcatcagtcttatattttgatcgtcttcatggataaagcgattgatgcccaaacaaatctgatatgatatgattttgtttggagctattgccctttgtgagtttctgacaggcacacagaaagataggcaaatgtagtattttgtaacgttgccttctgtgtggcggtcagggacttattaatatgtattatggttcacccggaaacatgagtcttatattgaatcgtcttcttcatg

SEQ ID NO: 2248 - protein, 306 aa, Arabidopsis thaliana
MPLNVVNDRDGSSRILLTDPAGSTAEVLLYGGQVVSWKNERREKLLYMSTKAQLKPPKAIRGGLPISFPQFGNFGALERHGFARNRFWSLDNDPSPLPPANQQSTVDLVLKSTEDDLKIWPHSFELRVRISISPGKLTIIPRVRNTDTKAFSFMFSLRNYLYVSDISEVRVEGLETLDYLDNLVRRERFTEQADAITFDGEVDKVYLNTPTKIAIIDHERKRTIELRKEGMPNAAVWNPWDKKAKSIADMGDEDYTTMLCVDSGAIESPIVLKPHEEWKGRQELSIVSSSYCSGQLDPRKVLYGDY

SEQ ID NO: 2249 - protein, 259 aa, Arabidopsis thaliana
MSTKAQLKPPKAIRGGLPISFPQFGNFGALERHGFARNRFWSLDNDPSPLPPANQQSTVDLVLKSTEDDLKIWPHSFELRVRISISPGKLTIIPRVRNTDTKAFSFMFSLRNYLYVSDISEVRVEGLETLDYLDNLVRRERFTEQADAITFDGEVDKVYLNTPTKIAIIDHERKRTIELRKEGMPNAAVWNPWDKKAKSIADMGDEDYTTMLCVDSGAIESPIVLKPHEEWKGRQELSIVSSSYCSGQLDPRKVLYGDY

SEQ ID NO: 2250 - protein, 153 aa, Arabidopsis thaliana
MFSLRNYLYVSDISEVRVEGLETLDYLDNLVRRERFTEQADAITFDGEVDKVYLNTPTKIAIIDHERKRTIELRKEGMPNAAVWNPWDKKAKSIADMGDEDYTTMLCVDSGAIESPIVLKPHEEWKGRQELSIVSSSYCSGQLDPRKVLYGDY

SEQ ID NO: 2251 - DNA, 1768 bp, Arabidopsis thaliana
atcttaatctgctttctcgacaaagaaaagcagagaaagagagacttgttatactaaactcaatctctggcttttagttttgttgtctctctccttcagtttccaggaaaaaatctctttctcattaagctgttatatagatctgtgttcatactcttcttccacaatctaacccaaaaaaaaataactctttatttctctctacaaatttcatttgttccattttctcaattttagaacttaagaaacccaaaaagcaaatttttagtacatttttaggtttaattaaagtaattaatttttgtgtgtttccatcaaaattccacttgttttctacagaaattttcaatctttttattattgtatctctctttaagacatgaactgtctgttcttgttcaaatcaaagaaacccagaaagcaacagaaagacaacaacaagaacaaaagaaaaggtaaagagttgttacaaaactcagctccagaactgacgaatcggagtgaaacgtcttcgtttaatctccagacaccaagatcgttgccttctccaagaagtatcaaagatttgtatacagagagagaacaaaatcttagggttttttcttacgaagaactcagtaaagccacttatgtgtttagcagaaagcttgtgatcggtgaaggtggatttggtattgtttataaaggaaagattctcagcaatggagattcttctgatcctccacttgtcgttgccatcaagaaactcaatcgacaaggtttacagggtcacaagcaatggctagcagaggttcagtttcttggagtagtgaatcatccgaacgttgtgaagctcataggttattgctcggaagacggcgagaccgggatcgagaggcttttggtttatgagtacatgtcgaatcgaagtttagaagaccatctcttccctcgtcgatcacacacattaccgtggaaaaaaagactcgagatcatgcttggtgctgctgaaggattgacttatttacatgatcttaaggtgatatatagagatttcaaatcctctaatgtgcttttagacgatcaattctgtccaaaattatcggactttgggcttgccagagaaggacctgatggcgacaatactcatgtcactaccgcaagagttggaacacacggctatgcggctccggaatacgtgcaaacaggtcatcttcggttaaagagcgacgtctatagcttcggtgttgtgctctacgagatcataaccggacgcagaaccattgagaggaacaagccagtggctgaacgaaggctattggattgggtcaaagagtatcctgctgatagtcaacgtttcagcatgatcgttgaccctcggttacgcaacaattatccagctgctggagctaggagtttggctaaattggctgatctttgcctgaaaaagaacgataaagagcgacctacgatggaaattgtagtggaaagattgaaaaagattatcgaagaatcggatagtgaagattatccgatggctacgactacgaccaaggaaagtagtcaggtaaggaggagacaagttgcaaaacctgagaaacaaagtttgagaggggttagtgtcagaggatgattttgagtttagaagtttttttgcaagtttatatattataaataagtttatgcaatttgttggtttattgtgagattagtagagaaaatgtatcttattgtgtgttttgtaaataaaattcaatacggtgaatgagaatcattgagatcaagtttt

SEQ ID NO: 2252 - protein, 410 aa, Arabidopsis thaliana
MNCLFLFKSKKPRKQQKDNNKNKRKGKELLQNSAPELTNRSETSSFNLQTPRSLPSPRSIKDLYTEREQNLRVFSYEELSKATYVFSRKLVIGEGGFGIVYKGKILSNGDSSDPPLVVAIKKLNRQGLQGHKQWLAEVQFLGVVNHPNVVKLIGYCSEDGETGIERLLVYEYMSNRSLEDHLFPRRSHTLPWKKRLEIMLGAAEGLTYLHDLKVIYRDFKSSNVLLDDQFCPKLSDFGLAREGPDGDNTHVTTARVGTHGYAAPEYVQTGHLRLKSDVYSFGVVLYEIITGRRTIERNKPVAERRLLDWVKEYPADSQRFSMIVDPRLRNNYPAAGARSLAKLADLCLKKNDKERPTMEIVVERLKKIIEESDSEDYPMATTTTKESSQVRRRQVAKPEKQSLRGVSVRG

SEQ ID NO: 2253 - protein, 238 aa, Arabidopsis thaliana
MSNRSLEDHLFPRRSHTLPWKKRLEIMLGAAEGLTYLHDLKVIYRDFKSSNVLLDDQFCPKLSDFGLAREGPDGDNTHVTTARVGTHGYAAPEYVQTGHLRLKSDVYSFGVVLYEIITGRRTIERNKPVAERRLLDWVKEYPADSQRFSMIVDPRLRNNYPAAGARSLAKLADLCLKKNDKERPTMEIVVERLKKIIEESDSEDYPMATTTTKESSQVRRRQVAKPEKQSLRGVSVRG

SEQ ID NO: 2254 - protein, 212 aa, Arabidopsis thaliana
MLGAAEGLTYLHDLKVIYRDFKSSNVLLDDQFCPKLSDFGLAREGPDGDNTHVTTARVGTHGYAAPEYVQTGHLRLKSDVYSFGVVLYEIITGRRTIERNKPVAERRLLDWVKEYPADSQRFSMIVDPRLRNNYPAAGARSLAKLADLCLKKNDKERPTMEIVVERLKKIIEESDSEDYPMATTTTKESSQVRRRQVAKPEKQSLRGVSVRG

SEQ ID NO: 2255 - DNA, 2423 bp, Arabidopsis thaliana
ctgcttcaatccccttttttttttcgtttcgtcgtttgttcgttttctctatcgctctcgttcatctacgcaatctctctcactaggtacagttttaaatgggtaagaagaagtcagacgagagtgctgctaccacaaaggtgaagccaagtgggaaagatgcttcgaaagattctaaaaaagagaaattgtcagtctcggctatgcttgcaggcatggatcagaaagatgataaaccgaagaagggctcatcatctagaaccaaggctgctccgaaatctacatcttacactgatggcatagatcttcctccttctgatgaagaagacgacggtgaatctgatgaggaagagagacagaaggaagcaaggaggaagctgaagagtgaacaaaggcaccttgagatatctgtgactgataaggaacaaaagaagcgagaggcgaaagaaagattagctcttcaggctgcagagtcggcaaagagggaggctatgaaggacgatcatgatgcattcacggttgttattggaagcaagacctcagtgcttgaaggagacgacatggctgatgcaaatgttaaggatattaccatagaatctttttctgtatctgctcgaggtaaagagcttttgaagaatgcttctgtcaggatttcacatggtaaaaggtatgggttgatcgggccaaacggaatgggaaagtctacactgttaaagcttttagcttggaggaagattccagtgccaaagaatattgatgttcttcttgttgagcaagaggtggttggtgatgaaaagagtgctctgaatgcagttgtctctgccaatgaagagttggttaagctacgggaagaggctgaagctctgcagaagtcgtcttctggagctgatggagaaaatgttgatggtgaggatgatgatgatactggagaaaagcttgctgaactgtatgacaggctgcagattttagggtcagatgctgctgaagcacaggcatccaaaattcttgcggggttaggtttcacaaaagatatgcaagtgcgtgcgactcagtccttcagtggtggctggaggatgcgaatatcattagctagagctctgttcgtgcaacctacccttttgctgttagatgaacccactaaccatcttgacctgagagctgttctatggttagaggagtatttgtgtcgctggaagaagacactagttgttgtttcacatgaccgggacttcctcaacacagtctgcacggagataatacatctccatgaccaaaatctccacttctaccgtggtaatttcgatggttttgaaagcggatatgagcagcgtcgcaaggagatgaacaaaaaatttgatgtctacgacaaacagatgaaagcagcgaagaggactggaaaccggggtcaacaggagaaggtaaaggacagggccaagtttactgctgcaaaagaagcatccaagagtaagtcaaagggcaagacagtggatgaagaaggcccagcaccagaagctccaaggaagtggagagattacagtgtggtgttccacttcccagaaccaactgagctcactcctcctcttctgcagttaattgaggttagcttcagctatcccaacaggccagatttcagactctcgaatgttgatgtaggtatcgatatggggacacgggttgcgatagttgggcctaacggagcaggaaagtccactctattaaatcttcttgcgggagatttagttccaacagagggtgaaatgagaagaagccagaagctgaggattggcaggtattctcagcattttgttgaccttttaacaatgggggaaacaccggttcagtatctccttcgtcttcatcctgaccaagagggatttagcaagcaagaggcagtgcgagcgaagctaggcaagtttgggctaccaagtcacaatcacttatctccaattgcgaaattgtctggaggacaaaaggctagggttgtgttcacctcgatctcaatgtcaaaaccacacattttgcttctggacgagcctacaaatcacttagacatgcagagtatagatgccttggcggatgcactagatgagttcacaggtggagttgtgttggtgagtcacgactcgagactcatatcacgtgtatgtgcggaagaggagaagagtcaaatttgggttgtagaagacggaacagtgaatttcttcccaggcacatttgaagagtacaaagaagatctccaaagagaaatcaaagcagaagttgatgagtgaagttttgttgttagcttctaaggtaaactcaaactcctttatgttttataacaaactcaaaaagttttggacaattttatttttagcaatcgtgttctttcatcatttgtgcgttaattacatcatatatgacactatatacatcagtttctc

SEQ ID NO: 2256 - protein, 723 aa, Arabidopsis thaliana
MGKKKSDESAATTKVKPSGKDASKDSKKEKLSVSAMLAGMDQKDDKPKKGSSSRTKAAPKSTSYTDGIDLPPSDEEDDGESDEEERQKEARRKLKSEQRHLEISVTDKEQKKREAKERLALQAAESAKREAMKDDHDAFTVVIGSKTSVLEGDDMADANVKDITIESFSVSARGKELLKNASVRISHGKRYGLIGPNGMGKSTLLKLLAWRKIPVPKNIDVLLVEQEVVGDEKSALNAVVSANEELVKLREEAEALQKSSSGADGENVDGEDDDDTGEKLAELYDRLQILGSDAAEAQASKILAGLGFTKDMQVRATQSFSGGWRMRISLARALFVQPTLLLLDEPTNHLDLRAVLWLEEYLCRWKKTLVVVSHDRDFLNTVCTEIIHLHDQNLHFYRGNFDGFESGYEQRRKEMNKKFDVYDKQMKAAKRTGNRGQQEKVKDRAKFTAAKEASKSKSKGKTVDEEGPAPEAPRKWRDYSVVFHFPEPTELTPPLLQLIEVSFSYPNRPDFRLSNVDVGIDMGTRVAIVGPNGAGKSTLLNLLAGDLVPTEGEMRRSQKLRIGRYSQHFVDLLTMGETPVQYLLRLHPDQEGFSKQEAVRAKLGKFGLPSHNHLSPIAKLSGGQKARVVFTSISMSKPHILLLDEPTNHLDMQSIDALADALDEFTGGVVLVSHDSRLISRVCAEEEKSQIWVVEDGTVNFFPGTFEEYKEDLQREIKAEVDE

SEQ ID NO: 2257 - protein, 688 aa, Arabidopsis thaliana
MLAGMDQKDDKPKKGSSSRTKAAPKSTSYTDGIDLPPSDEEDDGESDEEERQKEARRKLKSEQRHLEISVTDKEQKKREAKERLALQAAESAKREAMKDDHDAFTVVIGSKTSVLEGDDMADANVKDITIESFSVSARGKELLKNASVRISHGKRYGLIGPNGMGKSTLLKLLAWRKIPVPKNIDVLLVEQEVVGDEKSALNAVVSANEELVKLREEAEALQKSSSGADGENVDGEDDDDTGEKLAELYDRLQILGSDAAEAQASKILAGLGFTKDMQVRATQSFSGGWRMRISLARALFVQPTLLLLDEPTNHLDLRAVLWLEEYLCRWKKTLVVVSHDRDFLNTVCTEIIHLHDQNLHFYRGNFDGFESGYEQRRKEMNKKFDVYDKQMKAAKRTGNRGQQEKVKDRAKFTAAKEASKSKSKGKTVDEEGPAPEAPRKWRDYSVVFHFPEPTELTPPLLQLIEVSFSYPNRPDFRLSNVDVGIDMGTRVAIVGPNGAGKSTLLNLLAGDLVPTEGEMRRSQKLRIGRYSQHFVDLLTMGETPVQYLLRLHPDQEGFSKQEAVRAKLGKFGLPSHNHLSPIAKLSGGQKARVVFTSISMSKPHILLLDEPTNHLDMQSIDALADALDEFTGGVVLVSHDSRLISRVCAEEEKSQIWVVEDGTVNFFPGTFEEYKEDLQREIKAEVDE

SEQ ID NO: 2258 - protein, 684 aa, Arabidopsis thaliana
MDQKDDKPKKGSSSRTKAAPKSTSYTDGIDLPPSDEEDDGESDEEERQKEARRKLKSEQRHLEISVTDKEQKKREAKERLALQAAESAKREAMKDDHDAFTVVIGSKTSVLEGDDMADANVKDITIESFSVSARGKELLKNASVRISHGKRYGLIGPNGMGKSTLLKLLAWRKIPVPKNIDVLLVEQEVVGDEKSALNAVVSANEELVKLREEAEALQKSSSGADGENVDGEDDDDTGEKLAELYDRLQILGSDAAEAQASKILAGLGFTKDMQVRATQSFSGGWRMRISLARALFVQPTLLLLDEPTNHLDLRAVLWLEEYLCRWKKTLVVVSHDRDFLNTVCTEIIHLHDQNLHFYRGNFDGFESGYEQRRKEMNKKFDVYDKQMKAAKRTGNRGQQEKVKDRAKFTAAKEASKSKSKGKTVDEEGPAPEAPRKWRDYSVVFHFPEPTELTPPLLQLIEVSFSYPNRPDFRLSNVDVGIDMGTRVAIVGPNGAGKSTLLNLLAGDLVPTEGEMRRSQKLRIGRYSQHFVDLLTMGETPVQYLLRLHPDQEGFSKQEAVRAKLGKFGLPSHNHLSPIAKLSGGQKARVVFTSISMSKPHILLLDEPTNHLDMQSIDALADALDEFTGGVVLVSHDSRLISRVCAEEEKSQIWVVEDGTVNFFPGTFEEYKEDLQREIKAEVDE

SEQ ID NO: 2259 - DNA, 2011 bp, Arabidopsis thaliana
aactaaagaagaagaagaagataaagctttgtaatttatagaatggcgtgtgtatcgacatgcttgattctctcccctaggttaactcaagtgggtttatcatcaaagaagccttttttgattcggctcagatctcctgttgatcgttactcttttcccagaatgttaacggagaggtgtttgagcactcgtcggaagtttaatcgccatggaatcgctgtggtgaaggctgcgagtttagataaggttagcggcgcaatcaaaccaggtggattggtggagagtgacaagttgccgactgatgtacggaaacgagcgatggatgcggtagatgagtgtggccggagagtaactgttggtgatgttgctagtagaggtggcttgaaggttactgaagctcagacagctcttcaagctatagcggctgatactgatgggtttttggaggtgtcggatgaaggtgatgtgctttatgttttcccaagggactatcgaactaagttggctgccaagtcgttaaggatacaaattgaaccattccttgaaaaggcaaagggtgctgtagattatttggctcgtgtttcctttggcacggcgcttatagcgtctatcgttattgtctacacgtcaattatagccctgctttcaagcaaaagcgaggatgataatcgtcaaagaagacgcgggcgcagttatgattcaggattcaatttctatatcaaccctgccgatctgctttggtactgggatcccaattattacaacaggcgacgagctcgagaagatgaaggaaagggaatgaatttcattgaatctgttttctcgtttgtatttggagatggagacccaaatcaaggaatcgaagaagagagatggcagatgattgggcagtatataacatctagaggaggtgttgttgccgctgatgaacttgctccataccttgatgtgccatcttcaaagagtgctatgaacgatgaatcctacattctacctgttcttcttcggtttgatggtcaacctgagttggatgaagagggaaatattttgtattgttttccgtccctgcaacgtacagcttctggatctagtagacgaaaagaatatgtgggaaaatggtttgactgggttgcagatatggagagattcttcaaggagaaaaaatggcaatttagtaaaacaagtacatctgagagagcactggtcattggcctaggtgcggttaatctctttggtgttattgttctaaacacattgctaaacgagatgtctgtcaggccaggtggatttcttacatttgttaagaacatatatccactacttcagatatacgcaggttcattctttaccatccctttgattcggtggttttcaatcaagagaaagaataatcagatagagaacagaaacaaagctcggctacaatttgctcgagcacttgaatctccagatatcgcactacggcgtaagctacttagtgcaagggatatggctcaaaaaacagtcatagggaaggatcggatcgtgtacagtacagatagagatatgatggaacaaaactatgagacagacgaatgggacaggagattcaaagagttagaaaaatcggattgaaatgtgaaatctgggacttgtgaccttttgctgttatatgctaagttacgtagcagctcacacatcatccgcaacacagaattttcccaacaacgtaaaaacattcatggacgctggagttaaagcggatgacacaagccatggcacatactgtttagacattcttcctctctctgagacagaaaataactggtttatagaggtctcttaagctctagtggtaatagaccattttgtgatgctccgtaacacaacaagcttggtcttgtttaaatcatccaggagatccaagtattgcttgttcctgagagttactacaaatgcaacaatagattatgtacattaatttgtatatacgaaagtccaaattcttgctcataagaatgaatgttcaatg

SEQ ID NO: 2260 - protein, 523 aa, Arabidopsis thaliana
MACVSTCLILSPRLTQVGLSSKKPFLIRLRSPVDRYSFPRMLTERCLSTRRKFNRHGIAVVKAASLDKVSGAIKPGGLVESDKLPTDVRKRAMDAVDECGRRVTVGDVASRGGLKVTEAQTALQAIAADTDGFLEVSDEGDVLYVFPRDYRTKLAAKSLRIQIEPFLEKAKGAVDYLARVSFGTALIASIVIVYTSIIALLSSKSEDDNRQRRRGRSYDSGFNFYINPADLLWYWDPNYYNRRRAREDEGKGMNFIESVFSFVFGDGDPNQGIEEERWQMIGQYITSRGGVVAADELAPYLDVPSSKSAMNDESYILPVLLRFDGQPELDEEGNILYCFPSLQRTASGSSRRKEYVGKWFDWVADMERFFKEKKWQFSKTSTSERALVIGLGAVNLFGVIVLNTLLNEMSVRPGGFLTFVKNIYPLLQIYAGSFFTIPLIRWFSIKRKNNQIENRNKARLQFARALESPDIALRRKLLSARDMAQKTVIGKDRIVYSTDRDMMEQNYETDEWDRRFKELEKSD

SEQ ID NO: 2261 - protein, 483 aa, Arabidopsis thaliana
MLTERCLSTRRKFNRHGIAVVKAASLDKVSGAIKPGGLVESDKLPTDVRKRAMDAVDECGRRVTVGDVASRGGLKVTEAQTALQAIAADTDGFLEVSDEGDVLYVFPRDYRTKLAAKSLRIQIEPFLEKAKGAVDYLARVSFGTALIASIVIVYTSIIALLSSKSEDDNRQRRRGRSYDSGFNFYINPADLLWYWDPNYYNRRRAREDEGKGMNFIESVFSFVFGDGDPNQGIEEERWQMIGQYITSRGGVVAADELAPYLDVPSSKSAMNDESYILPVLLRFDGQPELDEEGNILYCFPSLQRTASGSSRRKEYVGKWFDWVADMERFFKEKKWQFSKTSTSERALVIGLGAVNLFGVIVLNTLLNEMSVRPGGFLTFVKNIYPLLQIYAGSFFTIPLIRWFSIKRKNNQIENRNKARLQFARALESPDIALRRKLLSARDMAQKTVIGKDRIVYSTDRDMMEQNYETDEWDRRFKELEKSD

SEQ ID NO: 2262 - protein, 431 aa, Arabidopsis thaliana
MDAVDECGRRVTVGDVASRGGLKVTEAQTALQAIAADTDGFLEVSDEGDVLYVFPRDYRTKLAAKSLRIQIEPFLEKAKGAVDYLARVSFGTALIASIVIVYTSIIALLSSKSEDDNRQRRRGRSYDSGFNFYINPADLLWYWDPNYYNRRRAREDEGKGMNFIESVFSFVFGDGDPNQGIEEERWQMIGQYITSRGGVVAADELAPYLDVPSSKSAMNDESYILPVLLRFDGQPELDEEGNILYCFPSLQRTASGSSRRKEYVGKWFDWVADMERFFKEKKWQFSKTSTSERALVIGLGAVNLFGVIVLNTLLNEMSVRPGGFLTFVKNIYPLLQIYAGSFFTIPLIRWFSIKRKNNQIENRNKARLQFARALESPDIALRRKLLSARDMAQKTVIGKDRIVYSTDRDMMEQNYETDEWDRRFKELEKSD

SEQ ID NO: 2263 - DNA, 1508 bp, Arabidopsis thaliana
ggatttgacacaaaacgcaatgagcttagcttcagttatccaccacggaattctccctccggccaaatcggatcgaatctttcttaccattccggtgttcccgccggatttcagagctcgtggatggactaagtctcctttctctctccttataaatccctctcttgcttcagctgccaatcgtcgtctctctcatcttcctcctatcgcgtgttccagaggtattgatcaggaagatgaagtacagagaaggagagcagagaacttctaccacacaaaaacgatgagaatgcaaccacttcacgctcttcttcatcagtagatagtggaggcctgaaagattatcaacaagaagaaacttacaaaacttccttcaagactgttgccttgtgtgttggcactgcggtggcatttggaattggaataggtttgaaggaaggtgttggcaaggcttcagagtttttcgcaggctacatattggagcaaagcttgtcagtggacaacttgtttgtttttgttcttgttttcaagtatttcaaagtgccactcatgtatcagaataaggtacttacctacggtatagctggtgcaattgttttccgtttcacgctcattttactaggaacagctactcttcagaaatttgaagcagtcaacctactgcttgctgctgtactcttatattcgtcattcaagttatttgcaagtgaagaagatgatacagatctatcggacaacttcattgtaaagacatgccagagatttattcctgtcacatcaagttacgatggaaatcgatttttcacaaagcatgatggcattttgaaagccacaccattgctacttacagtagcagtgatcgagctcagtgacatagcatttgcggttgactcaataccagctgtttttggcgtcacaagggatccttttattgtcttgacttctaatctctttgcaatcctaggactaaggtctctctatacactgatttctgaaggaatggacgagctggaatacttgcagccatcaatagcagttgttcttggcttcataggagtcaagatgatccttgatttctttggcttccacatatcaacagaggcatcacttggtgtcgttgcactttctctcagtaccggagtactgttgagcctaacaaacaaatccagcgacagctaactaagaactgagagctgactactgagaaacagaatccagatgtatccaaccacacagttcataagaataatatcgcattgttcatcaaagcatttcgctgatgtgttactgtagataaaacacacagaaagggcattctttccaagactcgtattctactttttgttttgtcgttaaaaaagcagcaaagaacaagacactttaaatctatttgtctggaagacatgtggttgagccccatgattgctttgagacgagtagaactgtctttgatcgtcaagtcatcccatgtgccgcttggtgctcatcttataatattattcctttgg

SEQ ID NO: 2264 - protein, 209 aa, Arabidopsis thaliana
MYQNKVLTYGIAGAIVFRFTLILLGTATLQKFEAVNLLLAAVLLYSSFKLFASEEDDTDLSDNFIVKTCQRFIPVTSSYDGNRFFTKHDGILKATPLLLTVAVIELSDIAFAVDSIPAVFGVTRDPFIVLTSNLFAILGLRSLYTLISEGMDELEYLQPSIAVVLGFIGVKMILDFFGFHISTEASLGVVALSLSTGVLLSLTNKSSDS

SEQ ID NO: 2265 - protein, 106 aa, Arabidopsis thaliana
DLTQNAMSLASVIHHGILPPAKSDRIFLTIPVFPPDFRARGWTKSPFSLLINPSLASAANRRLSHLPPIACSRGIDQEDEVQRRRAENFYHTKTMRMQPLHALLHQ

SEQ ID NO: 2266 - DNA, 1550 bp, Arabidopsis thaliana
aagtcaacaactaagatgagaagaaattttcatctttctctatgtttaatatgaaagagaaacccaaagataatatcaaatcttcttcttcatgatcaaaacctaaacaaaaataacaccaaaaaaactcaaatgaaatttctcttgatttaaaattcttgtattccaagcaacgacttggtgttttgagtgttctctttaatggcgaggaagaagcatcgaaagctcttccctaccttagcatcagagacaaacaaaacgttagactgctcgaacggagtctgcgacccgatttgcccttacaattgctatccagaacccgattactacaccatatcaccacagctacctccatggtcatcgtcaccacaaccatctccatgtccatctccatctatctcagccgtttatctaccatctcaagactcttcatcttccttagacgccatatccatcatcaccataaccggtgcggtcttagccatccttttaaccggattctttcttgtagcgaaattcttttcagacagcgtaaaccgtgtcaaccaaggaacatatcaatccgataacgaagacaacgacacggtaatggaggaagagtttcaagatagggaacaagtggatcacccaatatggttaataagaacaacaggtctacaacaatcgatcattaactcgattacaatctgtaattacaagagaggagatggtttaatcgagagaacagattgtccagtttgtttaaacgagtttgaagaagatgagagtcttaggttattgcctaaatgtaaccacgcttttcacatctcttgtattgatacttggcttagttctcacaccaattgtcctctgtgtcgtgctggtattgcgatgattagtgtcaccactccacggtattctggtccggttgaagtaactcccggaggatcaggttcacatttggagaacgatggagttgatgaagaagatcatggagagattgaaaacagagttgattctgattttaaagagagtgatgattcagacataagaattgagatttatagatttgattcagacggtgatggatctgaaacagagacgaaagagagagttagggttttgaaggagtgtatggatccaaatggaggagattcagtaaactctctctcgcatacgaaaacccatgtagaaagtgtagattttccggggaaatcatgcgagaatcagagtgaggaattcactagacataacggagaagatgaagcaagctgctctgaggaaaacggtggtggcagcaaccaattacggagaagttgtgattctggtgaattgaacggcgaaacaaccggagatgaagggaaaagtcagtcagacatttcgtcgagtacgttgaagacaaatggaagctcctcctctgtttcatgtttcaacaaaaacaagagttcggtttttccgctgtagtaaagcgtctctacgaaaagcattttttcgaatgtaaaaagagtaatgcacaagtgttcaattatacctagcatgactaattcaaaaatcggaagacttcatagttc

SEQ ID NO: 2267 - protein, 413 aa, Arabidopsis thaliana
MARKKHRKLFPTLASETNKTLDCSNGVCDPICPYNCYPEPDYYTISPQLPPWSSSPQPSPCPSPSISAVYLPSQDSSSSLDAISIITITGAVLAILLTGFFLVAKFFSDSVNRVNQGTYQSDNEDNDTVMEEEFQDREQVDHPIWLIRTTGLQQSIINSITICNYKRGDGLIERTDCPVCLNEFEEDESLRLLPKCNHAFHISCIDTWLSSHTNCPLCRAGIAMISVTTPRYSGPVEVTPGGSGSHLENDGVDEEDHGEIENRVDSDFKESDDSDIRIEIYRFDSDGDGSETETKERVRVLKECMDPNGGDSVNSLSHTKTHVESVDFPGKSCENQSEEFTRHNGEDEASCSEENGGGSNQLRRSCDSGELNGETTGDEGKSQSDISSSTLKTNGSSSSVSCFNKNKSSVFPL

SEQ ID NO: 2268 - protein, 284 aa, Arabidopsis thaliana
MEEEFQDREQVDHPIWLIRTTGLQQSIINSITICNYKRGDGLIERTDCPVCLNEFEEDESLRLLPKCNHAFHISCIDTWLSSHTNCPLCRAGIAMISVTTPRYSGPVEVTPGGSGSHLENDGVDEEDHGEIENRVDSDFKESDDSDIRIEIYRFDSDGDGSETETKERVRVLKECMDPNGGDSVNSLSHTKTHVESVDFPGKSCENQSEEFTRHNGEDEASCSEENGGGSNQLRRSCDSGELNGETTGDEGKSQSDISSSTLKTNGSSSSVSCFNKNKSSVFPL

SEQ ID NO: 2269 - DNA, 1616 bp, Arabidopsis thaliana
aaggagaatcattttcgtcttctacttagttttcttcaactcgatttctctgctccatcttcttcctcgtcttctcattctctctcgctctggcacagtagaaactgagctcacgaaagcaggtagtcagtgtttttgtttcgaactcttccaacatgcagaaggaaattgctggtgatgctccatcagcaccaaccactcgtgttcggcatcggaagcgaaacagcgatgttggtgcaggggcaggcaaaccaaatggaaaccatttacttgtcaatgacagcaaaaaatacaaatcgtttctcattcgagcatactccactttctggatgataggtggttttgctcttatagtttacctgggtcatctctacattacagccatggtggttgttattcagatattcatggcacgagaactttttaatttgctgagaaaaactcatgaagataaacagctccctggttttagattactgaattggcacttcttttttacagcaatgctctttgtatatggtcgaatacttagtcaacggctagtcaacactgtgactccagacaaagtcctatatcgactggtcacaagcctcatcaaataccacatggcaatctgttactccttgtatatttctggctttgtttggtttattctcacgctgaaaaagaagatgtacaaatatcagtttagccaatatgcatggacacatatgatattaattgtggtgtttactcagtcctcattcactgtcgccaacatctttgaaggaatcttctggtttcttcttcctgcatcacttatcgtcatcaatgacatatttgcatatatctgtggtttcttctttggaagaacaccgttgatcaagttatcaccaaagaaaacatgggagggtttcattggagcttctattaccacagtgatttctgcattcctgcttgcaaatataatgggtcgtttcctgtggctgacatgtcccagagaggatctatcgacaggctggctcctctgtgaccctggtccactgttcaagcaagagacacatgctttaccaggatggatttctgattggctcccttggaaggaaatttcgattctaccagtccagtggcatgctctatgtcttggattgttcgcctctataatagctccttttggtggcttctttgccagtggtttcaaaagagcattcaaaatcaaggactttggtgatagtattcccggacatggcggaattacagatagaatggattgtcagatggtgatggctgtttttgcctatatatatcatcaatcgtttgttgtacctgaagtcctctctgtggataagctcttagaccagataatcacaagcctgacattggaagaacaacaagcgctactcgtgaagcttggccaaatgttgcaggaaaaggttattggatcttagatcatcacaacccgtcattgtataccatattactctgcttccgtgttacgtctgaaaattattcaaaagaaagagaaaagaaaaaaaaaagtagatttataagtttttttgtttttctcattgtggaattcctctgtatagtactggtacatgctttatgaaagaaaagaagctcactacaattctctt

SEQ ID NO: 2270 - protein, 423 aa, Arabidopsis thaliana
MQKEIAGDAPSAPTTRVRHRKRNSDVGAGAGKPNGNHLLVNDSKKYKSFLIRAYSTFWMIGGFALIVYLGHLYITAMVVVIQIFMARELFNLLRKTHEDKQLPGFRLLNWHFFFTAMLFVYGRILSQRLVNTVTPDKVLYRLVTSLIKYHMAICYSLYISGFVWFILTLKKKMYKYQFSQYAWTHMILIVVFTQSSFTVANIFEGIFWFLLPASLIVINDIFAYICGFFFGRTPLIKLSPKKTWEGFIGASITTVISAFLLANIMGRFLWLTCPREDLSTGWLLCDPGPLFKQETHALPGWISDWLPWKEISILPVQWHALCLGLFASIIAPFGGFFASGFKRAFKIKDFGDSIPGHGGITDRMDCQMVMAVFAYIYHQSFVVPEVLSVDKLLDQIITSLTLEEQQALLVKLGQMLQEKVIGS

SEQ ID NO: 2271 - protein, 365 aa, Arabidopsis thaliana
MIGGFALIVYLGHLYITAMVVVIQIFMARELFNLLRKTHEDKQLPGFRLLNWHFFFTAMLFVYGRILSQRLVNTVTPDKVLYRLVTSLIKYHMAICYSLYISGFVWFILTLKKKMYKYQFSQYAWTHMILIVVFTQSSFTVANIFEGIFWFLLPASLIVINDIFAYICGFFFGRTPLIKLSPKKTWEGFIGASITTVISAFLLANIMGRFLWLTCPREDLSTGWLLCDPGPLFKQETHALPGWISDWLPWKEISILPVQWHALCLGLFASIIAPFGGFFASGFKRAFKIKDFGDSIPGHGGITDRMDCQMVMAVFAYIYHQSFVVPEVLSVDKLLDQIITSLTLEEQQALLVKLGQMLQEKVIGS

SEQ ID NO: 2272 - protein, 347 aa, Arabidopsis thaliana
MVVVIQIFMARELFNLLRKTHEDKQLPGFRLLNWHFFFTAMLFVYGRILSQRLVNTVTPDKVLYRLVTSLIKYHMAICYSLYISGFVWFILTLKKKMYKYQFSQYAWTHMILIVVFTQSSFTVANIFEGIFWFLLPASLIVINDIFAYICGFFFGRTPLIKLSPKKTWEGFIGASITTVISAFLLANIMGRFLWLTCPREDLSTGWLLCDPGPLFKQETHALPGWISDWLPWKEISILPVQWHALCLGLFASIIAPFGGFFASGFKRAFKIKDFGDSIPGHGGITDRMDCQMVMAVFAYIYHQSFVVPEVLSVDKLLDQIITSLTLEEQQALLVKLGQMLQEKVIGS

SEQ ID NO: 2273 - DNA, 2059 bp, Arabidopsis thaliana
aagtcttttttataagctcatgctcattattactccgacaagtgccgtgtaattcctcgccctcggctactcttttctcttcttgcctctcgtctccgccgctgattcagctgccgccgacaaaggaatatggaagaaaaagatgtgtatacgcaagatggaactgttgatattcacaaaaatcctgcaaacaaggagaaaaccggaaattggaaagcttgccgcttcattctcggaaatgagtgctgtgaaagattggcctactatggcatgggcactaaccttgtgaattatcttgagagccgtctgaatcaaggcaatgctacggctgcaaataacgtcacgaattggtctggaacatgttatataactcctttgattggagcctttatagctgatgcttaccttggacgatattggactattgcaacttttgttttcatctatgtctccggtatgactcttttgacattatcagcttcagttcctggacttaaaccaggtaactgcaatgctgatacttgtcatccaaattctagtcagactgctgttttctttgtcgcgctttatatgattgctcttggaactggcggtataaagccgtgtgtttcgtcctttggagctgatcagtttgatgagaatgatgagaatgagaagatcaagaaaagttctttcttcaactggttttacttctccattaatgttggagctctcattgctgcaactgttctcgtctggatacaaatgaatgttggttggggatggggtttcggtgttccaacagtcgcgatggttatcgcggtttgctttttcttcttcggaagccgtttttacagacttcagagacctggagggagtccacttactaggatctttcaggttatagtagcggcttttcggaagataagtgttaaggttccagaggacaagtctctgctctttgaaactgcagatgatgagagtaacatcaaaggtagccggaaacttgtgcacacagataacttaaagttttttgacaaggcagcggttgagagtcaatctgatagcatcaaagacggggaagtcaatccatggagactatgttctgttactcaagttgaagaacttaagtcaataatcacacttcttccagtttgggccacaggaatagtcttcgccacagtgtacagccaaatgagcacaatgtttgtgttacaaggaaacacaatggaccaacacatgggaaaaaactttgaaatcccatcagcttcactctcacttttcgacactgtcagtgtactcttctggactcctgtctatgaccagttcattatcccgctggcaagaaagttcacacgcaatgaacgaggcttcactcagcttcaacgtatgggtataggtcttgtggtctccatctttgccatgatcactgcaggagtcttggaggttgtcaggcttgattatgtcaaaactcacaatgcatatgaccaaaaacagatccatatgtcgatattctggcagataccgcagtatttacttatcggttgtgcagaagttttcacctttataggtcagcttgagtttttctatgatcaggctcctgatgccatgagaagtctctgctctgctttgtcgttgaccacggttgcgttggggaactatttgagcacagttcttgtgacggttgtgatgaagataacgaagaagaacggtaaaccgggttggataccggataacttgaaccgaggccatcttgattactttttctacttgttggcaactctcagtttcctcaacttcttagtgtacctctggatttcaaaacgctacaaatacaagaaagctgttggtcgagcacattgatcaagaaactggtgtggaagatatttggagttaacagtatttgtttgaaaagtgttttgcttgtaaatgttttttgtatgtggtctagttgttgttggtgtgttaggtttgttttggttttgcttatgtatttctgaatacttccagtcttccacttatatgtaaaaggctattggtaactattttatgagctttttgcttaaagctttttgaccgc

SEQ ID NO: 2274 - protein, 570 aa, Arabidopsis thaliana
MEEKDVYTQDGTVDIHKNPANKEKTGNWKACRFILGNECCERLAYYGMGTNLVNYLESRLNQGNATAANNVTNWSGTCYITPLIGAFIADAYLGRYWTIATFVFIYVSGMTLLTLSASVPGLKPGNCNADTCHPNSSQTAVFFVALYMIALGTGGIKPCVSSFGADQFDENDENEKIKKSSFFNWFYFSINVGALIAATVLVWIQMNVGWGWGFGVPTVAMVIAVCFFFFGSRFYRLQRPGGSPLTRIFQVIVAAFRKISVKVPEDKSLLFETADDESNIKGSRKLVHTDNLKFFDKAAVESQSDSIKDGEVNPWRLCSVTQVEELKSIITLLPVWATGIVFATVYSQMSTMFVLQGNTMDQHMGKNFEIPSASLSLFDTVSVLFWTPVYDQFIIPLARKFTRNERGFTQLQRMGIGLVVSIFAMITAGVLEVVRLDYVKTHNAYDQKQIHMSIFWQIPQYLLIGCAEVFTFIGQLEFFYDQAPDAMRSLCSALSLTTVALGNYLSTVLVTVVMKITKKNGKPGWIPDNLNRGHLDYFFYLLATLSFLNFLVYLWISKRYKYKKAVGRAH

SEQ ID NO: 2275 - protein, 523 aa, Arabidopsis thaliana
MGTNLVNYLESRLNQGNATAANNVTNWSGTCYITPLIGAFIADAYLGRYWTIATFVFIYVSGMTLLTLSASVPGLKPGNCNADTCHPNSSQTAVFFVALYMIALGTGGIKPCVSSFGADQFDENDENEKIKKSSFFNWFYFSINVGALIAATVLVWIQMNVGWGWGFGVPTVAMVIAVCFFFFGSRFYRLQRPGGSPLTRIFQVIVAAFRKISVKVPEDKSLLFETADDESNIKGSRKLVHTDNLKFFDKAAVESQSDSIKDGEVNPWRLCSVTQVEELKSIITLLPVWATGIVFATVYSQMSTMFVLQGNTMDQHMGKNFEIPSASLSLFDTVSVLFWTPVYDQFIIPLARKFTRNERGFTQLQRMGIGLVVSIFAMITAGVLEVVRLDYVKTHNAYDQKQIHMSIFWQIPQYLLIGCAEVFTFIGQLEFFYDQAPDAMRSLCSALSLTTVALGNYLSTVLVTVVMKITKKNGKPGWIPDNLNRGHLDYFFYLLATLSFLNFLVYLWISKRYKYKKAVGRAH

SEQ ID NO: 2276 - protein, 461 aa, Arabidopsis thaliana
MTLLTLSASVPGLKPGNCNADTCHPNSSQTAVFFVALYMIALGTGGIKPCVSSFGADQFDENDENEKIKKSSFFNWFYFSINVGALIAATVLVWIQMNVGWGWGFGVPTVAMVIAVCFFFFGSRFYRLQRPGGSPLTRIFQVIVAAFRKISVKVPEDKSLLFETADDESNIKGSRKLVHTDNLKFFDKAAVESQSDSIKDGEVNPWRLCSVTQVEELKSIITLLPVWATGIVFATVYSQMSTMFVLQGNTMDQHMGKNFEIPSASLSLFDTVSVLFWTPVYDQFIIPLARKFTRNERGFTQLQRMGIGLVVSIFAMITAGVLEVVRLDYVKTHNAYDQKQIHMSIFWQIPQYLLIGCAEVFTFIGQLEFFYDQAPDAMRSLCSALSLTTVALGNYLSTVLVTVVMKITKKNGKPGWIPDNLNRGHLDYFFYLLATLSFLNFLVYLWISKRYKYKKAVGRAH

SEQ ID NO: 2277 - DNA, 2159 bp, Arabidopsis thaliana
aaaactctaaatcttcttcagattttttctcagggaagaagaaccagagcgtttaacgtcgacgaacacagatacggcgtgtggtaataaataatgtcttctggcttgaaaatcatagaagaaccgcaaaaaccgattgagaagctgcagatttatccgacggctaatgctggtgtttctcccttttggcgagacaagtatgagcgagatgctaaaaagtattgggatatattttacaagcatcatggagacagatttttcaaagaccgccactacttggataaggaatggaatagctatttttccgttagtgggaaaagtgtcattcttgaggttggctgtggagctggaaacaccatctttccattgatcgccacatatccagacatttttgtttatgcatgtgatttttcaccacgagccgtcgaattggtcaaggctcatgatgaatacacagagacacgcgtttgtgcatttgcttgtgacttgacaggggatggtcttgacaagcatatttctccatcttcagttgatattgtgaccatgatatttgttttatctgcggtatccccagagaagatgtcctcagtattgcagaacattaggaaagttcttaagccaaatgggtgtatcctcttccgtgactatgctgtcggtgatcttgctcaggtttgatccaccttttattacttcagaaattcaaagttatcgctactcgtatgcccattttgatgcacttgaaacgaaaaaatatttctactacagcttcatgctttcaaaaaaacattgtagtctggctttcctttttggaagaacaaccagttaggaggaggtttagtatcctttagaatacgaaggcatggttacccattatgtgtttcagtattttatcaacaggagaggttttctgggaaggatcagaagatcagcgagaacttttatgtgagaggtgatggcactcgtgcattctacttttctaatgaattcctagaaactttgttttctgaacaaggatttgaagttgaggagcttgatgtttgctgcaaacaagttgagaatcgttcacgcgaattggtcatgaatcggcgctgggtccaagctacatttcgtcgatcaaatggcaacaaaaacccttgtgatagtttgactcctgccaagttagacatatctgaacaacagcatagcattcagtctaaatctgaggagcaggaaagaaaagagattatcgataacaacactgacattgacatatccgatggtctggctatggaaatgtttggagcctccccatcaagtcatgagatgagcgtggttaagcttagggattctgcttttaaagtcaaacttttatccaaagaatatcaacatacttgcaaatctacggggttgatgctctgggagtctgctcggcttatggcttctgttcttgacaggaacccaaacattgtttctggaaaacgggtgttggaattgggttgtggctgcacaggaatttgctcgatggtagctgccagatcagctaaccttgtggtagcgaccgatgcagacacaaaggcacttacgctattgacagagaacatcacaatgaacctccaatcttctttacttggaaaactgaaaacaggcgtacttgaatggggaaacaaagagcatgtagaaagcattaaacgtttggcttgtgagggatttgaagttatcatcgggacagatgttacctatgtagctgaagccattatacctttgtttgaaaccgcaaaagagttgatcttacggaaaatgggagacgacttagaggtgcaagagaagccggcattgattctatgccatgttttcagaagggttgatgaaccttctctcctgtcagctgcatctaagtttgggtttaagcttgcagacagatgggctgcaaattcaaaggaatctcctattgggaacatcattgacagttggtttaccgaaaaggatttggtcgcagaaatcccgagttctgcgttgcatattctctattttcagatggagtaactatgtggtagaggagcaaatgttgattaactggagagttcttttatattaaaaaatcctcattgaatctcaaatcaatgaatgtcctacatgtattcttctatattagcaatggattttttgggtataaaactatt

SEQ ID NO: 2278 - protein, 314 aa, Arabidopsis thaliana
MNRRWVQATFRRSNGNKNPCDSLTPAKLDISEQQHSIQSKSEEQERKEIIDNNTDIDISDGLAMEMFGASPSSHEMSVVKLRDSAFKVKLLSKEYQHTCKSTGLMLWESARLMASVLDRNPNIVSGKRVLELGCGCTGICSMVAARSANLVVATDADTKALTLLTENITMNLQSSLLGKLKTGVLEWGNKEHVESIKRLACEGFEVIIGTDVTYVAEAIIPLFETAKELILRKMGDDLEVQEKPALILCHVFRRVDEPSLLSAASKFGFKLADRWAANSKESPIGNIIDSWFTEKDLVAEIPSSALHILYFQME

SEQ ID NO: 2279 - protein, 251 aa, Arabidopsis thaliana
MEMFGASPSSHEMSVVKLRDSAFKVKLLSKEYQHTCKSTGLMLWESARLMASVLDRNPNIVSGKRVLELGCGCTGICSMVAARSANLVVATDADTKALTLLTENITMNLQSSLLGKLKTGVLEWGNKEHVESIKRLACEGFEVIIGTDVTYVAEAIIPLFETAKELILRKMGDDLEVQEKPALILCHVFRRVDEPSLLSAASKFGFKLADRWAANSKESPIGNIIDSWFTEKDLVAEIPSSALHILYFQME

SEQ ID NO: 2280 - protein, 249 aa, Arabidopsis thaliana
MFGASPSSHEMSVVKLRDSAFKVKLLSKEYQHTCKSTGLMLWESARLMASVLDRNPNIVSGKRVLELGCGCTGICSMVAARSANLVVATDADTKALTLLTENITMNLQSSLLGKLKTGVLEWGNKEHVESIKRLACEGFEVIIGTDVTYVAEAIIPLFETAKELILRKMGDDLEVQEKPALILCHVFRRVDEPSLLSAASKFGFKLADRWAANSKESPIGNIIDSWFTEKDLVAEIPSSALHILYFQME

SEQ ID NO: 2281 - DNA, 1117 bp, Arabidopsis thaliana
aaaactaatctgtatgatcgatcttgtgctgaagatatcgaaaagatgtcatctttgggtaggattttgtctgtttcctacccaccggatccgtacacttggcggttttcacagtataagctgtcttcttcactagggcgaaatcggagactcagatggcgattcacggcgttggatcctgaatcttcctcactcgactctgaatcctccgccgataaattcgcttccgggttttgtataatagaagggcctgaaacagtacaggactttgccaaaatgcaattacaagagattcaagataacattcgaagccgacgaaacaagatcttcttgcacatggaagaggtgcggaggctaagaatacaacaacggattaaaaacacagaacttggtatcattaacgaagaacaagaacatgaattacctaatttcccatcttttatcccattcttacctccattgactgctgccaatttgaaagtctattacgcaacttgtttctcactcatcgcggggattatcctattcggtggtctactagctcctactctagagctgaagttaggtataggaggtacatcgtatgcagatttcattcaaagccttcatctacctatgcaattgagtcaagtggacccgatagtagcgtcgttttctggaggagcggttggtgtgatttcggctttgatggtagtagaagttaacaacgtaaagcagcaagagcacaagagatgcaaatactgtctaggaactgggtatctagcatgtgctcgttgctctagcacaggtgctcttgttttaactgaaccagtctcagctattgctggtgggaatcattctctatcaccgcccaaaaccgaaagatgttcaaactgttcaggtgccggaaaggtgatgtgcccgacatgtctgtgcacaggaatggctatggccagtgagcatgatcctcgtatcgaccctttcgattgaattttgcaacacattctacttccttagaatctcattctgtcagtgtaactaaaaatggtatgtactgattaaataattagaaccgcatactttgatctgtatatacacacaattaaagttataatacaatgttagacatgtcttctcc

SEQ ID NO: 2282 - protein, 322 aa, Arabidopsis thaliana
KTNLYDRSCAEDIEKMSSLGRILSVSYPPDPYTWRFSQYKLSSSLGRNRRLRWRFTALDPESSSLDSESSADKFASGFCIIEGPETVQDFAKMQLQEIQDNIRSRRNKIFLHMEEVRRLRIQQRIKNTELGIINEEQEHELPNFPSFIPFLPPLTAANLKVYYATCFSLIAGIILFGGLLAPTLELKLGIGGTSYADFIQSLHLPMQLSQVDPIVASFSGGAVGVISALMVVEVNNVKQQEHKRCKYCLGTGYLACARCSSTGALVLTEPVSAIAGGNHSLSPPKTERCSNCSGAGKVMCPTCLCTGMAMASEHDPRIDPFD

SEQ ID NO: 2283 - protein, 307 aa, Arabidopsis thaliana
MSSLGRILSVSYPPDPYTWRFSQYKLSSSLGRNRRLRWRFTALDPESSSLDSESSADKFASGFCIIEGPETVQDFAKMQLQEIQDNIRSRRNKIFLHMEEVRRLRIQQRIKNTELGIINEEQEHELPNFPSFIPFLPPLTAANLKVYYATCFSLIAGIILFGGLLAPTLELKLGIGGTSYADFIQSLHLPMQLSQVDPIVASFSGGAVGVISALMVVEVNNVKQQEHKRCKYCLGTGYLACARCSSTGALVLTEPVSAIAGGNHSLSPPKTERCSNCSGAGKVMCPTCLCTGMAMASEHDPRIDPFD

SEQ ID NO: 2284 - protein, 230 aa, Arabidopsis thaliana
MQLQEIQDNIRSRRNKIFLHMEEVRRLRIQQRIKNTELGIINEEQEHELPNFPSFIPFLPPLTAANLKVYYATCFSLIAGIILFGGLLAPTLELKLGIGGTSYADFIQSLHLPMQLSQVDPIVASFSGGAVGVISALMVVEVNNVKQQEHKRCKYCLGTGYLACARCSSTGALVLTEPVSAIAGGNHSLSPPKTERCSNCSGAGKVMCPTCLCTGMAMASEHDPRIDPFD

SEQ ID NO: 2285 - DNA, 1191 bp, Arabidopsis thaliana
aaaatctctcgctctgttacgccattttcgtgagtaagaagaagaaaccctaagagtctctccccaaaacctcaaaccatggccgagggactcgtattgaagggcattatgcgcgcccacaccgacattgtcacggccatcgctacgccgatcgacaattccgacatcatcgtcacagcgtcgcgtgacaaatcaatcatcctctggaaactcacaaaggacgagaagtcttacggtgttgctcagcgtaggctcacaggtcactctcacttcgtggaagatgttgttctctcatcggacggtcagtttgcactctccggaagttgggacggtgagctccgtctctgggatctcgccacgggagaaacaactcgtcgattcgttggtcacacgaaagatgtgctctctgttgctttctctactgataaccgtcagatcgtgtctgcttctcgtgatcgtacgattaagctttggaacacacttggtgagtgcaagtataccatctctgaaggtgatggtcacaaggaatgggttagttgtgttaggtttagtcctaatactcttgtaccaactattgtatctgcttcttgggataaaactgtgaaagtttggaatctccagaactgtaagctgaggaactctcttgttggtcactctggttacctcaacactgttgctgtctcgcctgatggttcgctatgcgccagtggtgggaaagatggtgttatcttgttgtgggatttggctgaaggaaagaagctttactcgcttgaggctggttcgattattcactcgctttgcttcagtcctaacagatactggttgtgtgctgctactgagaatagcattaggatttgggatcttgagagcaagtctgttgttgaggacttgaaggttgatctcaagtctgaggcagagaagaatgaaggtggtgttggaactggtaaccagaagaaggttatctactgcacaagcttgaactggagtgcagatggaagcacattgttcagtggttacactgatggagttgtcagggtctggggtattggtcgttactagagatcacaacaagatgaagaagaagtcacgaaatctccggaaaaaagtagctgcttttaatttttccagactgcgtcagtattgtattagtctctcgcaaacttctattttggcaatttttgtttaatttcc

SEQ ID NO: 2286 - protein, 326 aa, Arabidopsis thaliana
MAEGLVLKGIMRAHTDIVTAIATPIDNSDIIVTASRDKSIILWKLTKDEKSYGVAQRRLTGHSHFVEDVVLSSDGQFALSGSWDGELRLWDLATGETTRRFVGHTKDVLSVAFSTDNRQIVSASRDRTIKLWNTLGECKYTISEGDGHKEWVSCVRFSPNTLVPTIVSASWDKTVKVWNLQNCKLRNSLVGHSGYLNTVAVSPDGSLCASGGKDGVILLWDLAEGKKLYSLEAGSIIHSLCFSPNRYWLCAATENSIRIWDLESKSVVEDLKVDLKSEAEKNEGGVGTGNQKKVIYCTSLNWSADGSTLFSGYTDGVVRVWGIGRY

SEQ ID NO: 2287 - protein, 316 aa, Arabidopsis thaliana
MRAHTDIVTAIATPIDNSDIIVTASRDKSIILWKLTKDEKSYGVAQRRLTGHSHFVEDVVLSSDGQFALSGSWDGELRLWDLATGETTRRFVGHTKDVLSVAFSTDNRQIVSASRDRTIKLWNTLGECKYTISEGDGHKEWVSCVRFSPNTLVPTIVSASWDKTVKVWNLQNCKLRNSLVGHSGYLNTVAVSPDGSLCASGGKDGVILLWDLAEGKKLYSLEAGSIIHSLCFSPNRYWLCAATENSIRIWDLESKSVVEDLKVDLKSEAEKNEGGVGTGNQKKVIYCTSLNWSADGSTLFSGYTDGVVRVWGIGRY

SEQ ID NO: 2288 - DNA, 2252 bp, Arabidopsis thaliana
gatgaaggtaagagagaaacaaacaaacaaaagagagagtacgggtttcttcttcgtcattctcacgaattcgtgaatttatttttgatttcgtcatctgggttttctcaaattctcttccttttttatcttttgagattttctggtattgaaagttcaaacctttgtactgggttcgttgatttttttttggtttccttctcattattcttcatgattcctccttttttctgtttctcgaaatttgtggttataaaattcacatttttttttgggagcagttgggtttcaatcatgtgtttatgatgttatattattaacaagagttgaatgaatcttctttttgaccgttgaaaagagaaaaactaaattaaagcaaagaggaaaaagaagaagaagaagattgtgttgttgttgttgttttaacgcttctttctgagataaagacatgcgtttctttttcagctcacattattttcccaaatgttgtgagtttgagaagaaaagtctgtttttttattgagatttttttgtttctatagattctatcgaaatgccgatgtttcagccgttaaagagagatgggttaataggatttgaaggtggtggtgagggcaagtcttagatctggatactgcagtgaaagatggagttctcggtggtgttaatggtggtggtgttggagttgttgatgagaaattggatctgaagaagatgataaaggagctagatttacaagatataccttctgttttcatttgtcctatctccttagagccgatgcaagatcctgtgactttgtgtactggtcaaacctatgaaaggttaaacattcacaaatggtttaacctaggtcacttgacttgtcctactacaatgcaagagctttgggatgatacggtaactcctaataaaactcttcatcatttgatctatacttggttctctcagaagtatgtgttgatgaagaaacgttctgaggatgttcaaggacgagctattgagattttggggactttgaagaaagctaaatgtcaagctagggttcatgctttgagtgagcttaaacagattgttattgctcatcttatggcgaggaagactgttgttgaagaaggtggtgtctctgtgatctcttctcttttgggtccttttacttctcatgctgttggatctgaggttgttgctattcttgtgagtcttgatcttgattctgattcgaaatccggcttgatgcaaccagctaaggtttctttgattgttgatatgttgaatgatggatctaatgagactaagatcaattgtgctagattgattagaggattggtggaagagaaagggtttagagcagagcttgtttcaagtcatagtttgcttgttgggttaatgagattggttaaggataagagacatagaaatggagtatctcctgcacttcggttgcttaaaccgatttcggttcataaacaagttcgaagcttgatggttagcattggagcagtgcctcaattagttgatatcttaccgtctttagacccggaatgtttggagttagctctgtttgttcttgatgctttgtgtacagacgtggaaggaagagttgctgtcaaagactctgcaaacacaataccttatacagttagggtgctgatgagggtgtctgagaattgcactaactacgcgctgtcgattctttggtctgtctgcaaattagctccagaagaatgttcaccacttgctgttgaggttggtcttgctgcaaagctgttactcgtgatccagagcgggtgtgatgcagcgttgaagcagcggtcagcagagctacttaagctttgtagtctacattattcagacaccatgtttatttccaaatgcaaactcacaaggacaatccaatagcattggcactgattgatcacaggattcagcgggttatccatgaaacggtaaatgtgaattgcattacgaatctgcctttgccctgatgtatatatagatgatgagtttgaagattgagctattggttttggtggtaacaattcaaaggaagaggcaatcagctgatggaaacatggggaagacgaagaaaccgggtggttgagggatcggtatgtaatgttaccatattggttcgttttgcaataagcattgggaattagaaaaaaactgtgtaaagttaccgcctctggctcaaatcaatttcagaagaacaaagaaaaagaagaatttgaagaaaggaaccatattaagtt

SEQ ID NO: 2289 - protein, 394 aa, Arabidopsis thaliana
MIKELDLQDIPSVFICPISLEPMQDPVTLCTGQTYERLNIHKWFNLGHLTCPTTMQELWDDTVTPNKTLHHLIYTWFSQKYVLMKKRSEDVQGRAIEILGTLKKAKCQARVHALSELKQIVIAHLMARKTVVEEGGVSVISSLLGPFTSHAVGSEVVAILVSLDLDSDSKSGLMQPAKVSLIVDMLNDGSNETKINCARLIRGLVEEKGFRAELVSSHSLLVGLMRLVKDKRHRNGVSPALRLLKPISVHKQVRSLMVSIGAVPQLVDILPSLDPECLELALFVLDALCTDVEGRVAVKDSANTIPYTVRVLMRVSENCTNYALSILWSVCKLAPEECSPLAVEVGLAAKLLLVIQSGCDAALKQRSAELLKLCSLHYSDTMFISKCKLTRTIQ

SEQ ID NO: 2290 - protein, 372 aa, Arabidopsis thaliana
MQDPVTLCTGQTYERLNIHKWFNLGHLTCPTTMQELWDDTVTPNKTLHHLIYTWFSQKYVLMKKRSEDVQGRAIEILGTLKKAKCQARVHALSELKQIVIAHLMARKTVVEEGGVSVISSLLGPFTSHAVGSEVVAILVSLDLDSDSKSGLMQPAKVSLIVDMLNDGSNETKINCARLIRGLVEEKGFRAELVSSHSLLVGLMRLVKDKRHRNGVSPALRLLKPISVHKQVRSLMVSIGAVPQLVDILPSLDPECLELALFVLDALCTDVEGRVAVKDSANTIPYTVRVLMRVSENCTNYALSILWSVCKLAPEECSPLAVEVGLAAKLLLVIQSGCDAALKQRSAELLKLCSLHYSDTMFISKCKLTRTIQ

SEQ ID NO: 2291 - protein, 340 aa, Arabidopsis thaliana
MQELWDDTVTPNKTLHHLIYTWFSQKYVLMKKRSEDVQGRAIEILGTLKKAKCQARVHALSELKQIVIAHLMARKTVVEEGGVSVISSLLGPFTSHAVGSEVVAILVSLDLDSDSKSGLMQPAKVSLIVDMLNDGSNETKINCARLIRGLVEEKGFRAELVSSHSLLVGLMRLVKDKRHRNGVSPALRLLKPISVHKQVRSLMVSIGAVPQLVDILPSLDPECLELALFVLDALCTDVEGRVAVKDSANTIPYTVRVLMRVSENCTNYALSILWSVCKLAPEECSPLAVEVGLAAKLLLVIQSGCDAALKQRSAELLKLCSLHYSDTMFISKCKLTRTIQ

SEQ ID NO: 2292 - DNA, 1736 bp, Arabidopsis thaliana
tagttatcgtcgctgattcaccaacaacaacaacatcacaagaaagcgtcctcttttataggaccctctgtccctgtttctctctccagttttattgtagaattcgctgtcattttcacaacgactcacttctttcagctctctccattcggcgctctcttctggaattgaagaatcaagattagcaatggcccatacatcagaatctgtgaatcctagagatgtttgcattgtgggtgttgcacgtactccaatgggtggctttctcggatctctttcatctttacctgccacaaagcttggatctttagctattgcagctgctttgaagagagcaaatgttgatccagctcttgttcaagaagttgtctttggcaatgttcttagtgctaatttgggtcaagctcctgctcgtcaagctgctttaggtgcaggaatccctaactctgttatctgtactacagttaacaaggtttgtgcatcaggcatgaaagcggtaatgattgctgctcaaagtatccagttagggatcaatgatgtagttgtggcgggtggtatggaaagcatgtctaatacaccaaaatatttggcagaagcaaggaagggatctcgttttggtcatgattctttagtagatggaatgttgaaggatggactatgggatgtctataacgactgtgggatgggaagctgtgcagaattatgcgctgagaagtttcagattacaagggagcagcaagatgactatgcagttcagagttttgagcgtggtattgctgcccaggaagctggcgccttcacatgggaaatcgtcccggttgaagtttctggaggaagaggtaggccatcaaccattgttgacaaggacgaaggtcttgggaagtttgatgctgcaaaattgaggaaactccgtcctagtttcaaagagaatggagggactgttacagctggaaatgcgtctagcataagtgatggtgcagctgcccttgtcctagtgagcggagagaaggctcttcagctaggacttctagtattagcaaaaattaaagggtatggtgacgcagctcaggaaccagagtttttcactactgctcctgctcttgctataccaaaagccattgcacatgctggtttggaatcttctcaagttgattactatgagatcaatgaagcatttgcagttgtagcacttgcaaatcaaaagctactcgggattgctccagagaaagtgaacgtaaatggaggagctgtctccttaggacaccctctaggctgcagtggcgcccgtattctaatcacgttgcttgggatactaaagaagagaaacggaaagtacggtgtgggaggagtgtgcaacggaggaggaggtgcttctgctctagttcttgagctcctttgatgcattatgaatccaggttggtaaactaaatagatggatctatctctcatccaacttccatgagtcagtcattgcactttacgttttatgttagttggtctctcaataaaggagtgatcgttgatgttgttaagtctatttatttatatgaactcggcttctttttttctcttaccggtgacagtcagttattgaatcatggaccgatttaccgtagttaatgatttatcctcatgtactcattaaaacgtcgaccaagatttgacatttgatggataaatttaagtacacaatgtgtatgtaagacaagaaaataataataattggacatttctgt

SEQ ID NO: 2293 - protein, 403 aa, Arabidopsis thaliana
MAHTSESVNPRDVCIVGVARTPMGGFLGSLSSLPATKLGSLAIAAALKRANVDPALVQEVVFGNVLSANLGQAPARQAALGAGIPNSVICTTVNKVCASGMKAVMIAAQSIQLGINDVVVAGGMESMSNTPKYLAEARKGSRFGHDSLVDGMLKDGLWDVYNDCGMGSCAELCAEKFQITREQQDDYAVQSFERGIAAQEAGAFTWEIVPVEVSGGRGRPSTIVDKDEGLGKFDAAKLRKLRPSFKENGGTVTAGNASSISDGAAALVLVSGEKALQLGLLVLAKIKGYGDAAQEPEFFTTAPALAIPKAIAHAGLESSQVDYYEINEAFAVVALANQKLLGIAPEKVNVNGGAVSLGHPLGCSGARILITLLGILKKRNGKYGVGGVCNGGGGASALVLELL

SEQ ID NO: 2294 - protein, 381 aa, Arabidopsis thaliana
MGGFLGSLSSLPATKLGSLAIAAALKRANVDPALVQEVVFGNVLSANLGQAPARQAALGAGIPNSVICTTVNKVCASGMKAVMIAAQSIQLGINDVVVAGGMESMSNTPKYLAEARKGSRFGHDSLVDGMLKDGLWDVYNDCGMGSCAELCAEKFQITREQQDDYAVQSFERGIAAQEAGAFTWEIVPVEVSGGRGRPSTIVDKDEGLGKFDAAKLRKLRPSFKENGGTVTAGNASSISDGAAALVLVSGEKALQLGLLVLAKIKGYGDAAQEPEFFTTAPALAIPKAIAHAGLESSQVDYYEINEAFAVVALANQKLLGIAPEKVNVNGGAVSLGHPLGCSGARILITLLGILKKRNGKYGVGGVCNGGGGASALVLELL

SEQ ID NO: 2295 - protein, 303 aa, Arabidopsis thaliana
MKAVMIAAQSIQLGINDVVVAGGMESMSNTPKYLAEARKGSRFGHDSLVDGMLKDGLWDVYNDCGMGSCAELCAEKFQITREQQDDYAVQSFERGIAAQEAGAFTWEIVPVEVSGGRGRPSTIVDKDEGLGKFDAAKLRKLRPSFKENGGTVTAGNASSISDGAAALVLVSGEKALQLGLLVLAKIKGYGDAAQEPEFFTTAPALAIPKAIAHAGLESSQVDYYEINEAFAVVALANQKLLGIAPEKVNVNGGAVSLGHPLGCSGARILITLLGILKKRNGKYGVGGVCNGGGGASALVLELL

SEQ ID NO: 2296 - DNA, 1134 bp, Arabidopsis thaliana
tcacttctccactttttttctcggttagtgtcagtttttttgttggctagtctcttcggtcaaaatgcagctctttccggtcatcctaccgacactatgcgtcttcctccaccttctaataagtggctctggctctactccaccgttgactcactccaatcaacaagtggcagccactcgttggcttcccgccaccgcaacctggtacggaagtgccgagggagacggcagcagcggaggagcttgtggttacggatcgttggtggacgtgaagccgtttaaggctagagtcggagcggtgagtccgattctgttcaaaggtggtgaaggctgcggtgcatgctacaaggtcaggtgtctcgacaagaccatttgctctaagagagcagtcaccattattgccaccgaccagtcaccgtcaggaccatctgctaaagcaaaacacactcatttcgacctcagtggcgccgcctttggacatatggctattcccggccataacggtgtcatccgcaaccgtggcctattaaacatcctctaccgccgaacggcatgcaaatacagagggaagaacatagcgtttcatgtgaacgcaggatcaactgattattggttatcgcttctcattgagtatgaagacggtgaaggagacattggctctatgcacattcgtcaagcgggatctaaggagtggatatcgatgaagcacatatggggagcgaactggtgcatcgtcgaaggaccactcaagggaccattctccgtgaagctcacaactttgtccaacaataagacactctccgccaccgacgtcatccccagtaactgggttcccaaagctacttacacctctcgcctcaacttctcccctgttctctaattagcctctcttcaaaaaaattttgttgtgggagagaggaacacagagaagacaatgagtgagccatctccaaagttaggggattaagagcttttcattgtgtgtgtgactactaacattctatgttgtcccttttcatttttttccttctccatagggatgtgtgtatcatctataatgttgtttgtgggacattactatataagaatttacaaaagatgtaataatgtaatatgcaatctcattcctttttt

SEQ ID NO: 2297 - protein, 271 aa, Arabidopsis thaliana
MQLFPVILPTLCVFLHLLISGSGSTPPLTHSNQQVAATRWLPATATWYGSAEGDGSSGGACGYGSLVDVKPFKARVGAVSPILFKGGEGCGACYKVRCLDKTICSKRAVTIIATDQSPSGPSAKAKHTHFDLSGAAFGHMAIPGHNGVIRNRGLLNILYRRTACKYRGKNIAFHVNAGSTDYWLSLLIEYEDGEGDIGSMHIRQAGSKEWISMKHIWGANWCIVEGPLKGPFSVKLTTLSNNKTLSATDVIPSNWVPKATYTSRLNFSPVL

SEQ ID NO: 2298 - DNA, 1214 bp, Arabidopsis thaliana
gtcactttgtctcgtccaccttttaaaaaccctctctaaagtctccgaaacatcttctctcttaaacaaatcctctctgattcgatgggttttagcaaagaagagattagtaaaaccagaaagctttggtcatctctatggagaggaatcaaaactatattcgttttgttcacaatgttcttctcttttctccttgtctctgctcctatcttcctcgccgtcgccgatgctctcctcccttccgctctcctccaccgcttctcttcgccggcgactctctcttctcatctcaccaactacgatttccgtcactccctcatcgatattcctttaatctcaatcattagatccgctgttatactctgtgtttatggactctgtgacggaccaaaactatcgagaggaccgtatctgacaataacaatgatttgttcaatatcttctctaatctacgtttcgttaaaagctgcgtttgtgttcggtgagccagcgatcggagacggaggaggaaactacttcagagcggcggaagtggctctgtttctatgctcgtcagtcttagccataggtcacatcgttgtggcttatcgaacaagttgtagagaaagaaaaaagcttctcgtcttcaaaatcgacattgaagccgtttcggcttgtaaaaacgtgtacccgagataccaaaagatcttattacaacaagagagactcaaatagagacgtatttccaagagaatcaatacttgtaaatatatacacatacctcaacatgtaaataaaactaatatataaaaacatacggcgtataaatgtaacttctccttctgcctttcggcgttgacccatcaactccttcgcttttaagtttcagaaggatccaaagcaaaaggaatggagattaattatataacctatgcttttttaaatgagacatttcagatgaactggcagttgttagctttaacattatattagttagggcgatttgtaaataatccagagttcctcaatgagaaaagaagcccaaggctgtctctccgttttgtatatatgtttatgtttgtatttctttgtggttttaatatatgttttgtaattgtaatttgtaagcataagcacatagtatgtgatacgtccgcgtggatttctttatacgtcaccaaaatctctaatagaatcgtaaagcaacctttttacgatcaatatctatttatctt

SEQ ID NO: 2299 - protein, 209 aa, Arabidopsis thaliana
MGFSKEEISKTRKLWSSLWRGIKTIFVLFTMFFSFLLVSAPIFLAVADALLPSALLHRFSSPATLSSHLTNYDFRHSLIDIPLISIIRSAVILCVYGLCDGPKLSRGPYLTITMICSISSLIYVSLKAAFVFGEPAIGDGGGNYFRAAEVALFLCSSVLAIGHIVVAYRTSCRERKKLLVFKIDIEAVSACKNVYPRYQKILLQQERLK

SEQ ID NO: 2300 - protein, 179 aa, Arabidopsis thaliana
MFFSFLLVSAPIFLAVADALLPSALLHRFSSPATLSSHLTNYDFRHSLIDIPLISIIRSAVILCVYGLCDGPKLSRGPYLTITMICSISSLIYVSLKAAFVFGEPAIGDGGGNYFRAAEVALFLCSSVLAIGHIVVAYRTSCRERKKLLVFKIDIEAVSACKNVYPRYQKILLQQERLK

SEQ ID NO: 2301 - protein, 110 aa, Arabidopsis thaliana
SLCLVHLLKTLSKVSETSSLLNKSSLIRWVLAKKRLVKPESFGHLYGEESKLYSFCSQCSSLFSLSLLLSSSPSPMLSSLPLSSTASLRRRLSLLISPTTISVTPSSIFL

SEQ ID NO: 2302 - DNA, 1259 bp, Arabidopsis thaliana
ttgagaagaagaagacgaagcagaggaatctagggtttatgctacattgaagcaaagatggttacgagcagcgatcaaatccaaaatggttctgaagagcaatcaaaaagatcagagatttacacatacgaagcaccatggcagatctacgcaatgaactggagcattcgtcgagacaagaagtatcggctcgcaatcacaagcctcatcgagcaatatccgaatcgcgtcgaaattgttcagcttgatgaatcaaatggtgagattcgttcagatccaaatctctgcttcgaacatccttacccaccaacgaaaaccagtttcatacccgataaagaatgtcaaagacccgatcttttagctacttctagtgatttccttcgtttatggcgaatctctgatgatgaatctcgtgttgagcttaagtcttgtcttagtagtgataagaatagtgagtttagtggtccaatcacttcatttgattggaatgaagctgagcctagacgaattggtacttctagtattgataccacttgtactatttgggatatagagcgtgaagttgttgatacccagcttattgctcatgataaagaggtttatgacattgcttggggtggtgttggtgtctttgcctctgtctcagaggatggttccgttagagtgtttgatctccgtgataaggagcattcgacgattatctacgagagtggtgagcctagtactcctttggtgcgacttagttggaacaagcaggatccgaggtatatggctactgttatcatgggcagtgctaaaattgttgtgttggatattcggtttccggctcttcctgtcgtggagcttcagcgacatcaggctagtgtcaatgctatagcttgggctcctcatagctcttcccatatctgctccgctggagatgattctcaggcgttgatttgggatatatcttccatgggacagcatgttgaaggtggtctggatccgattctagcttacacagccggcgctgaggttgagcagcttcagtggtcatcttctcagcctgattgggttgccattgccttctctaacaagctgcagattctccgggtctgattatgttttacagatttctgttggatacttggatgtaaaaactcgttgctattgttgattaatgatcttttgatctctgactctaagcctcattgagtttcctttcatagtatggtctgtgtaggaactatgtaccttcaaaattgtgaataactagcttt

SEQ ID NO: 2303 - protein, 346 aa, Arabidopsis thaliana
MVTSSDQIQNGSEEQSKRSEIYTYEAPWQIYAMNWSIRRDKKYRLAITSLIEQYPNRVEIVQLDESNGEIRSDPNLCFEHPYPPTKTSFIPDKECQRPDLLATSSDFLRLWRISDDESRVELKSCLSSDKNSEFSGPITSFDWNEAEPRRIGTSSIDTTCTIWDIEREVVDTQLIAHDKEVYDIAWGGVGVFASVSEDGSVRVFDLRDKEHSTIIYESGEPSTPLVRLSWNKQDPRYMATVIMGSAKIVVLDIRFPALPVVELQRHQASVNAIAWAPHSSSHICSAGDDSQALIWDISSMGQHVEGGLDPILAYTAGAEVEQLQWSSSQPDWVAIAFSNKLQILRV

SEQ ID NO: 2304 - protein, 314 aa, Arabidopsis thaliana
MNWSIRRDKKYRLAITSLIEQYPNRVEIVQLDESNGEIRSDPNLCFEHPYPPTKTSFIPDKECQRPDLLATSSDFLRLWRISDDESRVELKSCLSSDKNSEFSGPITSFDWNEAEPRRIGTSSIDTTCTIWDIEREVVDTQLIAHDKEVYDIAWGGVGVFASVSEDGSVRVFDLRDKEHSTIIYESGEPSTPLVRLSWNKQDPRYMATVIMGSAKIVVLDIRFPALPVVELQRHQASVNAIAWAPHSSSHICSAGDDSQALIWDISSMGQHVEGGLDPILAYTAGAEVEQLQWSSSQPDWVAIAFSNKLQILRV

SEQ ID NO: 2305 - DNA, 956 bp, Arabidopsis thaliana
aacattaattgaggaggaggagattggttgttgttgacgacgcgtttccgctcactaattttttttaacctttttgtgtctccgtcgtcttttgatcttcaatctcagttttgagctgaagattatcgtatcgacctgcgattctcttcagatcgataatccatggctgcagctggaaacaagagcattaacgccaaattggtgttgcttggagatgttggtgctggaaaatcaagtcttgtgttacggtttgtcaaagatcagtttgttgaattccaggaatcaaccattggtgctgcttttttctcacaaacgttagctgtgaacgatgccactgtgaagtttgagatttgggatacagcgggtcaggaacggtaccatagtttggctccaatgtactacagaggtgctgctgctgcaatcattgtttttgatgttacgaatcaggcttcgtttgagagggcaaagaaatgggttcaggaactgcaggcacaaggtaaccctaatatggtcatggcccttgctggaaacaaatctgatttattagatgcaaggaaggtgacagcagaggatgcacaaacatatgctcaggaaaacggtcttttcttcatggaaacttcagcaaaaaccgctactaatgtcaaagagatattctatgaaatcgcaagaaggctaccgcgagtacagccaacagaaaacccaacaggaatggttctgccagacagggccatggatagggcagtgagctcatcttgttgtgcttagttatattgtgtaatggcacacacttctcttaaaaagagatcttttggtcactttaaagttatggacttctgtgtttgcgtctctttgctttgttttacgtatttgagatttgatctccactattttgtaaataaatctaatactcaactaagtaactaagtgcgtgagggggctatggatccatttgtcat

SEQ ID NO: 2306 - protein, 200 aa, Arabidopsis thaliana
MAAAGNKSINAKLVLLGDVGAGKSSLVLRFVKDQFVEFQESTIGAAFFSQTLAVNDATVKFEIWDTAGQERYHSLAPMYYRGAAAAIIVFDVTNQASFERAKKWVQELQAQGNPNMVMALAGNKSDLLDARKVTAEDAQTYAQENGLFFMETSAKTATNVKEIFYEIARRLPRVQPTENPTGMVLPDRAMDRAVSSSCCA

SEQ ID NO: 2307 - protein, 123 aa, Arabidopsis thaliana
MYYRGAAAAIIVFDVTNQASFERAKKWVQELQAQGNPNMVMALAGNKSDLLDARKVTAEDAQTYAQENGLFFMETSAKTATNVKEIFYEIARRLPRVQPTENPTGMVLPDRAMDRAVSSSCCA

SEQ ID NO: 2308 - DNA, 909 bp, Arabidopsis thaliana
caaagagtataaaaaatatctcatcgagcttgaaaataattaatcacttgctaattctaagcttcttctctttccaaaaatggcgtcatcatcggctttagctctcaggagacttctctcttcttccaccgtcgccgtccctcgcgccttaagagccgttcgtccggtggctgcttcatctcgcctcttcaataccaacgccgccagaaactatgaagacggtgtcgataggaaccatcactcaaaccgacatgtttctcgccacggcggcgatttcttctcacatatactcgatccgtttactccaacgagaagcttgagccagatgctgaatttcatggaccaggtaagcgaaatccctttggtatcagctactcgtggaatgggagcttctggagttagacgtggttggaacgtgaaagagaaagacgacgcgttgcatctaaggatagatatgccgggactaagcagagaggatgtgaaattggctttggaacagaacacattggtgattagaggagaaggggaaacagaggagggagaagatgtttctggagatggacggaggtttacgagtaggattgagttaccggagaaagtatacaagactgatgagattaaggcggaaatgaagaatggtgtgttgaaagtggtgattccaaagattaaagaggatgagcgtaacaatattcgtcacataaacgttgactagagtgttttattttggattgtttgagatggaatggaagtaagtgagtgaatttgtgaactttaaggtgtcctttggtgaatcaaggagaatgacatttcccacggtcctatgtgttcgggattttgacttttttcgttacatcaatgatctatgtacgtttgactactttcatatcataggttcggattttgtttccc

SEQ ID NO: 2309 - protein, 210 aa, Arabidopsis thaliana
MASSSALALRRLLSSSTVAVPRALRAVRPVAASSRLFNTNAARNYEDGVDRNHHSNRHVSRHGGDFFSHILDPFTPTRSLSQMLNFMDQVSEIPLVSATRGMGASGVRRGWNVKEKDDALHLRIDMPGLSREDVKLALEQNTLVIRGEGETEEGEDVSGDGRRFTSRIELPEKVYKTDEIKAEMKNGVLKVVIPKIKEDERNNIRHINVD

SEQ ID NO: 2310 - protein, 128 aa, Arabidopsis thaliana
MLNFMDQVSEIPLVSATRGMGASGVRRGWNVKEKDDALHLRIDMPGLSREDVKLALEQNTLVIRGEGETEEGEDVSGDGRRFTSRIELPEKVYKTDEIKAEMKNGVLKVVIPKIKEDERNNIRHINVD

SEQ ID NO: 2311 - protein, 124 aa, Arabidopsis thaliana
MDQVSEIPLVSATRGMGASGVRRGWNVKEKDDALHLRIDMPGLSREDVKLALEQNTLVIRGEGETEEGEDVSGDGRRFTSRIELPEKVYKTDEIKAEMKNGVLKVVIPKIKEDERNNIRHINVD

SEQ ID NO: 2312 - DNA, 707 bp, Arabidopsis thaliana
ttcactacaaaatttctcattcgcatcctccacaagaagaaaattcgatcggtcgattagtctttgtttgatttcgaaatggctcgtactaagcaaaccgcgaggaaatccacaggaggcaaagcaccaagaaagcaactcgcaaccaaggcggcaaggaaatctgctccggccaccggaggagtgaagaagccgcatagattccgtccaggaactgttgccttgagagagatcaggaagtatcagaagagcactgagcttctgatccgtaagcttcctttccagcgtctggttcgtgagatagctcaggatttcaagacggatctgaggtttcagagcagtgctgttgctgctttacaagaggctgctgaggcttaccttgttggtttgtttgaagacactaatctttgcgccattcacgctaagagggtcaccatcatgcctaaggatatccagctcgcgaggagaatcagaggagaaagagcttgaagactgttgttatggtttatatcttttgatttagttcgtcaatggaactctatttctggattttgatttgcgttttagtagtaatgggttcttgtaagtgttgagctttggctcgttttaattttcagttgttaggtactttggtttagttagccttgaagtgttcgatgaaataccccaacgaaactctctcctgtttaatagaacttattttcctt

SEQ ID NO: 2313 - protein, 136 aa, Arabidopsis thaliana
MARTKQTARKSTGGKAPRKQLATKAARKSAPATGGVKKPHRFRPGTVALREIRKYQKSTELLIRKLPFQRLVREIAQDFKTDLRFQSSAVAALQEAAEAYLVGLFEDTNLCAIHAKRVTIMPKDIQLARRIRGERA

SEQ ID NO: 2314 - DNA, 3623 bp, Arabidopsis thaliana
atgggtttgaatctgaatccaatattgagacaagaactggctaatcttgacaaagacacagagagtcgtaaatcagcaatgaaagctcttaaatcttatgtgaaggacttggattcaaaggctattcctggttttctagctcaagttttcgagactaaagaaaccaactctttgtccggtgaatacacgatttcgctttatgaaatccttgctcgtgttcatggacctaacattgtgcctcagattgatacaatcatgtccactattgtcaagactttggcttctagtgctggttctttccctcttcaacaagcgtgttcgaaagttattccggcgattgctcgatatgggatcgatccgactactacagaagacaagaaacgagttataatccactctttgtgtaagcctcttacggattctctattggcctctcaagagagccttacttcaggggctgctttgtgtttgaaggctcttgtggatagtgacaattggcggtttgcttcggatgagatggtgaacagggtttgtcaaaatgtggtagttgcgttggactcaaactccaaccaaacacatcttcaaatgggtttggttatgtcacttgccaagcataatcctttgattgttgaagcttatgcaaggttgctgatacacacggggttgcgaattctaggatttggagtatctgaaggaaactcgcagaaacgattatcagcagtccaaatgttgaacttccttatgaagtgcttggatccgagaagcatatactcggaagttgagttgataataaaagaaatggagaggtgtcaatctgaccaaatggcttatgttagaggagctgcttatgaagcaatgatgacttcaaaaagaatagcggcagagctcgagtcgaagatggagaaaggttgtcgttctgttactggttcgaatttcagtcgaagaaactgttcgtccattgttcctgattactccttatcacctgaatcacagactctaggctcttttagcgggtatgattctccggttgagtcctcgcctatttctcatacttcttgtaactctgaatttgatcggaggagtgtgaaccgcaaactttggagacgtgatgagaatggaggagtggttgatatctctttaaaggatggtcttttctcccgtgtaactaaaggaagcaccactgtctctgattcacctcttgtaccgtatgatacttgtgaaaatggagatgaatttgaagggtttctaatggaaagtttgagaaacaccactcctagtcctcagagacagcgttcacgtcgcatcaatgctgaagatttcaacatcttcagcactccacggaagctaatcagctctcttcaatatcctgatgatgttgatttagatcattcagacatccaaagtccaatactgagaggcgagagagagaaaaccataggatctcgcaagaatcctaaactcagaaagcaatttccaaccatggtggaaacaatgtcatcaactatcacagttagtgaagacacagctcaaacacagatgataaccggtaagaagaagaagaagaagatgagctatgccaaactcgttattgcgatatcttttgttgtggtggctctcttcgcaactgtgatattgatgaaccggttcaaggttgataattttttccggtttaatcaaaccggttcgagcaatttattagcttcgagaaaaggaacaatttattcactcgttaagggttttgcgcacatccgcctcatgatgacaaactccgattccgaccactgtactccggcgaaaacctcaatttctggggatggattagaaaaagagagcgactttaagaagcaactgaactctgagatagatccacaagcttcttcctcgcaaaacgatgcaataactatggaagatggagccgtctctgtaaacaatagggatctgcaagagataaaggaatcatccttctctaaaggaagtgagcaatatcgagttgatggagcccttgaagaaagtttgaattttgaggagaaggaacaagaatctgaagctcagagactattggaagcagagaagagaagattgctggctgaaatcgaacttgggtcaatctttaggaagagtgttgatgtggatacgttgcctaagatcgaagagacgatggataatgatgttgataagattgaattggttgatcatactgcgttggttgatgttgttcatcatcctaagagaccagggactgctcaaaatgagaaggatacacctagaaagcttaagaaaattggagataagagaaatgttattgaggggagtggagtagaaaacaatgggaagcagtttaggagattgtacactaggaaacaattggagtcaatgaggtttgcccacattgtgaatcagaagaacctgtggagtgagatgtattctaggattctacctgaggtggtgactgagtatgaaagtttagtttatgtgaagaattacaagagttcaaagtctaatcgtgttcgtgggcgaacggagagtggcaatgaagaaaatttggggactgaagaaggaacggaggaccctgaagactacactgacgataatgatgattacaatagcattttgagacctgcgtttgaagtagatggagaacctgattttagtactggaccaccagaagatgggcttgaatatttaagacgagtcaggtgggaggctaagggaattccgaatgtaagagtagccaagatagatgaaagcacgtacataaagaaagagcaaagtgtttatatgccactaattcctgaaatccccaaatgtccagagtacctgttacccatgaaggaatgggaggactcgttgcttttggactttgtacaccttcgccagactctaacacaaagtgccaacagctgtgaggatgagataatatcaagtcagtgtgtagaagatttgcttgtggagatgttcaataagcatctccacacagaggaggatgagtcttttggtgaggtggtaacagacatacaaggaatggactcggtgacgcgggtatcaaagctgaaaaagcgtatatgtttggttgagaaggagagcggtttacagagtagcgattgcaaatgggtagtagcgttgtgtgcatcattggagactcctttggatgccgatacttgtgcttgtctaaggggtcttctgaggaagtgtgctagtgttcgtgcagagacatcattagaggttggagatgaagaagttatcaccatggcaaatatgctcatcaccatcgccggcagatactttggccaaatgggacagtaataagtgaagaagagagtggacatgacatgcccttacttttctctcatatgtgcttttgaatcttacatgagctttaatgccattttttgtagtgtcccctttgttatgtcatctgtgatgttcggaatcatcgtatttgtgcgaagtaagctctttttttttgggatcttgttgaggttattgagatcttcacaacttccgtggatcggctagatagagtcttcttatcataccgagttctatcattgtcattgttgaaggaaattacaagaactacgttgctgtagtggtttcaatttgttacaattcagtttaagtgc

SEQ ID NO: 2315 - protein, 1100 aa, Arabidopsis thaliana
MGLNLNPILRQELANLDKDTESRKSAMKALKSYVKDLDSKAIPGFLAQVFETKETNSLSGEYTISLYEILARVHGPNIVPQIDTIMSTIVKTLASSAGSFPLQQACSKVIPAIARYGIDPTTTEDKKRVIIHSLCKPLTDSLLASQESLTSGAALCLKALVDSDNWRFASDEMVNRVCQNVVVALDSNSNQTHLQMGLVMSLAKHNPLIVEAYARLLIHTGLRILGFGVSEGNSQKRLSAVQMLNFLMKCLDPRSIYSEVELIIKEMERCQSDQMAYVRGAAYEAMMTSKRIAAELESKMEKGCRSVTGSNFSRRNCSSIVPDYSLSPESQTLGSFSGYDSPVESSPISHTSCNSEFDRRSVNRKLWRRDENGGVVDISLKDGLFSRVTKGSTTVSDSPLVPYDTCENGDEFEGFLMESLRNTTPSPQRQRSRRINAEDFNIFSTPRKLISSLQYPDDVDLDHSDIQSPILRGEREKTIGSRKNPKLRKQFPTMVETMSSTITVSEDTAQTQMITGKKKKKKMSYAKLVIAISFVVVALFATVILMNRFKVDNFFRFNQTGSSNLLASRKGTIYSLVKGFAHIRLMMTNSDSDHCTPAKTSISGDGLEKESDFKKQLNSEIDPQASSSQNDAITMEDGAVSVNNRDLQEIKESSFSKGSEQYRVDGALEESLNFEEKEQESEAQRLLEAEKRRLLAEIELGSIFRKSVDVDTLPKIEETMDNDVDKIELVDHTALVDVVHHPKRPGTAQNEKDTPRKLKKIGDKRNVIEGSGVENNGKQFRRLYTRKQLESMRFAHIVNQKNLWSEMYSRILPEVVTEYESLVYVKNYKSSKSNRVRGRTESGNEENLGTEEGTEDPEDYTDDNDDYNSILRPAFEVDGEPDFSTGPPEDGLEYLRRVRWEAKGIPNVRVAKIDESTYIKKEQSVYMPLIPEIPKCPEYLLPMKEWEDSLLLDFVHLRQTLTQSANSCEDEIISSQCVEDLLVEMFNKHLHTEEDESFGEVVTDIQGMDSVTRVSKLKKRICLVEKESGLQSSDCKWVVALCASLETPLDADTCACLRGLLRKCASVRAETSLEVGDEEVITMANMLITIAGRYFGQMGQ

SEQ ID NO: 2316 - protein, 1074 aa, Arabidopsis thaliana
MKALKSYVKDLDSKAIPGFLAQVFETKETNSLSGEYTISLYEILARVHGPNIVPQIDTIMSTIVKTLASSAGSFPLQQACSKVIPAIARYGIDPTTTEDKKRVIIHSLCKPLTDSLLASQESLTSGAALCLKALVDSDNWRFASDEMVNRVCQNVVVALDSNSNQTHLQMGLVMSLAKHNPLIVEAYARLLIHTGLRILGFGVSEGNSQKRLSAVQMLNFLMKCLDPRSIYSEVELIIKEMERCQSDQMAYVRGAAYEAMMTSKRIAAELESKMEKGCRSVTGSNFSRRNCSSIVPDYSLSPESQTLGSFSGYDSPVESSPISHTSCNSEFDRRSVNRKLWRRDENGGVVDISLKDGLFSRVTKGSTTVSDSPLVPYDTCENGDEFEGFLMESLRNTTPSPQRQRSRRINAEDFNIFSTPRKLISSLQYPDDVDLDHSDIQSPILRGEREKTIGSRKNPKLRKQFPTMVETMSSTITVSEDTAQTQMITGKKKKKKMSYAKLVIAISFVVVALFATVILMNRFKVDNFFRFNQTGSSNLLASRKGTIYSLVKGFAHIRLMMTNSDSDHCTPAKTSISGDGLEKESDFKKQLNSEIDPQASSSQNDAITMEDGAVSVNNRDLQEIKESSFSKGSEQYRVDGALEESLNFEEKEQESEAQRLLEAEKRRLLAEIELGSIFRKSVDVDTLPKIEETMDNDVDKIELVDHTALVDVVHHPKRPGTAQNEKDTPRKLKKIGDKRNVIEGSGVENNGKQFRRLYTRKQLESMRFAHIVNQKNLWSEMYSRILPEVVTEYESLVYVKNYKSSKSNRVRGRTESGNEENLGTEEGTEDPEDYTDDNDDYNSILRPAFEVDGEPDFSTGPPEDGLEYLRRVRWEAKGIPNVRVAKIDESTYIKKEQSVYMPLIPEIPKCPEYLLPMKEWEDSLLLDFVHLRQTLTQSANSCEDEIISSQCVEDLLVEMFNKHLHTEEDESFGEVVTDIQGMDSVTRVSKLKKRICLVEKESGLQSSDCKWVVALCASLETPLDADTCACLRGLLRKCASVRAETSLEVGDEEVITMANMLITIAGRYFGQMGQ

SEQ ID NO: 2317 - protein, 1015 aa, Arabidopsis thaliana
MSTIVKTLASSAGSFPLQQACSKVIPAIARYGIDPTTTEDKKRVIIHSLCKPLTDSLLASQESLTSGAALCLKALVDSDNWRFASDEMVNRVCQNVVVALDSNSNQTHLQMGLVMSLAKHNPLIVEAYARLLIHTGLRILGFGVSEGNSQKRLSAVQMLNFLMKCLDPRSIYSEVELIIKEMERCQSDQMAYVRGAAYEAMMTSKRIAAELESKMEKGCRSVTGSNFSRRNCSSIVPDYSLSPESQTLGSFSGYDSPVESSPISHTSCNSEFDRRSVNRKLWRRDENGGVVDISLKDGLFSRVTKGSTTVSDSPLVPYDTCENGDEFEGFLMESLRNTTPSPQRQRSRRINAEDFNIFSTPRKLISSLQYPDDVDLDHSDIQSPILRGEREKTIGSRKNPKLRKQFPTMVETMSSTITVSEDTAQTQMITGKKKKKKMSYAKLVIAISFVVVALFATVILMNRFKVDNFFRFNQTGSSNLLASRKGTIYSLVKGFAHIRLMMTNSDSDHCTPAKTSISGDGLEKESDFKKQLNSEIDPQASSSQNDAITMEDGAVSVNNRDLQEIKESSFSKGSEQYRVDGALEESLNFEEKEQESEAQRLLEAEKRRLLAEIELGSIFRKSVDVDTLPKIEETMDNDVDKIELVDHTALVDVVHHPKRPGTAQNEKDTPRKLKKIGDKRNVIEGSGVENNGKQFRRLYTRKQLESMRFAHIVNQKNLWSEMYSRILPEVVTEYESLVYVKNYKSSKSNRVRGRTESGNEENLGTEEGTEDPEDYTDDNDDYNSILRPAFEVDGEPDFSTGPPEDGLEYLRRVRWEAKGIPNVRVAKIDESTYIKKEQSVYMPLIPEIPKCPEYLLPMKEWEDSLLLDFVHLRQTLTQSANSCEDEIISSQCVEDLLVEMFNKHLHTEEDESFGEVVTDIQGMDSVTRVSKLKKRICLVEKESGLQSSDCKWVVALCASLETPLDADTCACLRGLLRKCASVRAETSLEVGDEEVITMANMLITIAGRYFGQMGQ

SEQ ID NO: 2318 - DNA, 1174 bp, Arabidopsis thaliana
tttctaatttatttctctctcttctcttctcccaaaaagcccttaataagcttttgctttgatatcagatctctcttacggcttttgagaagcgtgctcctttagggctttccttttataccccaaaacgaggcctttccttcttctctcatctcctaattctaccctcttcctcttcctcttccttctctctctcttctcattctcctcatacgctataaggagaaaatctcagagagagagtgatggcgaacaatgagggagagatgcaatgtgggtccatgttgtttaagcaagaggagctacaagagatgagtggggtcaatgttggtggcgattacgttgaggtcatgtgtggttgtaccagtcaccgatacggcgatgctgttgctagacttagggttttccccaccggtgaccttgaaatcacctgcgaatgcacacctggttgcgatgaagacaagttgacaccagctgcattcgagaagcattctggaagagaaacggcaaggaagtggaaaaacaatgtgtgggttatcattgggggcgaaaaggttccattgtcaaagacagtattgctcaagtactacaatgaatcatcaaagaagtgcagtagatcaaacagatcacaaggtgccaaagtttgccatagagatgagtttgttgggtgtaacgattgtggtaaagagaggaggttcaggctgaggagcagagacgaatgccgcttgcaccacaatgcaatgggtgatccaaactggaaatgctcagatttcccatacgacaagataacatgtgaggaggaagaagagagagggagcaggaaggtgtacagagggtgcacacgttcacctagttgcaaaggctgcacttcctgcgtctgttttggctgcgagttatgccgtttctctgagtgtacttgccagacttgtgtcgacttcaccagcaatgtcaaagcttgaagaaggcagtccattaagaaaagaaaaaaaaatgtctgtctcagactttgttcgttgcatttaataacttattctaaaactccaaacagttaattatcttatctatgggttgtgaatggagcaattgaaaaaaaagtagaaaaagttgatttccaagaagaacatgcagacgagcatgcctgagtttagtgcatgtctagatttttggctaaaat

SEQ ID NO: 2319 - protein, 237 aa, Arabidopsis thaliana
MANNEGEMQCGSMLFKQEELQEMSGVNVGGDYVEVMCGCTSHRYGDAVARLRVFPTGDLEITCECTPGCDEDKLTPAAFEKHSGRETARKWKNNVWVIIGGEKVPLSKTVLLKYYNESSKKCSRSNRSQGAKVCHRDEFVGCNDCGKERRFRLRSRDECRLHHNAMGDPNWKCSDFPYDKITCEEEEERGSRKVYRGCTRSPSCKGCTSCVCFGCELCRFSECTCQTCVDFTSNVKA

SEQ ID NO: 2320 - protein, 230 aa, Arabidopsis thaliana
MQCGSMLFKQEELQEMSGVNVGGDYVEVMCGCTSHRYGDAVARLRVFPTGDLEITCECTPGCDEDKLTPAAFEKHSGRETARKWKNNVWVIIGGEKVPLSKTVLLKYYNESSKKCSRSNRSQGAKVCHRDEFVGCNDCGKERRFRLRSRDECRLHHNAMGDPNWKCSDFPYDKITCEEEEERGSRKVYRGCTRSPSCKGCTSCVCFGCELCRFSECTCQTCVDFTSNVKA

SEQ ID NO: 2321 - protein, 225 aa, Arabidopsis thaliana
MLFKQEELQEMSGVNVGGDYVEVMCGCTSHRYGDAVARLRVFPTGDLEITCECTPGCDEDKLTPAAFEKHSGRETARKWKNNVWVIIGGEKVPLSKTVLLKYYNESSKKCSRSNRSQGAKVCHRDEFVGCNDCGKERRFRLRSRDECRLHHNAMGDPNWKCSDFPYDKITCEEEEERGSRKVYRGCTRSPSCKGCTSCVCFGCELCRFSECTCQTCVDFTSNVKA

SEQ ID NO: 2322 - DNA, 1162 bp, Arabidopsis thaliana
gagagagaaagagagagatatgatattattaagtagtagtataagcctctcaagaccagtttcttctcaaagcttctctccacctgctgccacttcaacaaggagatctcattcctctgtcacagtcaagtgctgctgttcttccagaaggttgttgaagaatcctgagttaaaatgttccttggagaatctctttgaaatccaggctttgaggaagtgttttgtttcagggtttgcagctattttgcttctctctcaggcaggccagggtatagcgttggatctctcatctggttatcagaacatttgccaactagggagtgctgctgctgtgggagaaaacaagctgactcttccatctgatggtgactcggaatcaatgatgatgatgatgatgagaggcatgactgctaagaactttgaccctgttaggtactctggaagatggtttgaagtagcttctcttaagcgtggatttgcaggtcaaggccaagaagactgtcattgcactcagggagtatacacgtttgatatgaaggaatcagccattagagtagatacattttgtgttcatggcagccctgatggatatataacaggaatcagagggaaagttcaatgcgtgggagcggaagacctcgagaaaagcgagactgacttagaaaagcaagagatgattaaagagaagtgtttcctacgatttcccaccattccttttatccccaagttgccttatgatgtcatagccacagactacgacaactacgcacttgtttctggagccaaagacaagggctttgttcaggtatactcaaggacgccaaatccaggacctgagttcatcgcaaagtacaagaactacttggcacaatttggctatgacccggaaaaaataaaggatacaccacaggactgtgaagtgactgatgctgagctagcagccatgatgtccatgccaggtatggagcaaacactgaccaaccagtttccagatcttggattaagaaagtcagtccagtttgatcccttcacaagtgtgtttgaaaccttgaagaaacttgtaccgctctatttcaaatagagcaagcttctttgctcaaattcttatgtagactataatcactgtccatatatacatatcttccagaatcaaaacactctt

SEQ ID NO: 2323 - protein, 359 aa, Arabidopsis thaliana
REKERDMILLSSSISLSRPVSSQSFSPPAATSTRRSHSSVTVKCCCSSRRLLKNPELKCSLENLFEIQALRKCFVSGFAAILLLSQAGQGIALDLSSGYQNICQLGSAAAVGENKLTLPSDGDSESMMMMMMRGMTAKNFDPVRYSGRWFEVASLKRGFAGQGQEDCHCTQGVYTFDMKESAIRVDTFCVHGSPDGYITGIRGKVQCVGAEDLEKSETDLEKQEMIKEKCFLRFPTIPFIPKLPYDVIATDYDNYALVSGAKDKGFVQVYSRTPNPGPEFIAKYKNYLAQFGYDPEKIKDTPQDCEVTDAELAAMMSMPGMEQTLTNQFPDLGLRKSVQFDPFTSVFETLKKLVPLYFK

SEQ ID NO: 2324 - protein, 353 aa, Arabidopsis thaliana
MILLSSSISLSRPVSSQSFSPPAATSTRRSHSSVTVKCCCSSRRLLKNPELKCSLENLFEIQALRKCFVSGFAAILLLSQAGQGIALDLSSGYQNICQLGSAAAVGENKLTLPSDGDSESMMMMMMRGMTAKNFDPVRYSGRWFEVASLKRGFAGQGQEDCHCTQGVYTFDMKESAIRVDTFCVHGSPDGYITGIRGKVQCVGAEDLEKSETDLEKQEMIKEKCFLRFPTIPFIPKLPYDVIATDYDNYALVSGAKDKGFVQVYSRTPNPGPEFIAKYKNYLAQFGYDPEKIKDTPQDCEVTDAELAAMMSMPGMEQTLTNQFPDLGLRKSVQFDPFTSVFETLKKLVPLYFK

SEQ ID NO: 2325 - protein, 233 aa, Arabidopsis thaliana
MMMMMMRGMTAKNFDPVRYSGRWFEVASLKRGFAGQGQEDCHCTQGVYTFDMKESAIRVDTFCVHGSPDGYITGIRGKVQCVGAEDLEKSETDLEKQEMIKEKCFLRFPTIPFIPKLPYDVIATDYDNYALVSGAKDKGFVQVYSRTPNPGPEFIAKYKNYLAQFGYDPEKIKDTPQDCEVTDAELAAMMSMPGMEQTLTNQFPDLGLRKSVQFDPFTSVFETLKKLVPLYFK

SEQ ID NO: 2326 - DNA, 1747 bp, Arabidopsis thaliana
tgaatcgaactcagatttcgaagaagcagatctcacaatgtctggaaaacagcaaaatcatcgttctacttcctccagacccagatccaaaaccctaatcctcatcggctctctcttcaccgtctctctactcgtcatcctctacacctcttcttcctcctcccgagcctccatctccaatcccaacccgtcggaccgaccagagacgtccttcgttacctcgcttgagcatttcttaatatataaagctccgaagctctcgttaccggttagagacgacacggtgcgtggcgagagtgatgatgatgtgaggaagctcgatgagatggtgttcgagagagagaatcgttggttgaacgaagatccgggatatcctgttgaatttccgattaaggtttacgtgtatgagatgccgaagaagtttactttcgatcttctctggttatttcacaatacttacaaagagacttcgaatgctacctctaatggtagccctgtgcatcgtctaatcgaacagcattctattgactattggctttgggctgatctgatatctcctgaatctgaaaggcgtttgaaaagtgtcgtgagagttcagaagcagcaggacgccgactttttctatgttccgtttttcactacaatcagctttttcttgttggagaagcagcaatgcaaagcactctatagggaagctttgaagtgggtcactgatcagcctgcttggaagaggtccgagggaagggatcacatatttcctattcatcatccttggtccttcaagtctgtccgcaaatttgtgaaaaacgcaatctggcttttaccagatatggactccactggcaattggtataagcctgggcaagtttcattggagaaagacctaattcttccttatgttcccaatgttgatatctgtgataccaaatgcttgtcagaaagtgcaccaatgagaaccacattactttttttccgagggcggcttaagcgaaatgcagggggtaaaatacgtgccaaacttggtgcagaattaagtggtatcaaggatataataatttctgaggggactgccggagagggaggaaaattggcagcgcaacgtggcatgcgtagatctttattctgtttgtgtcctgctggtgacacaccatcttcagcgaggttgtttgatgccattgtcagtggctgtatacctgttatagtcagtgacgagttggaatttccttttgaaggaatacttgattacaagaaggttgctgtgcttgtttcttccagtgatgcaatacagccagggtggcttgtaaaccatctgagaagtcttacgcccttccaagtcaaggggttgcagaataatcttgctcaatactctcgccatttcctatattcgagccctgctcagccattaggtccagaggacttgacatggagaatgatagccggaaagctggtgaatatcaagcttcacacgaggaggtcacagcgggtcgtgaaaggatctaggagtatttgcagatgcgattgctggagatccaactctacagcctccaattctttgagttctctcttgtcttaagaccgatcactctgacttcacattccagtcttgaataccctagatatatactgtggaatgtgtatcctattcaattttaacattgtttgctattttatataatgtaattcctgttcatcttcgcaacttggctacttttagctacgtggaaatattatgaaactaacattttat

SEQ ID NO: 2327 - protein, 523 aa, Arabidopsis thaliana
ESNSDFEEADLTMSGKQQNHRSTSSRPRSKTLILIGSLFTVSLLVILYTSSSSSRASISNPNPSDRPETSFVTSLEHFLIYKAPKLSLPVRDDTVRGESDDDVRKLDEMVFERENRWLNEDPGYPVEFPIKVYVYEMPKKFTFDLLWLFHNTYKETSNATSNGSPVHRLIEQHSIDYWLWADLISPESERRLKSVVRVQKQQDADFFYVPFFTTISFFLLEKQQCKALYREALKWVTDQPAWKRSEGRDHIFPIHHPWSFKSVRKFVKNAIWLLPDMDSTGNWYKPGQVSLEKDLILPYVPNVDICDTKCLSESAPMRTTLLFFRGRLKRNAGGKIRAKLGAELSGIKDIIISEGTAGEGGKLAAQRGMRRSLFCLCPAGDTPSSARLFDAIVSGCIPVIVSDELEFPFEGILDYKKVAVLVSSSDAIQPGWLVNHLRSLTPFQVKGLQNNLAQYSRHFLYSSPAQPLGPEDLTWRMIAGKLVNIKLHTRRSQRVVKGSRSICRCDCWRSNSTASNSLSSLLS

SEQ ID NO: 2328 - protein, 511 aa, Arabidopsis thaliana
MSGKQQNHRSTSSRPRSKTLILIGSLFTVSLLVILYTSSSSSRASISNPNPSDRPETSFVTSLEHFLIYKAPKLSLPVRDDTVRGESDDDVRKLDEMVFERENRWLNEDPGYPVEFPIKVYVYEMPKKFTFDLLWLFHNTYKETSNATSNGSPVHRLIEQHSIDYWLWADLISPESERRLKSVVRVQKQQDADFFYVPFFTTISFFLLEKQQCKALYREALKWVTDQPAWKRSEGRDHIFPIHHPWSFKSVRKFVKNAIWLLPDMDSTGNWYKPGQVSLEKDLILPYVPNVDICDTKCLSESAPMRTTLLFFRGRLKRNAGGKIRAKLGAELSGIKDIIISEGTAGEGGKLAAQRGMRRSLFCLCPAGDTPSSARLFDAIVSGCIPVIVSDELEFPFEGILDYKKVAVLVSSSDAIQPGWLVNHLRSLTPFQVKGLQNNLAQYSRHFLYSSPAQPLGPEDLTWRMIAGKLVNIKLHTRRSQRVVKGSRSICRCDCWRSNSTASNSLSSLLS

SEQ ID NO: 2329 - protein, 415 aa, Arabidopsis thaliana
MVFERENRWLNEDPGYPVEFPIKVYVYEMPKKFTFDLLWLFHNTYKETSNATSNGSPVHRLIEQHSIDYWLWADLISPESERRLKSVVRVQKQQDADFFYVPFFTTISFFLLEKQQCKALYREALKWVTDQPAWKRSEGRDHIFPIHHPWSFKSVRKFVKNAIWLLPDMDSTGNWYKPGQVSLEKDLILPYVPNVDICDTKCLSESAPMRTTLLFFRGRLKRNAGGKIRAKLGAELSGIKDIIISEGTAGEGGKLAAQRGMRRSLFCLCPAGDTPSSARLFDAIVSGCIPVIVSDELEFPFEGILDYKKVAVLVSSSDAIQPGWLVNHLRSLTPFQVKGLQNNLAQYSRHFLYSSPAQPLGPEDLTWRMIAGKLVNIKLHTRRSQRVVKGSRSICRCDCWRSNSTASNSLSSLLS

SEQ ID NO: 2330 - DNA, 1702 bp, Arabidopsis thaliana
gccggctgattctcctccttatctatggccgttaccggcggagttttcgttcggaaacgaaacgctctcggtggatcccaccgtgactctaatcgtagctggaaatggcggtggatctctgattattagagctgcgtttgataggtatatgggtataatctttaaacacgcttctggtagaggttctctattgtcgaggattagatttctgaaaatggttgagtatgatatcacttctttgaagatcgttgttcattctgattctgaggagcttcaattgggtgtggatgagagttatacattgatggtgtcgaagaagaacgagcaatcgattgttggagcagccacgatcgaggctaatacagtttatggtgcacttagaggattggagacatttagccagttgtgtgcctttgattatataaccaaatctgtgcaaatatataaagcaccatggtatattcaagataaacctagatttggataccgcggtctgctgatagatacatcaagacattatttaccaattgatgttattaagcaaataatcgaatccatgtcctttgccaaacttaatgtcctgcattggcacattgtagacgagcaatcatttcctcttgaaactcctacatatcctaatttgtggaaaggagcttattcgagatgggaacgttatacagttgaggatgcctctgagattgtcaggtttgccaaaatgagaggtattaatgtcatggctgaagtagatgtccctggccatgcggaatcgtggggaactggataccctgatctttggccgtctctgtcttgccgagagccccttgatgttactaaaaactttacattcgatgtgatttctggcattttagcagatatgagaaagatattcccatttgagcttttccacttgggtggtgatgaagttaatacagattgctggaaaaacacaactcatgttaaagaatggcttcagggtcgcaacttcacgactaaggacgcatataaatactttgtactccgagcgcaacagatagctatatcgaaaaattggacacctgtcaactgggaagaaaccttcagttcctttggaaaagatcttgatccgcggactgtgattcaaaactggctagtgtctgatatatgtcaaaaagcagtagcaaaaggattcaggtgcattttcagtaaccaaggatattggtacctcgaccatttagatgttccgtgggaagaggtttataacaccgagcctctaaatggaatcgaggatccttctctccaaaagcttgtcatcggaggagaagtttgcatgtggggtgaaacagctgatacatccgttgtccttcagaccatttggcctcgtgctgcagcagctgcagaacggatgtggagcaccagagaggccgtgtcaaaggggaacataacgttaaccgcattgccacgtctacactacttcagatgtctactgaataaccgtggcgttccagcggctccagtggataacttttacgcacgaagaccccccttgggacctggctcttgctatgctcagtgatccaaaacgtttcttctcattgtactatatgtaatgtctcgtctgaaatctggttgtcacgttgctttttctgttctaaattgtgtgcttctcaatttactcaaatcatgacaacatctgaaattacgatctaaaacacacgacgctctt

SEQ ID NO: 2331 - protein, 516 aa, Arabidopsis thaliana
PADSPPYLWPLPAEFSFGNETLSVDPTVTLIVAGNGGGSLIIRAAFDRYMGIIFKHASGRGSLLSRIRFLKMVEYDITSLKIVVHSDSEELQLGVDESYTLMVSKKNEQSIVGAATIEANTVYGALRGLETFSQLCAFDYITKSVQIYKAPWYIQDKPRFGYRGLLIDTSRHYLPIDVIKQIIESMSFAKLNVLHWHIVDEQSFPLETPTYPNLWKGAYSRWERYTVEDASEIVRFAKMRGINVMAEVDVPGHAESWGTGYPDLWPSLSCREPLDVTKNFTFDVISGILADMRKIFPFELFHLGGDEVNTDCWKNTTHVKEWLQGRNFTTKDAYKYFVLRAQQIAISKNWTPVNWEETFSSFGKDLDPRTVIQNWLVSDICQKAVAKGFRCIFSNQGYWYLDHLDVPWEEVYNTEPLNGIEDPSLQKLVIGGEVCMWGETADTSVVLQTIWPRAAAAAERMWSTREAVSKGNITLTALPRLHYFRCLLNNRGVPAAPVDNFYARRPPLGPGSCYAQ

SEQ ID NO: 2332 - protein, 467 aa, Arabidopsis thaliana
MGIIFKHASGRGSLLSRIRFLKMVEYDITSLKIVVHSDSEELQLGVDESYTLMVSKKNEQSIVGAATIEANTVYGALRGLETFSQLCAFDYITKSVQIYKAPWYIQDKPRFGYRGLLIDTSRHYLPIDVIKQIIESMSFAKLNVLHWHIVDEQSFPLETPTYPNLWKGAYSRWERYTVEDASEIVRFAKMRGINVMAEVDVPGHAESWGTGYPDLWPSLSCREPLDVTKNFTFDVISGILADMRKIFPFELFHLGGDEVNTDCWKNTTHVKEWLQGRNFTTKDAYKYFVLRAQQIAISKNWTPVNWEETFSSFGKDLDPRTVIQNWLVSDICQKAVAKGFRCIFSNQGYWYLDHLDVPWEEVYNTEPLNGIEDPSLQKLVIGGEVCMWGETADTSVVLQTIWPRAAAAAERMWSTREAVSKGNITLTALPRLHYFRCLLNNRGVPAAPVDNFYARRPPLGPGSCYAQ

SEQ ID NO: 2333 - protein, 445 aa, Arabidopsis thaliana
MVEYDITSLKIVVHSDSEELQLGVDESYTLMVSKKNEQSIVGAATIEANTVYGALRGLETFSQLCAFDYITKSVQIYKAPWYIQDKPRFGYRGLLIDTSRHYLPIDVIKQIIESMSFAKLNVLHWHIVDEQSFPLETPTYPNLWKGAYSRWERYTVEDASEIVRFAKMRGINVMAEVDVPGHAESWGTGYPDLWPSLSCREPLDVTKNFTFDVISGILADMRKIFPFELFHLGGDEVNTDCWKNTTHVKEWLQGRNFTTKDAYKYFVLRAQQIAISKNWTPVNWEETFSSFGKDLDPRTVIQNWLVSDICQKAVAKGFRCIFSNQGYWYLDHLDVPWEEVYNTEPLNGIEDPSLQKLVIGGEVCMWGETADTSVVLQTIWPRAAAAAERMWSTREAVSKGNITLTALPRLHYFRCLLNNRGVPAAPVDNFYARRPPLGPGSCYAQ

SEQ ID NO: 2334 - DNA, 1303 bp, Arabidopsis thaliana
ctcgtacttcctcgaagtgtaccggagaatctaaacccaatgtcgaaatccggcgataatcaaccagttgatagatacctccgccgtcaaatcctcggagaaggaacatacggtgtcgtttacaaagccaccgacacaaagactgggaaaactgtagcagtgaagaagataagattaggaaaccaaaaggaaggagtaaatttcacagctttaagagaaatcaagctactaaaagagctgaatcatccacatatcgttgaactcattgatgctttccctcacgatggaagtttgcatctagtttttgagtatatgcaaacagatttagaagcagtgattcgtgatcgtaatatctttttatctcctggtgatattaagtcttatatgttgatgactttgaagggtttagcttattgtcataagaaatgggttcttcacagggatatgaagccgaataatttgttgattggagagaatggtttgttgaagttggctgattttggtttggcgaggttgtttgggagtccgaatcggaggtttactcatcaggtatttgctacatggtacagagcgcctgagttactgtttgggagtcgacagtatggagcaggagttgatgtttgggctgcaggctgtatttttgctgagttactacttcgtagaccatttcttccgggttctactgagattgatcaacttggaaagatctttcaagcgtttggtactccagtaccttcccaatggtctgacatgatctatctcccagactacatggaattctcctatacacccgctccaccattacgtaccattttccctatggcaagtgatgacgctttggatcttctagcaaaaatgttcatctacgacccacgtcaaaggatcacaatacaacaagctttagaccacaggtatttctcgtcttctccatcaccaactgagccagggaagcttcagattccagcttccaaaggagacgcactcgaaccaaaggcctccgagcaaaaccaacatggaaatagcccagcggtactgtctcctcctggtaaaatgaggagagtgatgggtcctgaaggattcacttgagaagatgatgtttcatttcttttggaaaatatcaatggatatgcccagaagatttcaaaattagatttttaccattgataattcaatattagttaactatcaaagagaaaaaatttaaagccataaatgtccttcttagttcttactttgtttaatttaccaaatatgtcatgtatcaactattgttataatttcactatatatcaactatcttacc

SEQ ID NO: 2335 - protein, 361 aa, Arabidopsis thaliana
LVLPRSVPENLNPMSKSGDNQPVDRYLRRQILGEGTYGVVYKATDTKTGKTVAVKKIRLGNQKEGVNFTALREIKLLKELNHPHIVELIDAFPHDGSLHLVFEYMQTDLEAVIRDRNIFLSPGDIKSYMLMTLKGLAYCHKKWVLHRDMKPNNLLIGENGLLKLADFGLARLFGSPNRRFTHQVFATWYRAPELLFGSRQYGAGVDVWAAGCIFAELLLRRPFLPGSTEIDQLGKIFQAFGTPVPSQWSDMIYLPDYMEFSYTPAPPLRTIFPMASDDALDLLAKMFIYDPRQRITIQQALDHRYFSSSPSPTEPGKLQIPASKGDALEPKASEQNQHGNSPAVLSPPGKMRRVMGPEGFT

SEQ ID NO: 2336 - protein, 348 aa, Arabidopsis thaliana
MSKSGDNQPVDRYLRRQILGEGTYGVVYKATDTKTGKTVAVKKIRLGNQKEGVNFTALREIKLLKELNHPHIVELIDAFPHDGSLHLVFEYMQTDLEAVIRDRNIFLSPGDIKSYMLMTLKGLAYCHKKWVLHRDMKPNNLLIGENGLLKLADFGLARLFGSPNRRFTHQVFATWYRAPELLFGSRQYGAGVDVWAAGCIFAELLLRRPFLPGSTEIDQLGKIFQAFGTPVPSQWSDMIYLPDYMEFSYTPAPPLRTIFPMASDDALDLLAKMFIYDPRQRITIQQALDHRYFSSSPSPTEPGKLQIPASKGDALEPKASEQNQHGNSPAVLSPPGKMRRVMGPEGFT

SEQ ID NO: 2337 - protein, 257 aa, Arabidopsis thaliana
MQTDLEAVIRDRNIFLSPGDIKSYMLMTLKGLAYCHKKWVLHRDMKPNNLLIGENGLLKLADFGLARLFGSPNRRFTHQVFATWYRAPELLFGSRQYGAGVDVWAAGCIFAELLLRRPFLPGSTEIDQLGKIFQAFGTPVPSQWSDMIYLPDYMEFSYTPAPPLRTIFPMASDDALDLLAKMFIYDPRQRITIQQALDHRYFSSSPSPTEPGKLQIPASKGDALEPKASEQNQHGNSPAVLSPPGKMRRVMGPEGFT

SEQ ID NO: 2338 - DNA, 1604 bp, Arabidopsis thaliana
atttttgtctcatttttttactcaaacgaacattttcgtggctccagagctacactcaaaagccattcagcggaaggggttaggatttttggcggcgagatctctctgtttctggtagcttagcaatggccttatcttctctcctcagatctgccgccacttccgccgcagctcctcgtgtcgagctttatccatcgtcatcgtacaatcattctcaggtcacgtcaagtcttggattcagtcatagcctgacctcgtctagattttctggtgctgcagtttcaaccggaaaatacagtgcgaagagggttcaacccatcaaggccacagctacggaagcacctcctgctgttcataggtcaaggagcagtggaaagacaaaggttgggatcaacggttttggtcgaattggaagattggtcctccgcatcgcaacctttagggatgatatcgaggttgtagcagtcaacgatccattcatagatgccaagtacatggcttacatgttcaagtatgattctactcatggaaattacaaaggaactatcaatgtaattgatgattcaactttggagatcaatggaaaacaagtcaaagttgtcagcaagagagacccagctgaaatcccgtgggctgatcttggagctgagtatgttgttgagtcttcaggggtattcaccaccgttggacaagcttcatcacatttgaagggtggtgctaagaaggtcatcatttctgcaccttcagcggacgcgcccatgtttgttgttggagtaaatgaaaagacatacctgcctaacatggatatagtctccaatgcaagttgtaccaccaattgtcttgcacctcttgccaaggtggtgcatgaggaatttggtattcttgaaggcttgatgacaacagtccacgcgaccacagctactcagaaaactgtggacggcccatcaatgaaggactggagaggaggccgaggcgcaagtcaaaacatcattcctagctcaacaggcgctgcaaaggctgttggtaaggtccttccggaactcaatggaaaactaacaggaatggccttccgtgtcccaacaccaaatgtctctgttgtggatttaacttgtcgacttgagaaggatgcatcgtatgaagacgtcaaggcagccataaagtttgcatcagaaggaccacttaggggcattcttggatatacagaagaagatgtcgtctctaatgattttcttggagattcaaggtcaagtatctttgatgctaatgctgggattggattaagcaagtccttcatgaaacttgtctcctggtatgacaacgaatggggttacagcaaccgagtccttgacctgatagaacacatggcgttagttgcagccagccgctaaaaccatatcccgccaacgttcgttaggtagtttttgttacattgggggttcgattactgaaccttccggttttggctccaagttttatgtaaaaccatacgatatctaataatatggggaagattttttttgttgtacgaagaaatattgttagcagctagtcgaaaccttttctatatataaaaattggtttccaaagattggaattttctggct

SEQ ID NO: 2339 - protein, 420 aa, Arabidopsis thaliana
MALSSLLRSAATSAAAPRVELYPSSSYNHSQVTSSLGFSHSLTSSRFSGAAVSTGKYSAKRVQPIKATATEAPPAVHRSRSSGKTKVGINGFGRIGRLVLRIATFRDDIEVVAVNDPFIDAKYMAYMFKYDSTHGNYKGTINVIDDSTLEINGKQVKVVSKRDPAEIPWADLGAEYVVESSGVFTTVGQASSHLKGGAKKVIISAPSADAPMFVVGVNEKTYLPNMDIVSNASCTTNCLAPLAKVVHEEFGILEGLMTTVHATTATQKTVDGPSMKDWRGGRGASQNIIPSSTGAAKAVGKVLPELNGKLTGMAFRVPTPNVSVVDLTCRLEKDASYEDVKAAIKFASEGPLRGILGYTEEDVVSNDFLGDSRSSIFDANAGIGLSKSFMKLVSWYDNEWGYSNRVLDLIEHMALVAASR

SEQ ID NO: 2340 - protein, 297 aa, Arabidopsis thaliana
MAYMFKYDSTHGNYKGTINVIDDSTLEINGKQVKVVSKRDPAEIPWADLGAEYVVESSGVFTTVGQASSHLKGGAKKVIISAPSADAPMFVVGVNEKTYLPNMDIVSNASCTTNCLAPLAKVVHEEFGILEGLMTTVHATTATQKTVDGPSMKDWRGGRGASQNIIPSSTGAAKAVGKVLPELNGKLTGMAFRVPTPNVSVVDLTCRLEKDASYEDVKAAIKFASEGPLRGILGYTEEDVVSNDFLGDSRSSIFDANAGIGLSKSFMKLVSWYDNEWGYSNRVLDLIEHMALVAASR

SEQ ID NO: 2341 - protein, 294 aa, Arabidopsis thaliana
MFKYDSTHGNYKGTINVIDDSTLEINGKQVKVVSKRDPAEIPWADLGAEYVVESSGVFTTVGQASSHLKGGAKKVIISAPSADAPMFVVGVNEKTYLPNMDIVSNASCTTNCLAPLAKVVHEEFGILEGLMTTVHATTATQKTVDGPSMKDWRGGRGASQNIIPSSTGAAKAVGKVLPELNGKLTGMAFRVPTPNVSVVDLTCRLEKDASYEDVKAAIKFASEGPLRGILGYTEEDVVSNDFLGDSRSSIFDANAGIGLSKSFMKLVSWYDNEWGYSNRVLDLIEHMALVAASR

SEQ ID NO: 2342 - DNA, 2456 bp, Arabidopsis thaliana
gagggagatcaagaagaaagttaccaaagccacttgctttttaagctttcttaccattaggaccattaagagctttccataaaagcatcacaacggctgcaacagttaacaaatacaaggacgagtacagaaactggttcaggagtcatcatgcctcagaactgcatagcaccaaggcctgaagaagatggtggagtcatggttcaaggtttgccagatatgtcagacacgcagagcaagtctgtactagccttccctacgattacttcacaacctggtctccagatgtctatgtatcccataactctcaagtttgaggaggttgtgtacaaggttaagatagagcagacaagtcagtgtatgggatcatggaaaagcaaagagaagacgattttgaatgggataacgggaatggtttgtcccggagagtttctagccatgttaggtccatcaggcagtggcaaaaccactcttctatcagctctcgggggccgtctctccaaaactttctcaggtaaagtcatgtacaacggtcagcctttctctggctgcatcaagcgcagaacaggatttgttgctcaggatgatgtcctgtaccctcacctcacggtttgggagactctcttctttaccgcacttctacggctaccaagcagcttgacgagagacgagaaagcagagcatgtggacagagttattgctgaactcggattgaatcggtgtacaaacagcatgataggaggaccactcttcagaggaatatcaggaggtgagaaaaaaagggttagcattggtcaagaaatgctgatcaatcctagcttgctccttcttgatgaacccacttcaggtcttgattcaaccactgctcatcgcattgtgaccacaatcaaacggttggcttctggaggaagaacagtcgtcacaaccattcatcagccatcaagccgcatctaccatatgtttgacaaggtggttttgctatctgaaggaagtcccatctactatggcgctgcctcttctgctgtggaatatttcagttctctaggattctccacttccttgacagttaacccagctgacctcttacttgacctcgccaacggaatcccacctgatactcagaaggagacctcggaacaagaacagaagacagtaaaagaaaccctggtttcagcttatgagaagaacatttctactaaactgaaagctgaactatgcaatgcggaatcccacagctatgaatacaccaaagctgctgccaaaaacctcaagtcagaacaatggtgcacaacttggtggtaccagttcactgtattgctccaaagaggagtcagagagaggagattcgaatctttcaacaagctcaggattttccaagtcatcagtgttgcttttcttggtggccttttatggtggcatactccaaaatctcacatccaagatagaactgctttgctcttcttcttctcggtcttttggggcttctacccgctatacaacgcggttttcacatttccacaagagaaaagaatgctaatcaaggaacggtcttccggaatgtaccgtctttcctcctatttcatggctagaaacgttggggacctgcccttggaacttgcccttccaactgcttttgtgttcataatttactggatgggtggacttaaacctgacccaacaacgtttatcctctcgctactggttgttctctattctgtccttgttgctcaaggtcttggcttagccttcggtgctctgcttatgaacatcaagcaagccacaacgttagcatctgttactacactcgtttttctcatagccggaggatactacgtgcaacaaattcctcccttcatcgtatggctcaagtacctaagctacagctactactgctacaagctgcttttgggtattcaatacactgatgacgactactatgagtgttcaaaaggagtctggtgcagagttggagacttcccagcaatcaagtcaatgggattgaacaatctctggatagacgtgtttgttatgggagtgatgttggtgggttatcggctcatggcttacatggcactgcatcgggtgaagttgcggtaaacgtgcagccgaaggtaacaacaactaagtaactccaagaagctccaaagaaaattttccccactgcaaccaaggaataatagtagtattagaaaagataaaagtcgtcgaattttggtcgattttacttacgtatccgagatatatatccgacgactttctttttattttaggctagatgatgatagtactcctaagtttgagaataaaacagtgagataatgtatgagataagaagggaaaccaagtatatactaattcccatttgcaaaaacagtgactaaactttcggtccactcttccatggaaatgattgttgtatcttttgtggggttccttaaaaagaaaaggtctactct

SEQ ID NO: 2343 - protein, 648 aa, Arabidopsis thaliana
MPQNCIAPRPEEDGGVMVQGLPDMSDTQSKSVLAFPTITSQPGLQMSMYPITLKFEEVVYKVKIEQTSQCMGSWKSKEKTILNGITGMVCPGEFLAMLGPSGSGKTTLLSALGGRLSKTFSGKVMYNGQPFSGCIKRRTGFVAQDDVLYPHLTVWETLFFTALLRLPSSLTRDEKAEHVDRVIAELGLNRCTNSMIGGPLFRGISGGEKKRVSIGQEMLINPSLLLLDEPTSGLDSTTAHRIVTTIKRLASGGRTVVTTIHQPSSRIYHMFDKVVLLSEGSPIYYGAASSAVEYFSSLGFSTSLTVNPADLLLDLANGIPPDTQKETSEQEQKTVKETLVSAYEKNISTKLKAELCNAESHSYEYTKAAAKNLKSEQWCTTWWYQFTVLLQRGVRERRFESFNKLRIFQVISVAFLGGLLWWHTPKSHIQDRTALLFFFSVFWGFYPLYNAVFTFPQEKRMLIKERSSGMYRLSSYFMARNVGDLPLELALPTAFVFIIYWMGGLKPDPTTFILSLLVVLYSVLVAQGLGLAFGALLMNIKQATTLASVTTLVFLIAGGYYVQQIPPFIVWLKYLSYSYYCYKLLLGIQYTDDDYYECSKGVWCRVGDFPAIKSMGLNNLWIDVFVMGVMLVGYRLMAYMALHRVKLR

SEQ ID NO: 2344 - protein, 632 aa, Arabidopsis thaliana
MVQGLPDMSDTQSKSVLAFPTITSQPGLQMSMYPITLKFEEVVYKVKIEQTSQCMGSWKSKEKTILNGITGMVCPGEFLAMLGPSGSGKTTLLSALGGRLSKTFSGKVMYNGQPFSGCIKRRTGFVAQDDVLYPHLTVWETLFFTALLRLPSSLTRDEKAEHVDRVIAELGLNRCTNSMIGGPLFRGISGGEKKRVSIGQEMLINPSLLLLDEPTSGLDSTTAHRIVTTIKRLASGGRTVVTTIHQPSSRIYHMFDKVVLLSEGSPIYYGAASSAVEYFSSLGFSTSLTVNPADLLLDLANGIPPDTQKETSEQEQKTVKETLVSAYEKNISTKLKAELCNAESHSYEYTKAAAKNLKSEQWCTTWWYQFTVLLQRGVRERRFESFNKLRIFQVISVAFLGGLLWWHTPKSHIQDRTALLFFFSVFWGFYPLYNAVFTFPQEKRMLIKERSSGMYRLSSYFMARNVGDLPLELALPTAFVFIIYWMGGLKPDPTTFILSLLVVLYSVLVAQGLGLAFGALLMNIKQATTLASVTTLVFLIAGGYYVQQIPPFIVWLKYLSYSYYCYKLLLGIQYTDDDYYECSKGVWCRVGDFPAIKSMGLNNLWIDVFVMGVMLVGYRLMAYMALHRVKLR

SEQ ID NO: 2345 - protein, 625 aa, Arabidopsis thaliana
MSDTQSKSVLAFPTITSQPGLQMSMYPITLKFEEVVYKVKIEQTSQCMGSWKSKEKTILNGITGMVCPGEFLAMLGPSGSGKTTLLSALGGRLSKTFSGKVMYNGQPFSGCIKRRTGFVAQDDVLYPHLTVWETLFFTALLRLPSSLTRDEKAEHVDRVIAELGLNRCTNSMIGGPLFRGISGGEKKRVSIGQEMLINPSLLLLDEPTSGLDSTTAHRIVTTIKRLASGGRTVVTTIHQPSSRIYHMFDKVVLLSEGSPIYYGAASSAVEYFSSLGFSTSLTVNPADLLLDLANGIPPDTQKETSEQEQKTVKETLVSAYEKNISTKLKAELCNAESHSYEYTKAAAKNLKSEQWCTTWWYQFTVLLQRGVRERRFESFNKLRIFQVISVAFLGGLLWWHTPKSHIQDRTALLFFFSVFWGFYPLYNAVFTFPQEKRMLIKERSSGMYRLSSYFMARNVGDLPLELALPTAFVFIIYWMGGLKPDPTTFILSLLVVLYSVLVAQGLGLAFGALLMNIKQATTLASVTTLVFLIAGGYYVQQIPPFIVWLKYLSYSYYCYKLLLGIQYTDDDYYECSKGVWCRVGDFPAIKSMGLNNLWIDVFVMGVMLVGYRLMAYMALHRVKLR

SEQ ID NO: 2346 - DNA, 1383 bp, Arabidopsis thaliana
ggtctcactgaaactgtgaaaattttatctcttttatagataaagaatcttgcttttttcagttttcagtatgaagaagaattgaagagagtgtccgaggaaggagacctttggtttcagtttgtgagtcttgttgtaatggctttatcaatggagtttgggttttcaattgggtcatgcttcaaggcaccaaacccacctgttctaatctctgcaagccctaataagatcaatttcacgttgagaaggagaaagaaaagattcttacttagagtctctgctgtgtcgtataaggaattcgcagagtctgctttagaagaaaccaggaaaaggatcgttcttgaaccttcacatctccaggaaaagtatagtagcatgacaggactagatggtaagaccgaacttcaaatgcttgcttttaaatcttcaaagattagactcttgaggagtatggcaatagagaatgagacaatgcaggtctttgactttgcgggtttcatggagcctgagtatgatactcccatattctgtgctaactttttcacatctaccaacgttaacatagttgtattggaccttaatcctttgcatcagttgactgaccagacggattaccaagacaagtattataacaagataatgtccatatatcacaaatatgctgagactttcccatggggagggaaattgactggtgaatccataaagtttttctcgcctttggtgatgtggactaggttttcgtctagcaaagaaaaacataaggctttgttctctgcgtttctagagtactatcaggcatggcttgagatgacaatccaagtgagggaggagatggaaccatctcatgtgagagccaattgtgaagcacaacacaagtacctgacatggcgagcacaaaaggatcctggacatggtcttcttaaaagattagtaggtgaagcaaaggcaaaggagctgctaagggatttcctgttcaatggggtggatgagttaggcacaaaaacattcattgattactttccagagtaccaaacagaagatggaactgtaagcgataaacgaagtatcattgggaagtcatatgaaactcgtccatgggatttaacaggacaatttatcggctaacaatgatatatgtgaacaagtcagatttcagagtcatcaacacaagaggacgtgaacttagggaagtaggaataagaaagagcagcatgaggagtctctcaggtctatctgcatttcaagatgattgtttgagttaccatgcattgtagttttacaagtgtagctctcagcccttcatcaaaatgagaatcctcgagtatgatatgattttaatgaaaatgtattcgtctctacctaatcaacagagattaactt

SEQ ID NO: 2347 - protein, 329 aa, Arabidopsis thaliana
MALSMEFGFSIGSCFKAPNPPVLISASPNKINFTLRRRKKRFLLRVSAVSYKEFAESALEETRKRIVLEPSHLQEKYSSMTGLDGKTELQMLAFKSSKIRLLRSMAIENETMQVFDFAGFMEPEYDTPIFCANFFTSTNVNIVVLDLNPLHQLTDQTDYQDKYYNKIMSIYHKYAETFPWGGKLTGESIKFFSPLVMWTRFSSSKEKHKALFSAFLEYYQAWLEMTIQVREEMEPSHVRANCEAQHKYLTWRAQKDPGHGLLKRLVGEAKAKELLRDFLFNGVDELGTKTFIDYFPEYQTEDGTVSDKRSIIGKSYETRPWDLTGQFIG

SEQ ID NO: 2348 - protein, 325 aa, Arabidopsis thaliana
MEFGFSIGSCFKAPNPPVLISASPNKINFTLRRRKKRFLLRVSAVSYKEFAESALEETRKRIVLEPSHLQEKYSSMTGLDGKTELQMLAFKSSKIRLLRSMAIENETMQVFDFAGFMEPEYDTPIFCANFFTSTNVNIVVLDLNPLHQLTDQTDYQDKYYNKIMSIYHKYAETFPWGGKLTGESIKFFSPLVMWTRFSSSKEKHKALFSAFLEYYQAWLEMTIQVREEMEPSHVRANCEAQHKYLTWRAQKDPGHGLLKRLVGEAKAKELLRDFLFNGVDELGTKTFIDYFPEYQTEDGTVSDKRSIIGKSYETRPWDLTGQFIG

SEQ ID NO: 2349 - protein, 250 aa, Arabidopsis thaliana
MTGLDGKTELQMLAFKSSKIRLLRSMAIENETMQVFDFAGFMEPEYDTPIFCANFFTSTNVNIVVLDLNPLHQLTDQTDYQDKYYNKIMSIYHKYAETFPWGGKLTGESIKFFSPLVMWTRFSSSKEKHKALFSAFLEYYQAWLEMTIQVREEMEPSHVRANCEAQHKYLTWRAQKDPGHGLLKRLVGEAKAKELLRDFLFNGVDELGTKTFIDYFPEYQTEDGTVSDKRSIIGKSYETRPWDLTGQFIG

SEQ ID NO: 2350 - DNA, 1567 bp, Arabidopsis thaliana
tggcatcgcctgtttttataatttctcgtcttgtacaaaataaaagactctctctctcttaaaatttctctttcgattctctcgcatttcaaaatttcatttccttatatagactcttaaggccggcgatttctgtgagtccatagattttcgctactccgccgtcagtttttctcaactccggaggctgtgtttttgccaccgctttgattcgccggtaagttcacgtatggccagtaatactttgaaagagatgaatagtcttcatgtaactgagaagataagtgactgtaaagctagcttgaccaagccatgtgttggtaaaatgaatggaaaatctgaagatagaccattaccaaactctgcctccttggattccagtgattctaaagttgtagaagcagagaaacccgagccagagatagctattgtggaagttgaatatattgaatctgaaaacttggataatgtagacgatgctgatgcagttctgaagtctgttttagctggactagagtccaaggactggatttcactctgtgatgctcttaataacgttcgccgactttcgatattccacaaggaagaaatgatgcatatgcttgaaaaagtgataccacttgtcgtgaaatcactgaaaaatccaagaagtgcggtgtgtaaaacggcatgcatgacatctgcagatatcttcagtgcatataataatcatataacagatctgttggagcctctgcttactcaactactcctcaagtcttcccaagacaaacggtttgtttgcgaggcagcagagaaagctttaacagcaatgaccaaatatgtttccccaaccttgctgttaccaaagctgcaaccttgtctcaaaaacaggaatcctcggatccgtgccaaagcatcattatgcttttctcgaagtgttcctcgactgggcgttgaagggattaaagaatatggaatcgacaaattagttcaagcagccgcatctcagcttagcgatcagctccctgaatcccgtgaggctgcacggactgtcctactagaacttcagagcgtatatgaaaaagctcatcctctcatcaaccctgagacatcatcaccagaagaacagcaaatcccggaggtagagccaattacttgggaaactttctgcaagtcaaaactgtcggctcttagcgcacaagccgtgcttcgtgtcaccaatgttgtcactgttactgctcgggagggtttggttactacaggttcatcatcttcatcccagttataaacattttctactacaaattttttaaaaaccgtttgctacgagtcatacggtttacatggtattctccggcatggcggcatgatctaccaaattggcaaattatggaccgataaaaagagtgaacgttcgtgtatgaaaaatcttggcttctttctgggttattttctttttgtggattctcatctgtcttcactaccagtacttgtttctttttcttatgtgtatatattctataccaagatttggtaagatagtcatgagtcttttggttatatgcaaaattggtcggattctttg

SEQ ID NO: 2351 - protein, 346 aa, Arabidopsis thaliana
MASNTLKEMNSLHVTEKISDCKASLTKPCVGKMNGKSEDRPLPNSASLDSSDSKVVEAEKPEPEIAIVEVEYIESENLDNVDDADAVLKSVLAGLESKDWISLCDALNNVRRLSIFHKEEMMHMLEKVIPLVVKSLKNPRSAVCKTACMTSADIFSAYNNHITDLLEPLLTQLLLKSSQDKRFVCEAAEKALTAMTKYVSPTLLLPKLQPCLKNRNPRIRAKASLCFSRSVPRLGVEGIKEYGIDKLVQAAASQLSDQLPESREAARTVLLELQSVYEKAHPLINPETSSPEEQQIPEVEPITWETFCKSKLSALSAQAVLRVTNVVTVTAREGLVTTGSSSSSQL

SEQ ID NO: 2352 - protein, 338 aa, Arabidopsis thaliana
MNSLHVTEKISDCKASLTKPCVGKMNGKSEDRPLPNSASLDSSDSKVVEAEKPEPEIAIVEVEYIESENLDNVDDADAVLKSVLAGLESKDWISLCDALNNVRRLSIFHKEEMMHMLEKVIPLVVKSLKNPRSAVCKTACMTSADIFSAYNNHITDLLEPLLTQLLLKSSQDKRFVCEAAEKALTAMTKYVSPTLLLPKLQPCLKNRNPRIRAKASLCFSRSVPRLGVEGIKEYGIDKLVQAAASQLSDQLPESREAARTVLLELQSVYEKAHPLINPETSSPEEQQIPEVEPITWETFCKSKLSALSAQAVLRVTNVVTVTAREGLVTTGSSSSSQL

SEQ ID NO: 2353 - protein, 314 aa, Arabidopsis thaliana
MNGKSEDRPLPNSASLDSSDSKVVEAEKPEPEIAIVEVEYIESENLDNVDDADAVLKSVLAGLESKDWISLCDALNNVRRLSIFHKEEMMHMLEKVIPLVVKSLKNPRSAVCKTACMTSADIFSAYNNHITDLLEPLLTQLLLKSSQDKRFVCEAAEKALTAMTKYVSPTLLLPKLQPCLKNRNPRIRAKASLCFSRSVPRLGVEGIKEYGIDKLVQAAASQLSDQLPESREAARTVLLELQSVYEKAHPLINPETSSPEEQQIPEVEPITWETFCKSKLSALSAQAVLRVTNVVTVTAREGLVTTGSSSSSQL

SEQ ID NO: 2354 - DNA, 1348 bp, Arabidopsis thaliana
atttcataaatcatagagagagagagagagagagagagagagtttggaaacattccaaaaccagaactcgatattatttcaccaaagaatgatagaaacaagaactatctttttataaaactctttacaccccaaaagaaaatgtctcactcgttttgccttataatatttctttcaacaacaacccaaatctacaaaaaatcccaataaaaaaaaacttcagtctgtttgacattttgtcgaacacttggacggcatcacaaaaagctctaaactttctgactaccaatggcggattcgtcttccgacaaggagaagaaggaaaataataagcagcccgtgtatcgtggagtccgtatgaggagctggggaaaatgggtatcggagattcgcgaaccgaggaagaaatcgagaatctggctcgggacttttccgacggcggagatggctatgcgtgctcacgacgtggcggctatgagtatcaaaggaacttcagccattctcaatttccctgagctctctaaacttcttccccgacccgtttcgctcagccctcgtgacgtcagagctgcggcgaccaaagctgctctcatggacttcgatacgacggcgtttcgttcggatactgagactagcgaaacgacgacgtcgaataaaatgtcagagagtagtgagagtaacgaaacggtgtcgttctcatcgtcgtcttggtcctctgttacgagcattgaggaaagtacagtctccgacgatcttgacgagatcgtaaagttaccgagtctaggaacgagcctaaacgagtcgaacgagttcgtgatatttgactcgttggaggatttggtgtacatgcctcggtggttaagcggtacggaagaagaagtttttacgtataataacaatgattcttcgttgaattactcatcagttttcgaatcttggaaacattttccctgagaaaagaaagaagccatattttctctctctttttcgccatttttggttttaagttttttgatgggattctctctgtttttgctatgcgtgagatatctctctttgtggaatagataacttttctgttgaaaatctcctaagtctgtgaaatgaacgacgatggaaatgtaagtgtgtatattagcccgaaataatgactgtatacattcttttttgcaagatcattagaaaaaaataaataggaaatgtggtttgtattagagtatagaattgattaagatcggtttagatcatcaatatcggtttaatgtctgtgaaccagaaccctctcattgtataagaggcttcaatgtaatatttcctaagcaagataatgagaatgatcgtttgtttt

SEQ ID NO: 2355 - protein, 221 aa, Arabidopsis thaliana
MADSSSDKEKKENNKQPVYRGVRMRSWGKWVSEIREPRKKSRIWLGTFPTAEMAMRAHDVAAMSIKGTSAILNFPELSKLLPRPVSLSPRDVRAAATKAALMDFDTTAFRSDTETSETTTSNKMSESSESNETVSFSSSSWSSVTSIEESTVSDDLDEIVKLPSLGTSLNESNEFVIFDSLEDLVYMPRWLSGTEEEVFTYNNNDSSLNYSSVFESWKHFP

SEQ ID NO: 2356 - protein, 198 aa, Arabidopsis thaliana
MRSWGKWVSEIREPRKKSRIWLGTFPTAEMAMRAHDVAAMSIKGTSAILNFPELSKLLPRPVSLSPRDVRAAATKAALMDFDTTAFRSDTETSETTTSNKMSESSESNETVSFSSSSWSSVTSIEESTVSDDLDEIVKLPSLGTSLNESNEFVIFDSLEDLVYMPRWLSGTEEEVFTYNNNDSSLNYSSVFESWKHFP

SEQ ID NO: 2357 - protein, 169 aa, Arabidopsis thaliana
MAMRAHDVAAMSIKGTSAILNFPELSKLLPRPVSLSPRDVRAAATKAALMDFDTTAFRSDTETSETTTSNKMSESSESNETVSFSSSSWSSVTSIEESTVSDDLDEIVKLPSLGTSLNESNEFVIFDSLEDLVYMPRWLSGTEEEVFTYNNNDSSLNYSSVFESWKHFP

SEQ ID NO: 2358 - DNA, 1870 bp, Arabidopsis thaliana
atctctccttttccttcttcttcttccttctcctttctctgtttatttgcttcgtttcctcttctctttctccgattctttatccatcttcgctcagatcttccccgtttcaactctttggatccagattctcctcctttttatgtaggtaacacgcatatcaagtgttaaagagtcaagatcacaaaaagttctatcgggtgatctgggctgctttcttttgtaatctaattgcagaaactttgctctgacttggatagcttcgtaaaaggttcaatctttctccgtttttcatcaatgagtagtaactaatctggaaatttgttgggagagaaagggcacattgcactgctattgctagagaacgtttctgcatccatgctggtagagagcatgcgtggatactgtgttttgggtgatgcccctgacaaaattagttcccgatgcattcggcgttgtgacgatatgtctagtcgctctgctagttcttttgggtctcctttgcatcgcttactcgttctatttccagtctcacgttcgtaagcaaggctatattcaacttggttacttcagtggtccctggattatccgaatcactttcattctctttgctatctggtgggctgttggtgagatttttcgattgagtttgttgaggcgtcacagaaggttgttgagtgggttggatctgagatggcaagaaaacgtttgcaagtggtacatcgtttccaatctaggatttgcggagccttgtctctttctgactctcatgtttcttctgcgtgctcccttgaagatggaatcaggggctttgagcggaaaatggaacagggacacagcaggttatattattctttattgtctcccgatgcttgctcttcaacttgcggttgtgttgtccgagtcacgcctaaatggtggtagtggctcttatgtaaagctgccacacgacttcacaagaacgtattcccgagttattattgatcacgacgaggtggccttatgcacatatcctctactgagtaccatccttcttggtgtgtttgcagccgtcctaacagcttacttgttctggcttggaaggcagatactgaaacttgtcattaacaagcgtttacagaagagagtatacactttgatattctcggtctcgagtttccttccattaaggattgttatgctctgtttgtcggttctcacagcagcagacaagattatattcgaagccctttctttcttggccttcctctccctcttctgcttttgcgtggtatccatctgcttgcttgtctacttcccggtttcagattccatggccctgagaggtctaagagacacagatgatgaggatacggctgtgaccgaagaacgcagtggtgctctgttacttgcaccaaactcttcacaaactgatgagggattgagcttaagaggtcggagagactcgggatcgtctacacaggagaggtatgtggaactcagcctatttctggaagctgagaactaaaatcgccaaaggctgtttctatttggcttttggcaatgtacagattcctggtgaaacaagcagagagagagggataaagagtttaagtatgagaatatgtttgcgcaaaaaaaggcataatttcagttttgtggcaaagacactttgactgtaaaggagggtttaagggggtttactcttgtgagggtttgttgtttgaaatgttttctgtttgatggatcatatttttgtacctttattatgtgatcaattttgatttagaaaaaaaaaaaaaaaaaacaatagccgtgaacatgagcatgactttaaaagataaatcagccttttaccctctattctttggactcatgaacatgagacttc

SEQ ID NO: 2359 - protein, 362 aa, Arabidopsis thaliana
MPLTKLVPDAFGVVTICLVALLVLLGLLCIAYSFYFQSHVRKQGYIQLGYFSGPWIIRITFILFAIWWAVGEIFRLSLLRRHRRLLSGLDLRWQENVCKWYIVSNLGFAEPCLFLTLMFLLRAPLKMESGALSGKWNRDTAGYIILYCLPMLALQLAVVLSESRLNGGSGSYVKLPHDFTRTYSRVIIDHDEVALCTYPLLSTILLGVFAAVLTAYLFWLGRQILKLVINKRLQKRVYTLIFSVSSFLPLRIVMLCLSVLTAADKIIFEALSFLAFLSLFCFCVVSICLLVYFPVSDSMALRGLRDTDDEDTAVTEERSGALLLAPNSSQTDEGLSLRGRRDSGSSTQERYVELSLFLEAEN

SEQ ID NO: 2360 - protein, 245 aa, Arabidopsis thaliana
MFLLRAPLKMESGALSGKWNRDTAGYIILYCLPMLALQLAVVLSESRLNGGSGSYVKLPHDFTRTYSRVIIDHDEVALCTYPLLSTILLGVFAAVLTAYLFWLGRQILKLVINKRLQKRVYTLIFSVSSFLPLRIVMLCLSVLTAADKIIFEALSFLAFLSLFCFCVVSICLLVYFPVSDSMALRGLRDTDDEDTAVTEERSGALLLAPNSSQTDEGLSLRGRRDSGSSTQERYVELSLFLEAEN

SEQ ID NO: 2361 - protein, 236 aa, Arabidopsis thaliana
MESGALSGKWNRDTAGYIILYCLPMLALQLAVVLSESRLNGGSGSYVKLPHDFTRTYSRVIIDHDEVALCTYPLLSTILLGVFAAVLTAYLFWLGRQILKLVINKRLQKRVYTLIFSVSSFLPLRIVMLCLSVLTAADKIIFEALSFLAFLSLFCFCVVSICLLVYFPVSDSMALRGLRDTDDEDTAVTEERSGALLLAPNSSQTDEGLSLRGRRDSGSSTQERYVELSLFLEAEN

SEQ ID NO: 2362 - DNA, 1947 bp, Arabidopsis thaliana
gggtcctttaaaagtatcgtcaaaacgctctctctctcttcttctccgctgcgacttcttcctctctcgttctccggcgactctgtccttttagggtttttcgaactcttcaatttgtttcggttacgaggaagaagaagacgaaaggttacatttttaagagtccataaaaaatggaaaagaaacaaggttttttctcatcactcagagacgaagtcgtaagaggcttatctccttctcgttcaagaccacgttctcgttccgcaagcccgtctcgttcaacaaccccacacatgaaagctcttctctggggaagaaagaaactaatcgcaagctccggctgcagcggcggcggaggagtaatcggaggagaaagaggaggttattacttgtcgcaacctgagccgtttattggaagatccagtagtttaagaccagtaatggaaggtcctgatccagataacggtgaagtctctggagtggattcgaaacgactcgggtcgggtttaagtcattgggtcaaaggtcagtggtcacgtgctccgtccgtgacttcaactacgccggcttatcggaagtctgatttgagacttcttctcggtgttatgggagctcctctcgctcccattaacgtctcttcctccagtcatcttcttcatctcaccatcagagactctcccactgaaacatcatctgcacagtacattttgcaacagtacacggcggcttgtggtggccacaagttacataacgccattaagaacgcttatgctatgggtaagttaaagatgataacttcagagcttgaaactcctacaggaactgttagaaaccgaaactctacaaagtcggaaactggtgggtttgttctctggcagatgaatcctgatatgtggtacgttgagctctctgttggtggtagtaaagttcgtgctggctgtaatgggaagcttgtttggcgacatactccttggcttggttctcacactgctaaaggacccgtcaggcctcttcgtcgtgcacttcagggacttgatccgagaactactgctactatgtttgctgaatcgaaatgtgttggagagaggaaggtgaatggtgaagattgtttcattttgaagctatgtactgatcctgaaacgctaagggcgaggagtgaaggaccagcagagattgtaagacacatccttttcggttacttcagccaaagaacaggacttctagctcaaattgaggattcgcagttgactcgaatccaatctaacgatggtgatgctgtttactgggagaccacgatcaattcgtctctagacgactacaaacaggtggaagggatcatgattgctcactctggacgctctgttgttaccctcttcagatttggggaagttgctatgagccacactaggacaaagatggaggaaagatggaccattgaagaagtcgctttcaatgttcctggtctgtctctagattgctttatcccacccgctgatcttcggtctggttcgttaactgaagcctgcgagtactcgggtcaagaggagaaagggaagagctcactagcgttggcttcaacaacagctcatagagctaaagttgcagccttggagaaaggaagcttcgacaatgatcctgtttggcatattgatgtctgagtatggtagggaagatgcaatctgtgcatagtaatcctaataacaagactcgagccttgaaatgagactaactaacccctttgtttaacagctcaaatattaggagtttgattacacgattggtttatttaagtttcatttctcttattttctttgtcgccttcaatattattgagtaaggtgatgggatttatttgcagcaagagaaggagaattgctgcttaaatgttgaatttgtctcatatttttctagcaagtcaaaatttcaatctatggaaagttaattgtt

SEQ ID NO: 2363 - protein, 494 aa, Arabidopsis thaliana
MEKKQGFFSSLRDEVVRGLSPSRSRPRSRSASPSRSTTPHMKALLWGRKKLIASSGCSGGGGVIGGERGGYYLSQPEPFIGRSSSLRPVMEGPDPDNGEVSGVDSKRLGSGLSHWVKGQWSRAPSVTSTTPAYRKSDLRLLLGVMGAPLAPINVSSSSHLLHLTIRDSPTETSSAQYILQQYTAACGGHKLHNAIKNAYAMGKLKMITSELETPTGTVRNRNSTKSETGGFVLWQMNPDMWYVELSVGGSKVRAGCNGKLVWRHTPWLGSHTAKGPVRPLRRALQGLDPRTTATMFAESKCVGERKVNGEDCFILKLCTDPETLRARSEGPAEIVRHILFGYFSQRTGLLAQIEDSQLTRIQSNDGDAVYWETTINSSLDDYKQVEGIMIAHSGRSVVTLFRFGEVAMSHTRTKMEERWTIEEVAFNVPGLSLDCFIPPADLRSGSLTEACEYSGQEEKGKSSLALASTTAHRAKVAALEKGSFDNDPVWHIDV

SEQ ID NO: 2364 - protein, 454 aa, Arabidopsis thaliana
MKALLWGRKKLIASSGCSGGGGVIGGERGGYYLSQPEPFIGRSSSLRPVMEGPDPDNGEVSGVDSKRLGSGLSHWVKGQWSRAPSVTSTTPAYRKSDLRLLLGVMGAPLAPINVSSSSHLLHLTIRDSPTETSSAQYILQQYTAACGGHKLHNAIKNAYAMGKLKMITSELETPTGTVRNRNSTKSETGGFVLWQMNPDMWYVELSVGGSKVRAGCNGKLVWRHTPWLGSHTAKGPVRPLRRALQGLDPRTTATMFAESKCVGERKVNGEDCFILKLCTDPETLRARSEGPAEIVRHILFGYFSQRTGLLAQIEDSQLTRIQSNDGDAVYWETTINSSLDDYKQVEGIMIAHSGRSVVTLFRFGEVAMSHTRTKMEERWTIEEVAFNVPGLSLDCFIPPADLRSGSLTEACEYSGQEEKGKSSLALASTTAHRAKVAALEKGSFDNDPVWHIDV

SEQ ID NO: 2365 - protein, 405 aa, Arabidopsis thaliana
MEGPDPDNGEVSGVDSKRLGSGLSHWVKGQWSRAPSVTSTTPAYRKSDLRLLLGVMGAPLAPINVSSSSHLLHLTIRDSPTETSSAQYILQQYTAACGGHKLHNAIKNAYAMGKLKMITSELETPTGTVRNRNSTKSETGGFVLWQMNPDMWYVELSVGGSKVRAGCNGKLVWRHTPWLGSHTAKGPVRPLRRALQGLDPRTTATMFAESKCVGERKVNGEDCFILKLCTDPETLRARSEGPAEIVRHILFGYFSQRTGLLAQIEDSQLTRIQSNDGDAVYWETTINSSLDDYKQVEGIMIAHSGRSVVTLFRFGEVAMSHTRTKMEERWTIEEVAFNVPGLSLDCFIPPADLRSGSLTEACEYSGQEEKGKSSLALASTTAHRAKVAALEKGSFDNDPVWHIDV

SEQ ID NO: 2366 - DNA, 1620 bp, Arabidopsis thaliana
actcagtagcttttctatacttttctatacttttcgatatgttcatcggctgaatcagagtaggtcactggatctctcatccgatcataggttcaacaatatggaacaaatttggaattgatgcaatataagctacattgaagtatgggatctgtatcgctgaagattggcgatggaaccgcaagattcaagcgatcaacgcttttttcttcagctatcaacctccttatgcttttctctatagtcactacaaatctctttgcactatacgccttctcgtctcggtctcaatcccacacgccacaccctcttcattccaacaatgtctctttggtttctcaacatctctcactcatcctcagagaaatcgattcctcccaccacacactcactcagatggagaaacagattattggttatgaatctctcgatctctcgcaacaagaagttccacaagagcttaaacttttccttcaacaacatcagcttcctcttggtaaagattctcgtactggtatcacacaaatggttgcatctgttggacattcctgtgaaatgtctctagatttgttatctcagtatatgtcgtataatgtctttgaaaaatgtcctgatgattggagcctagctcagaagttgattctccgtgcttgtgaaccgttgccacgccgtcgatgtttggctaaaacggtgcataaaccaggtctcgctttgtttcctgattctttgtggagaccagttggtaacagtagtgttaactggagcggtcttggctgcaaaagtttcgaatgcttgaaaggtaagaaactgagccgggattgtgttggttgctttgatctagctactagtcatgagaaagataggtttgttaaggttaatgggaagactgatttcctgatagatgatgttttggatttaggcgatgggaaaatccgaataggattcgatattagcagtggatcaggtacgtttgctgctagaatggctgaaaagaatgtgaatataatcagtaatacattgaatatagatgctcctttcagcgaattcatagctgcgagaggaatttttccgttgttcatgagtttggatcagagattaccgttctacgacaatgttttcgatctcatacatgcatctaacggattggatttagcggttagtaataaacccgagaagctggagttcttgatgtttgatcttgatcggatcttgaaacccggtggattgttctggttagacaatttctattgcggtaacgatgagaagaagagagttcttacgcgtttgatagagaggtttgggtataagaagttgaaatgggttgttggagagaaaactgatgctgaggtttttctctcggctgttctgcaaaagcctgcccggatttgattgatatatatttttttgaaaaatcaagattttgatcttttcataggttataaaattttgagctcattacatatttttttactattgatcccaagagacaattgaaagtgtgaatttgtattttgaggttttgtatgaattatgattgttctgctgtatgtgtgtaagattgtttgtaagatctttataagatcttcggatgtctcccaatgcattgttaagtttttcgtt

SEQ ID NO: 2367 - protein, 414 aa, Arabidopsis thaliana
MGSVSLKIGDGTARFKRSTLFSSAINLLMLFSIVTTNLFALYAFSSRSQSHTPHPLHSNNVSLVSQHLSLILREIDSSHHTLTQMEKQIIGYESLDLSQQEVPQELKLFLQQHQLPLGKDSRTGITQMVASVGHSCEMSLDLLSQYMSYNVFEKCPDDWSLAQKLILRACEPLPRRRCLAKTVHKPGLALFPDSLWRPVGNSSVNWSGLGCKSFECLKGKKLSRDCVGCFDLATSHEKDRFVKVNGKTDFLIDDVLDLGDGKIRIGFDISSGSGTFAARMAEKNVNIISNTLNIDAPFSEFIAARGIFPLFMSLDQRLPFYDNVFDLIHASNGLDLAVSNKPEKLEFLMFDLDRILKPGGLFWLDNFYCGNDEKKRVLTRLIERFGYKKLKWVVGEKTDAEVFLSAVLQKPARI

SEQ ID NO: 2368 - protein, 386 aa, Arabidopsis thaliana
MLFSIVTTNLFALYAFSSRSQSHTPHPLHSNNVSLVSQHLSLILREIDSSHHTLTQMEKQIIGYESLDLSQQEVPQELKLFLQQHQLPLGKDSRTGITQMVASVGHSCEMSLDLLSQYMSYNVFEKCPDDWSLAQKLILRACEPLPRRRCLAKTVHKPGLALFPDSLWRPVGNSSVNWSGLGCKSFECLKGKKLSRDCVGCFDLATSHEKDRFVKVNGKTDFLIDDVLDLGDGKIRIGFDISSGSGTFAARMAEKNVNIISNTLNIDAPFSEFIAARGIFPLFMSLDQRLPFYDNVFDLIHASNGLDLAVSNKPEKLEFLMFDLDRILKPGGLFWLDNFYCGNDEKKRVLTRLIERFGYKKLKWVVGEKTDAEVFLSAVLQKPARI

SEQ ID NO: 2369 - protein, 330 aa, Arabidopsis thaliana
MEKQIIGYESLDLSQQEVPQELKLFLQQHQLPLGKDSRTGITQMVASVGHSCEMSLDLLSQYMSYNVFEKCPDDWSLAQKLILRACEPLPRRRCLAKTVHKPGLALFPDSLWRPVGNSSVNWSGLGCKSFECLKGKKLSRDCVGCFDLATSHEKDRFVKVNGKTDFLIDDVLDLGDGKIRIGFDISSGSGTFAARMAEKNVNIISNTLNIDAPFSEFIAARGIFPLFMSLDQRLPFYDNVFDLIHASNGLDLAVSNKPEKLEFLMFDLDRILKPGGLFWLDNFYCGNDEKKRVLTRLIERFGYKKLKWVVGEKTDAEVFLSAVLQKPARI

SEQ ID NO: 2370 - DNA, 1254 bp, Arabidopsis thaliana
tttttagggggcaactcagtagcaaaactcgctcgatggggtaccagggccccccctcgattggccaaatcggccctcgagttaattaaattaatccccccccccccccccgatccgaaacgcaagtcgatgacctcctctctctcacagatctaaaaaccagaagcgagagaaacaaattcactctccccttatataagcaccgatttataaatctttttccctcttcgattctcaattctttgtataaaaggcttctccttttctcaattcttcggcttcctttcgcccaaactcttccctcgaatctttccttctcgtcttaaagctacgaaaccctagatttcggatttcttcgctatccaaagaagaatgactgatcaaggattggaagggagtaatccagttgatcttagcaagcatccttcagggattgttcctactcttcaaaacattgtctccacggtgaacttagactgcaagctagatcttaaagccatagctttgcaggctcggaatgctgaatataatcccaagcgttttgctgcggtgataatgaggatcagagaaccgaagactacagcattaatattcgcctcagggaaaatggtctgtactggagctaagagcgaggacttttcgaagatggctgctagaaagtatgctaggattgtgcagaaattgggattccctgcaaaattcaaggatttcaagattcagaatattgtaggttcttgtgatgtcaaattccctataagacttgaaggtcttgcttactctcacgctgctttctcaagttatgagcccgagctcttcccagggctgatttataggatgaaagtcccaaaaatcgtccttctaatctttgtctctgggaagatcgtaataacaggagccaagatgagagatgagacctacaaagcctttgagaatatataccccgtgctctcggaattcagaaagatacagcaataggtcacggatttgttccctgcaaaactagttgtgcggtcttagccccttggagttgctaaagcttgctgagaattttgcccttgaacaaaggctttcacagtagctagactctcaccttgtgttttggttcataatataacattgtatatacacaatggagattctaaagacaattcttcggttctattttttttctttttctttccaagatatgtcttacatgtatgttgctgtagtgtcctcacatttccacttatgttacaagtagaaccttaactc

SEQ ID NO: 2371 - protein, 200 aa, Arabidopsis thaliana
MTDQGLEGSNPVDLSKHPSGIVPTLQNIVSTVNLDCKLDLKAIALQARNAEYNPKRFAAVIMRIREPKTTALIFASGKMVCTGAKSEDFSKMAARKYARIVQKLGFPAKFKDFKIQNIVGSCDVKFPIRLEGLAYSHAAFSSYEPELFPGLIYRMKVPKIVLLIFVSGKIVITGAKMRDETYKAFENIYPVLSEFRKIQQ

SEQ ID NO: 2372 - protein, 139 aa, Arabidopsis thaliana
MRIREPKTTALIFASGKMVCTGAKSEDFSKMAARKYARIVQKLGFPAKFKDFKIQNIVGSCDVKFPIRLEGLAYSHAAFSSYEPELFPGLIYRMKVPKIVLLIFVSGKIVITGAKMRDETYKAFENIYPVLSEFRKIQQ

SEQ ID NO: 2373 - protein, 122 aa, Arabidopsis thaliana
MVCTGAKSEDFSKMAARKYARIVQKLGFPAKFKDFKIQNIVGSCDVKFPIRLEGLAYSHAAFSSYEPELFPGLIYRMKVPKIVLLIFVSGKIVITGAKMRDETYKAFENIYPVLSEFRKIQQ

SEQ ID NO: 2374 - DNA, 1487 bp, Arabidopsis thaliana
gggacttcgcgttccttgacgaagaagacgatacttcttctccttccatcacagcttcacgcaaatctttctgcagttacatcttcttaagattctgagttccgacttatttcgtggaaggattttgatatttcaacagtgattttaattttatactggaacttaagcatcacttaatcttccggctaaaatgatgtcgccgaagcaaatctccgacgatcgaggatcttcacatttcaggcatacaccattccagataatccaccttattgggaacttttttaggatatggtcagtatattcgatgtaccgatacttgaatcagacgggagcgcctgttgttctctttctcttctgctgtctggtgccttcatcaatcatcttcttgataattcaaaagccatggaaaggaagggctctttctaatcaacagattgtaccttctcttatcaatggagtcatcacggctctatacttcatcttatggggaaaaggtctcaagtcttgtggacctcttagagctatcttgtcagagtattctggtgctgttcttggagtactttctggagtattatatggacggagaggccatgtgtggaaaaaggtaggtggcctcattgcaatgctggtagctctttttttcttgtctcaaggatgggcgacatcatctctctcccctttttcaacaaaagatagtactgaaaccaaagaggaagaagtacaaacagaacaagcactaggtatgatgggaatgatgataccagtttttgctggaatcttatcagcattaaggcgggttatcgcacgccgtgtttctctaaagaaccagcagaagaaacgactacatgcgataaccattacttctgcaacctgtttcttgttccctgtggccatgtgggaccttatcatagggtcatcttctgggaaaacatccgagttaccattttctgcgtgggctttccttagcaccattattttcgggatcatcctaatattctacgttgataatatcgcagaagagagattgcatatggtgttttcttcgccgaggcatttaatggtagcaggtgtatgcataatagtcatggagttagcttatgagatggatttttctcttcccggtttcatcgtttgttgcttagtattagggtttggaatattcgaggcaacatctctagaacggaacaagaaagactcttcgttgaaatcagaagatccatcaaacggaatccttggtaataatgactttgatacttctccaattcttcccatatagctcaccaatctttccctacactaacgacgatgtactgttgaatgtacttgtccttgacgatgtaaatctgtctggttttattcatttctcaatctttgtaccttcatttttcagctttttttgttttcttggtgaagcatatgcaaatattttggtctaacgtagacaaagatgataacccatgatgatgaatatacttacggttatacgt

SEQ ID NO: 2375 - protein, 361 aa, Arabidopsis thaliana
MMSPKQISDDRGSSHFRHTPFQIIHLIGNFFRIWSVYSMYRYLNQTGAPVVLFLFCCLVPSSIIFLIIQKPWKGRALSNQQIVPSLINGVITALYFILWGKGLKSCGPLRAILSEYSGAVLGVLSGVLYGRRGHVWKKVGGLIAMLVALFFLSQGWATSSLSPFSTKDSTETKEEEVQTEQALGMMGMMIPVFAGILSALRRVIARRVSLKNQQKKRLHAITITSATCFLFPVAMWDLIIGSSSGKTSELPFSAWAFLSTIIFGIILIFYVDNIAEERLHMVFSSPRHLMVAGVCIIVMELAYEMDFSLPGFIVCCLVLGFGIFEATSLERNKKDSSLKSEDPSNGILGNNDFDTSPILPI

SEQ ID NO: 2376 - protein, 360 aa, Arabidopsis thaliana
MSPKQISDDRGSSHFRHTPFQIIHLIGNFFRIWSVYSMYRYLNQTGAPVVLFLFCCLVPSSIIFLIIQKPWKGRALSNQQIVPSLINGVITALYFILWGKGLKSCGPLRAILSEYSGAVLGVLSGVLYGRRGHVWKKVGGLIAMLVALFFLSQGWATSSLSPFSTKDSTETKEEEVQTEQALGMMGMMIPVFAGILSALRRVIARRVSLKNQQKKRLHAITITSATCFLFPVAMWDLIIGSSSGKTSELPFSAWAFLSTIIFGIILIFYVDNIAEERLHMVFSSPRHLMVAGVCIIVMELAYEMDFSLPGFIVCCLVLGFGIFEATSLERNKKDSSLKSEDPSNGILGNNDFDTSPILPI

SEQ ID NO: 2377 - protein, 323 aa, Arabidopsis thaliana
MYRYLNQTGAPVVLFLFCCLVPSSIIFLIIQKPWKGRALSNQQIVPSLINGVITALYFILWGKGLKSCGPLRAILSEYSGAVLGVLSGVLYGRRGHVWKKVGGLIAMLVALFFLSQGWATSSLSPFSTKDSTETKEEEVQTEQALGMMGMMIPVFAGILSALRRVIARRVSLKNQQKKRLHAITITSATCFLFPVAMWDLIIGSSSGKTSELPFSAWAFLSTIIFGIILIFYVDNIAEERLHMVFSSPRHLMVAGVCIIVMELAYEMDFSLPGFIVCCLVLGFGIFEATSLERNKKDSSLKSEDPSNGILGNNDFDTSPILPI

SEQ ID NO: 2378 - DNA, 2142 bp, Arabidopsis thaliana
atctctcttcacatgcccatttgaatcgtatctcctctcatttcttcttttgttttgttggagttagataaaatcaaaggtctaataaaagtgtcaaaacccttatcgctataacctccactaccatcttaaacttctccttataactcacgcttctctgctttcttctctcagagtctaactgctcaaataagaaaatggttcatgtgtcatcatctcatggagccaaagatggctctgaagaagcctatgattacagaggaaacccaccagataagtctaaaaccggtggatggttaggcgccggtttaattttagggagcgagctatcagagagaatatgcgtgatgggcatatcaatgaatctagtgacgtaccttgttggagatttacacatctcatcagctaaatcagcgaccatagtcaccaacttcatgggaactcttaaccttctagggcttctcggtggttttttggctgacgctaaactcggtcgctacaagatggttgcaatctcagcttctgtcacagctctgggagtgttgcttttgacggtggctacaactatctcaagcatgagaccaccaatatgtgacgatttcaggagacttcatcatcagtgcatagaagcaaacggacaccagttggctcttctctatgttgctctctataccatagctctaggcggaggaggaatcaaatccaacgtctctggttttgggtctgaccagttcgatactagtgatcctaaagaagagaaacagatgattttcttcttcaacagattctatttctccatcagcgttggctctctcttcgccgtgattgctcttgtttacgttcaggacaacgtcgggagaggctggggttacgggatctctgccgcgactatggtggttgcagccattgttttactctgcggaacgaaacggtaccgtttcaagaaacctaaaggaagcccttttacaacaatatggagggttggtttcttggcttggaagaaaagaaaggagagttaccctgcgcatccaagtcttttgaacggttatgacaacaccacggttccacacacagagatgcttaagtgtttagacaaagccgcaatttccaagaacgagagctctcctagctcgaaggacttcgaagagaaggatccgtggatcgtttcgactgttacacaagtcgaagaagtgaaactcgtgatgaaattggtaccgatttgggcaacgaacattcttttctggacgatttactcccaaatgacgactttcacggtcgaacaagcgacgtttatggaccgaaaactcggatctttcactgttcctgcaggctcttactctgctttcctcatactcacaattctcctcttcacttcccttaacgagagagtctttgttcctttaacaagaaggctcacaaaaaagcctcaaggaatcacaagcctacagagaatcggagtagggctagtattctcaatggctgcaatggctgtagccgcggttatagagaacgctagacgcgaggcagcggttaacaacgataagaaaataagcgcgttttggttggttccacaatatttcttagtcggtgcgggtgaggcctttgcttacgttggacagcttgagttctttataagagaagcaccagagaggatgaaatcgatgagcaccggattgtttctaagcacgatatcgatgggattcttcgtgagtagcttgcttgtttcgcttgttgatagggttacagacaaaagctggcttagaagtaaccttaacaaagcgagattgaactacttctactggttacttgttgtcttgggagcattgaacttcttgatttttattgtgtttgccatgaaacatcagtataaagctgatgtgattactgttgttgtgactgatgatgattcagtggagaaggaagtgacgaagaaagagagctctgaatttgagcttaaggacattccttgaaaccagatttagaagaagaaaaaaaacctctggttttgttatttgctttgaagatttcattttgtctttgtatttttagtatattgtgtgtatgaaatagaaagattactatatggtttggattgtatttttttttgtaagatttttaaaaatttagttactatagtttttg

SEQ ID NO: 2379 - protein, 590 aa, Arabidopsis thaliana
MVHVSSSHGAKDGSEEAYDYRGNPPDKSKTGGWLGAGLILGSELSERICVMGISMNLVTYLVGDLHISSAKSATIVTNFMGTLNLLGLLGGFLADAKLGRYKMVAISASVTALGVLLLTVATTISSMRPPICDDFRRLHHQCIEANGHQLALLYVALYTIALGGGGIKSNVSGFGSDQFDTSDPKEEKQMIFFFNRFYFSISVGSLFAVIALVYVQDNVGRGWGYGISAATMVVAAIVLLCGTKRYRFKKPKGSPFTTIWRVGFLAWKKRKESYPAHPSLLNGYDNTTVPHTEMLKCLDKAAISKNESSPSSKDFEEKDPWIVSTVTQVEEVKLVMKLVPIWATNILFWTIYSQMTTFTVEQATFMDRKLGSFTVPAGSYSAFLILTILLFTSLNERVFVPLTRRLTKKPQGITSLQRIGVGLVFSMAAMAVAAVIENARREAAVNNDKKISAFWLVPQYFLVGAGEAFAYVGQLEFFIREAPERMKSMSTGLFLSTISMGFFVSSLLVSLVDRVTDKSWLRSNLNKARLNYFYWLLVVLGALNFLIFIVFAMKHQYKADVITVVVTDDDSVEKEVTKKESSEFELKDIP

SEQ ID NO: 2380 - protein, 540 aa, Arabidopsis thaliana
MGISMNLVTYLVGDLHISSAKSATIVTNFMGTLNLLGLLGGFLADAKLGRYKMVAISASVTALGVLLLTVATTISSMRPPICDDFRRLHHQCIEANGHQLALLYVALYTIALGGGGIKSNVSGFGSDQFDTSDPKEEKQMIFFFNRFYFSISVGSLFAVIALVYVQDNVGRGWGYGISAATMVVAAIVLLCGTKRYRFKKPKGSPFTTIWRVGFLAWKKRKESYPAHPSLLNGYDNTTVPHTEMLKCLDKAAISKNESSPSSKDFEEKDPWIVSTVTQVEEVKLVMKLVPIWATNILFWTIYSQMTTFTVEQATFMDRKLGSFTVPAGSYSAFLILTILLFTSLNERVFVPLTRRLTKKPQGITSLQRIGVGLVFSMAAMAVAAVIENARREAAVNNDKKISAFWLVPQYFLVGAGEAFAYVGQLEFFIREAPERMKSMSTGLFLSTISMGFFVSSLLVSLVDRVTDKSWLRSNLNKARLNYFYWLLVVLGALNFLIFIVFAMKHQYKADVITVVVTDDDSVEKEVTKKESSEFELKDIP

SEQ ID NO: 2381 - protein, 536 aa, Arabidopsis thaliana
MNLVTYLVGDLHISSAKSATIVTNFMGTLNLLGLLGGFLADAKLGRYKMVAISASVTALGVLLLTVATTISSMRPPICDDFRRLHHQCIEANGHQLALLYVALYTIALGGGGIKSNVSGFGSDQFDTSDPKEEKQMIFFFNRFYFSISVGSLFAVIALVYVQDNVGRGWGYGISAATMVVAAIVLLCGTKRYRFKKPKGSPFTTIWRVGFLAWKKRKESYPAHPSLLNGYDNTTVPHTEMLKCLDKAAISKNESSPSSKDFEEKDPWIVSTVTQVEEVKLVMKLVPIWATNILFWTIYSQMTTFTVEQATFMDRKLGSFTVPAGSYSAFLILTILLFTSLNERVFVPLTRRLTKKPQGITSLQRIGVGLVFSMAAMAVAAVIENARREAAVNNDKKISAFWLVPQYFLVGAGEAFAYVGQLEFFIREAPERMKSMSTGLFLSTISMGFFVSSLLVSLVDRVTDKSWLRSNLNKARLNYFYWLLVVLGALNFLIFIVFAMKHQYKADVITVVVTDDDSVEKEVTKKESSEFELKDIP

SEQ ID NO: 2382 - DNA, 1831 bp, Arabidopsis thaliana
tgaggccattctcttttctcctctctctctctctcacacaacacaaacaactcttgagagagagaaacaaatctttcacttgacacttctctccaaatcctcatctcattcttcatcctaaacatttgctcattctcacgatgagccataaccaaaaccaacctcaccggccagtcccggtccatgtcacaaacgccgagccaaaccctaacccaaacaacctcccaaactttctattatccgtccgtctcaaatacgtaaaactcggttaccactacctaatctccaacgctctctacatcctcctccttcctctcctcgccgcaacaatcgctaacctctcttctttcaccatcaacgacctctctctcctctacaacacactccgtttccatttcctctccgccacactcgccaccgcactcttaatctctctctccaccgcttacttcaccacccgtccccgccgtgtcttcctcctcgacttctcgtgttacaaaccagacccttcactgatctgcactcgtgaaacattcatggacagatctcaacgtgtaggcatcttcacagaagacaacttagctttccaacaaaagatcctcgaaagatccggtctaggtcagaaaacttacttccctgaagctcttcttcgtgttcctcctaatccttgtatggaagaagcgagaaaagaggcagaaacagttatgttcggagctattgacgcggttcttgagaagaccggtgtgaaacctaaagatattggaatccttgtggtgaattgtagcttgtttaatccaacaccgtcactttctgctatgattgtgaataagtataagcttagaggcaacattttgagctataatcttggtggaatgggatgtagtgctggccttatctccattgatctcgctaaacagatgcttcaggtgcaaccaaactcatacgcactagtggtgagcacagagaacataaccctaaactggtacttaggcaacgaccgatcaatgcttctatctaactgtatcttccgtatgggcggagccgcggtacttctctcgaaccgctcctctgatcgcagccgttcaaaatatcagctcatccataccgtccgtacccacaaaggagctgatgacaacgcatttggctgtgtttaccaacgagaagacaacaacgcagaagaaaccggcaaaatcggagtgtccctctctaaaaacctaatggcgatagctggagaagctctcaagacaaacatcacaactctcggaccactagttctaccaatgtccgaacaacttctctttttcgcgactcttgtggcccgaaaagtcttcaaagtcaagaaaataaagccttacattcctgatttcaagctagctttcgagcatttctgtatccacgcgggaggtagagccgtgctcgacgagattgagaagaacttggatttatccgaatggcacatggagccatcgaggatgacgttgaaccggtttggtaacacttcgagtagctcactttggtatgagcttgcgtatagtgaagctaaaggaaggattaagagaggagataggacttggcagattgcttttggatcgggttttaagtgtaatagtgcagtttggaaagctttgagaacgattgatccaatggacgagaagactaatccatggattgatgagattgatgactttcctgttcaagttcctaggatcactcccattacatcgtcgtagtgttttaaattcttttggagaactaatttgttatgttttattaaatgtaataacttacgtgatttgatatttttttattatcttaatatatatgattgccg

SEQ ID NO: 2383 - protein, 529 aa, Arabidopsis thaliana [sequence omitted]

SEQ ID NO: 2384 - protein, 397 aa, Arabidopsis thaliana
MDRSQRVGIFTEDNLAFQQKILERSGLGQKTYFPEALLRVPPNPCMEEARKEAETVMFGAIDAVLEKTGVKPKDIGILVVNCSLFNPTPSLSAMIVNKYKLRGNILSYNLGGMGCSAGLISIDLAKQMLQVQPNSYALVVSTENITLNWYLGNDRSMLLSNCIFRMGGAAVLLSNRSSDRSRSKYQLIHTVRTHKGADDNAFGCVYQREDNNAEETGKIGVSLSKNLMAIAGEALKTNITTLGPLVLPMSEQLLFFATLVARKVFKVKKIKPYIPDFKLAFEHFCIHAGGRAVLDEIEKNLDLSEWHMEPSRMTLNRFGNTSSSSLWYELAYSEAKGRIKRGDRTWQIAFGSGFKCNSAVWKALRTIDPMDEKTNPWIDEIDDFPVQVPRITPITSS

SEQ ID NO: 2385 - protein, 352 aa, Arabidopsis thaliana
MEEARKEAETVMFGAIDAVLEKTGVKPKDIGILVVNCSLFNPTPSLSAMIVNKYKLRGNILSYNLGGMGCSAGLISIDLAKQMLQVQPNSYALVVSTENITLNWYLGNDRSMLLSNCIFRMGGAAVLLSNRSSDRSRSKYQLIHTVRTHKGADDNAFGCVYQREDNNAEETGKIGVSLSKNLMAIAGEALKTNITTLGPLVLPMSEQLLFFATLVARKVFKVKKIKPYIPDFKLAFEHFCIHAGGRAVLDEIEKNLDLSEWHMEPSRMTLNRFGNTSSSSLWYELAYSEAKGRIKRGDRTWQIAFGSGFKCNSAVWKALRTIDPMDEKTNPWIDEIDDFPVQVPRITPITSS

SEQ ID NO: 2386 - DNA, 1172 bp, Arabidopsis thaliana
aaatataaacacctatgattcacttaaatcgatcacaatctacttacttttgaagtaactatagtaagattgatcagcaagcaaaatatggctcaaaaggttgaagcaaaaggagggaaaggaggcaaccaatgggacgatggatccgatcatgacgccgtgaccaagattcaggttgcagtaggcggaatgggaattcaatacattcagttcgattacgtcaagaacggacaaaccgaacaaactcctcttcgtggtatcaaaggcagtaccattccaactgatccgtttgtgattaaccatcctgaggagcatctagtttctattgaaatttggtataaacctgatggtcttattcaagggcttaggttcatatccaacaaaaagacttctcgtttcattggatacgatcgtggtactagatcatttctccaagttcaagacaagaagatcattggctttcatgggtctgccggagacaatcttaattctcttggagcttactttgctccgttgactatcccattgactcctgccaagccgctaccggcacttggtagtgatgatggaacagcatgggatgatggtgcttacgttggggttaagaaggtgtacgtaggacaagcccaagatggtatatcggctgttaagtttgtatacgacaaaagccctgaggaggtcacaggagaagaacatggaaagagtactctactcggattcgaagagttcgtacttgactatccaagtgaatacatcatcgcagtcgaaggcacctacgataaaatctttgggagtgatggctcagtcataactatgcttaggttcaagactaataagcaaacgtcccctccctttggacttgaagctggcactgccttcgaactcaaagaggaaggccacaaaatcgttggcttccatggaagagccgatgctttgctccacaaaattggagttcatgtccgtcccgtttccaactgaccatgaagatctttatctttgattccatggagatctttatctttatcttataaattggtcatttgaggtctcttcatgcctctggtgacctctgataagtgttttaacttttaagtgttgtatcttgtgttgccggtttttctttgatgtggttgtgttccattttaattaaggaagtttgtttcatctcttct

SEQ ID NO: 2387 - protein, 296 aa, Arabidopsis thaliana
MAQKVEAKGGKGGNQWDDGSDHDAVTKIQVAVGGMGIQYIQFDYVKNGQTEQTPLRGIKGSTIPTDPFVINHPEEHLVSIEIWYKPDGLIQGLRFISNKKTSRFIGYDRGTRSFLQVQDKKIIGFHGSAGDNLNSLGAYFAPLTIPLTPAKPLPALGSDDGTAWDDGAYVGVKKVYVGQAQDGISAVKFVYDKSPEEVTGEEHGKSTLLGFEEFVLDYPSEYIIAVEGTYDKIFGSDGSVITMLRFKTNKQTSPPFGLEAGTAFELKEEGHKIVGFHGRADALLHKIGVHVRPVSN

SEQ ID NO: 2388 - protein, 262 aa, Arabidopsis thaliana
MGIQYIQFDYVKNGQTEQTPLRGIKGSTIPTDPFVINHPEEHLVSIEIWYKPDGLIQGLRFISNKKTSRFIGYDRGTRSFLQVQDKKIIGFHGSAGDNLNSLGAYFAPLTIPLTPAKPLPALGSDDGTAWDDGAYVGVKKVYVGQAQDGISAVKFVYDKSPEEVTGEEHGKSTLLGFEEFVLDYPSEYIIAVEGTYDKIFGSDGSVITMLRFKTNKQTSPPFGLEAGTAFELKEEGHKIVGFHGRADALLHKIGVHVRPVSN

SEQ ID NO: 2389 - DNA, 1279 bp, Arabidopsis thaliana
atctctctctctaccaagtacagaatttcccgctctagggcatatgtctgatccaatccgaaattgaaaactcatgaatcactccaatcttgccaatccaacagtctccctcaccgtaaccctaatccccaaacacccaattcgtcatctcacatctccaattcctaaccggaactttacaaaccctaagcttctcttcccgctccggcttaatgagactccttcctcctctctcgccgcgaaaagggttttcattgtcagagccaccgtcgacggagacggtaaaaccggtaattgggtgaaccggttaccaattccaggacttggagccgaaaacgtcttcagattgatttcaagcgccaccggaagtcccatcggacaattcatatcgtctcctgtgacatttctccactcggtggatcccagaatcaaattggtatggctattaactctagtagttcttccagcaagagcaaatctagttgtgcgtttaggacttgttctatgcacagctcttttgtcaatccttgttctcccaagacaagtttggatagatcaattggcgagagtgtcgcttctttcgggtattctcttcataacattggggctaggttcagatggtgcacctccaatgcttcaatcaagaacaccaccatcttcaatcacaagcttgcctaatcttcccatgtctttaagcggttattcgtacatgttactgaagcttggtcctttgcaattcacaaggaaaggtttgtctgttggaagcacagccgcatgcttaacctttattatcttccaaagtgctagtatttgccttgcaacaacaacaccagagcaacttgcactagctctacgttggttcttgttcccattgacatatattggtgttccagtcagtgaaattatcctcacgctactgctttcactgagattcattaatttggttttcgatgaggtccgaagtgtttcactgggaattgtatcgcgaagagtaaactggcagcagcttactgttctggagacacttgatattttcgcgtcattcatacgccgcatcttcaagaatatatttcgtcatgccgaacaaatatcacaggccatgattgttagaggcttcagaggagagagcagtagccacaagatctacttcttctctggctcttcgaataagtttgcagattttgcatcagttttgtgtttaatcggtgtaatctcaaccgcactcttgtctgaatactttcttgtctaatattgattcatactaatctttattcgagct

SEQ ID NO: 2390 - protein, 391 aa, Arabidopsis thaliana
MNHSNLANPTVSLTVTLIPKHPIRHLTSPIPNRNFTNPKLLFPLRLNETPSSSLAAKRVFIVRATVDGDGKTGNWVNRLPIPGLGAENVFRLISSATGSPIGQFISSPVTFLHSVDPRIKLVWLLTLVVLPARANLVVRLGLVLCTALLSILVLPRQVWIDQLARVSLLSGILFITLGLGSDGAPPMLQSRTPPSSITSLPNLPMSLSGYSYMLLKLGPLQFTRKGLSVGSTAACLTFIIFQSASICLATTTPEQLALALRWFLFPLTYIGVPVSEIILTLLLSLRFINLVFDEVRSVSLGIVSRRVNWQQLTVLETLDIFASFIRRIFKNIFRHAEQISQAMIVRGFRGESSSHKIYFFSGSSNKFADFASVLCLIGVISTALLSEYFLV

SEQ ID NO: 2391 - protein, 205 aa, Arabidopsis thaliana
MLQSRTPPSSITSLPNLPMSLSGYSYMLLKLGPLQFTRKGLSVGSTAACLTFIIFQSASICLATTTPEQLALALRWFLFPLTYIGVPVSEIILTLLLSLRFINLVFDEVRSVSLGIVSRRVNWQQLTVLETLDIFASFIRRIFKNIFRHAEQISQAMIVRGFRGESSSHKIYFFSGSSNKFADFASVLCLIGVISTALLSEYFLV

SEQ ID NO: 2392 - DNA, 1184 bp, Arabidopsis thaliana
cgttgttggtactgattctttctgtgactgccaaaagatctttttcagggttgcagagaggacagtctctctcgtttagagcaagtgtatcttcttatagagttgctctgatgcttattacatgcttgtgtatcttggctgttgactttactatctttcccagaaggtatgccaagacagagacttatggtactagcttgatggatcttggggttggctcttttgtgttggctaatgctgttgtttctcggcaagctagagacgtctcatcaggaaactggataactggaattaaagcaaccgctccattgctattactcgggtttattcgtcttgttaccacttcaggtgtggattatcaggtccacgttacggaatatggagtacactggaatttctttttcacacttgcagccatatcaattctcacatcgtttgttaacataccagccaagtactgtggactcctaggtttcgctgttcttgcagggtaccaaacttggttgcttagtggactgaacacatatttgctttcggacgaaagaggaactgacattatcagcaaaaacaaggaaggagtatatagcattcttggttattggggcatgtaccttcttggcgttcacttaggttatcgtctcttttacggaaaacatacaaatattcgaagcaccacgagctcaatcgctagagtctttctcgtttctcttctcttatggattgtaactatactttttgacaactacgttgagaggatctcccgtcgaacgtgtaacatgccttacgttacttgggtgcttgcgcaagatcttcaggcgttggggatatttatgctgtctagttacatacctctgaacaagctttcatcacttgaagaagcaattgaccaaaatctgttagcaacctttctgcttgcaaaccttgttacaggaatggtgaacctcaccgtagataccatctttgcttctccattctcttctcttctgatattaaccgcttacgcctttgctttatctgctattatcggaaccattcatttctccggtttccggttaaagttctggtaaaaaaagatagctcacaacatctaaactgacactagctttggattctgatatgattgtgtggcatatgagcagagaagttaaagacagttttgtgaagtatgaatctttcttctgtgc

SEQ ID NO: 2393 - protein, 354 aa, Arabidopsis thaliana
LLVLILSVTAKRSFSGLQRGQSLSFRASVSSYRVALMLITCLCILAVDFTIFPRRYAKTETYGTSLMDLGVGSFVLANAVVSRQARDVSSGNWITGIKATAPLLLLGFIRLVTTSGVDYQVHVTEYGVHWNFFFTLAAISILTSFVNIPAKYCGLLGFAVLAGYQTWLLSGLNTYLLSDERGTDIISKNKEGVYSILGYWGMYLLGVHLGYRLFYGKHTNIRSTTSSIARVFLVSLLLWIVTILFDNYVERISRRTCNMPYVTWVLAQDLQALGIFMLSSYIPLNKLSSLEEAIDQNLLATFLLANLVTGMVNLTVDTIFASPFSSLLILTAYAFALSAIIGTIHFSGFRLKFW

SEQ ID NO: 2394 - protein, 318 aa, Arabidopsis thaliana
MLITCLCILAVDFTIFPRRYAKTETYGTSLMDLGVGSFVLANAVVSRQARDVSSGNWITGIKATAPLLLLGFIRLVTTSGVDYQVHVTEYGVHWNFFFTLAAISILTSFVNIPAKYCGLLGFAVLAGYQTWLLSGLNTYLLSDERGTDIISKNKEGVYSILGYWGMYLLGVHLGYRLFYGKHTNIRSTTSSIARVFLVSLLLWIVTILFDNYVERISRRTCNMPYVTWVLAQDLQALGIFMLSSYIPLNKLSSLEEAIDQNLLATFLLANLVTGMVNLTVDTIFASPFSSLLILTAYAFALSAIIGTIHFSGFRLKFW

SEQ ID NO: 2395 - protein, 288 aa, Arabidopsis thaliana
MDLGVGSFVLANAVVSRQARDVSSGNWITGIKATAPLLLLGFIRLVTTSGVDYQVHVTEYGVHWNFFFTLAAISILTSFVNIPAKYCGLLGFAVLAGYQTWLLSGLNTYLLSDERGTDIISKNKEGVYSILGYWGMYLLGVHLGYRLFYGKHTNIRSTTSSIARVFLVSLLLWIVTILFDNYVERISRRTCNMPYVTWVLAQDLQALGIFMLSSYIPLNKLSSLEEAIDQNLLATFLLANLVTGMVNLTVDTIFASPFSSLLILTAYAFALSAIIGTIHFSGFRLKFW

SEQ ID NO: 2396 - DNA, 821 bp, Arabidopsis thaliana
attttggtcaaaccattatctcgaagtcgtctctgtagaactaatggagccgcctgaagatgggaaggttaatttcgccaaagagctttatggagaaagtttgcagatttcgaaacttagtaataaagatcatggtcttgagaatttagatgatcccttttacggaagttcagatgaagattatagtgaagctcgcgtgttggacaatgagaatgagcagagacgtgtgaaattccactcggctggatatcgtgatgggattgttgccgggaaagacgctattgcgcaggaaggttataactttggctataaggaatcagttcttgctggttacaagtttggtattgttagaggtgtttccagtgcgctggctttcctcccggttgagcttagagaaaagcttatcgatgaacaagaaactatagagaagtttcagaaattacacagttctgtgcatactctttctacggaagtcgcaatgaagcggttctatgaaactttgactacgaaacaaggggaagagaagagtggagaagaagggcccgactcttgttctgtttcaggttcttgttcaggtgttaatgtcacagccgacttaggaagctatgttactgagctaagttctcttcttgacaaatctccaacgattgaagtgaaatttgatacatagacgaggcttgttcagtagacgttattcacaagcaaaagcaagattagcgtccagtttccaaaaactgtttgtaagctcggttctgcctcagcgagtagcgacggctaaatcatgctttctgcctcggcaatttcattcaaccttctctacc

SEQ ID NO: 2397 - protein, 222 aa, Arabidopsis thaliana
FWSNHYLEVVSVELMEPPEDGKVNFAKELYGESLQISKLSNKDHGLENLDDPFYGSSDEDYSEARVLDNENEQRRVKFHSAGYRDGIVAGKDAIAQEGYNFGYKESVLAGYKFGIVRGVSSALAFLPVELREKLIDEQETIEKFQKLHSSVHTLSTEVAMKRFYETLTTKQGEEKSGEEGPDSCSVSGSCSGVNVTADLGSYVTELSSLLDKSPTIEVKFDT

SEQ ID NO: 2398 - protein, 208 aa, Arabidopsis thaliana
MEPPEDGKVNFAKELYGESLQISKLSNKDHGLENLDDPFYGSSDEDYSEARVLDNENEQRRVKFHSAGYRDGIVAGKDAIAQEGYNFGYKESVLAGYKFGIVRGVSSALAFLPVELREKLIDEQETIEKFQKLHSSVHTLSTEVAMKRFYETLTTKQGEEKSGEEGPDSCSVSGSCSGVNVTADLGSYVTELSSLLDKSPTIEVKFDT

SEQ ID NO: 2399 - DNA, 828 bp, Arabidopsis thaliana
caattaaccaccgaatcaaacggtataaatttgtaaacgtggtccaaaatgcacgatataagatgatgatgatgatgataagctgaattattcaacatcaatggcgaacgagaaagctcaagaaatggcgaatctatcttctcaaatctgcaaccaaatctcatctgtcttcacaaaaccaacctcaccatatccaccaccgctcgatctcctagtaacagagcttaccgcaatctcccgcaaccgcaacaactctcgtatcttcctctacggtgttggacgcgaaggtctaatgctaaaagccttcgcgatgcgtctcttccactttggtctccccactcacttagtcttcgacatgacaacacctccaatctcatcttctgatctcttaatcgcttcagctggtcctggaggattctcaaccgtcgatgcgctttgctctgtagctaaatcgaacggtgctaaggttatacttattactgcagagccagcgataggttcttgtgtgaaacatgcaacggatgtctgttatgtacctgctcagactatggcgagtgataacggtggtggtgattcggtggaaatgggagagagacgtttattgccgatggggagtgtatatgaaggagctttgtttgtgttgtttgagatggttgtttacaagttgggtgaggttttgggtgagtcttctgagtcggtacgtgctcgtcatactaatcttgagtgacgtagcaattttgagtagcatgtgctgttgttttggtatttcgcttgagaaatggctgctgttctactacaaattgtttatatctatatatacatttttgc

SEQ ID NO: 2400 - protein, 208 aa, Arabidopsis thaliana
MANEKAQEMANLSSQICNQISSVFTKPTSPYPPPLDLLVTELTAISRNRNNSRIFLYGVGREGLMLKAFAMRLFHFGLPTHLVFDMTTPPISSSDLLIASAGPGGFSTVDALCSVAKSNGAKVILITAEPAIGSCVKHATDVCYVPAQTMASDNGGGDSVEMGERRLLPMGSVYEGALFVLFEMVVYKLGEVLGESSESVRARHTNLE

SEQ ID NO: 2401 - protein, 200 aa, Arabidopsis thaliana
MANLSSQICNQISSVFTKPTSPYPPPLDLLVTELTAISRNRNNSRIFLYGVGREGLMLKAFAMRLFHFGLPTHLVFDMTTPPISSSDLLIASAGPGGFSTVDALCSVAKSNGAKVILITAEPAIGSCVKHATDVCYVPAQTMASDNGGGDSVEMGERRLLPMGSVYEGALFVLFEMVVYKLGEVLGESSESVRARHTNLE

SEQ ID NO: 2402 - protein, 144 aa, Arabidopsis thaliana
MLKAFAMRLFHFGLPTHLVFDMTTPPISSSDLLIASAGPGGFSTVDALCSVAKSNGAKVILITAEPAIGSCVKHATDVCYVPAQTMASDNGGGDSVEMGERRLLPMGSVYEGALFVLFEMVVYKLGEVLGESSESVRARHTNLE

SEQ ID NO: 2403 - DNA, 834 bp, Arabidopsis thaliana
gctctttatctctctctccaactttacctttaacaaaaaaaaaatggcaagcgcgaatccagaaaccgccaaacccacgcctgcaacggtggacatggctaatccagaggagcttaagaaagttttcgaccagtttgactccaacggcgacggcaagatctcagtcctcgaactcggcggtgtgtttaaggctatggggacttcctacacagagacggaactcaaccgcgtgctcgaagaagtcgatacagatcgcgacggttacatcaacctcgacgaattctcaactctctgtcgctcgtcttcctccgccgcagagatccgtgacgctttcgatctctacgatcaggacaaaaacggactgatctccgcctctgagcttcaccaggtgcttaaccgtctcgggatgtcttgctctgttgaagactgtactcgtatgatcggacctgtggatgctgacggcgatgggaatgttaatttcgaagagtttcagaagatgatgacgtcgtcttctctcctcaacagcaatggatccgccgctcctccttcgacctagggagttttccagatttcagatctggatttcgggaataagaataactatggaaattaggtactcttttcttcttaaatgtgatcaatcatcatcagtctaacttcaatcggatctcttttcattcatacatggttgagatttagatctgaatatggatatatatcgtttgctctccttgttcaaaacaaatttggtttctaatttcttattctgcattctcgagttatgtatcagtttcgaactatatttgcatagaaacaaaaaccagattctctgcc

SEQ ID NO: 2404 - protein, 184 aa, Arabidopsis thaliana
LFISLSNFTFNKKKMASANPETAKPTPATVDMANPEELKKVFDQFDSNGDGKISVLELGGVFKAMGTSYTETELNRVLEEVDTDRDGYINLDEFSTLCRSSSSAAEIRDAFDLYDQDKNGLISASELHQVLNRLGMSCSVEDCTRMIGPVDADGDGNVNFEEFQKMMTSSSLLNSNGSAAPPST

SEQ ID NO: 2405 - protein, 170 aa, Arabidopsis thaliana
MASANPETAKPTPATVDMANPEELKKVFDQFDSNGDGKISVLELGGVFKAMGTSYTETELNRVLEEVDTDRDGYINLDEFSTLCRSSSSAAEIRDAFDLYDQDKNGLISASELHQVLNRLGMSCSVEDCTRMIGPVDADGDGNVNFEEFQKMMTSSSLLNSNGSAAPPST

SEQ ID NO: 2406 - protein, 153 aa, Arabidopsis thaliana
MANPEELKKVFDQFDSNGDGKISVLELGGVFKAMGTSYTETELNRVLEEVDTDRDGYINLDEFSTLCRSSSSAAEIRDAFDLYDQDKNGLISASELHQVLNRLGMSCSVEDCTRMIGPVDADGDGNVNFEEFQKMMTSSSLLNSNGSAAPPST

SEQ ID NO: 2407 - DNA, 575 bp, Arabidopsis thaliana
aaaaatcttcacattgcacgtaaaaaatatctttatacaatgaacggcatgagtggatcgtctccggcggctccggctccttcaccatcatcgttcttccaacatcgccaccgtcacggtggtatgatgcatatgactttcttttgggtaaaaaacacggaggttctattcgacggatggccagggaccagtctgaaaatgtattgggtctgtctcgccgtcatttttgttatttccgctttctccgagtgtctatcgcggtgcggtttcatgaaatccggtccggctagcttgggaggcgggctattacagactgcggtttacaccgtgagggctgctttgtcttatttggtcatgctggctgtgatgtcgttcaatggaggagtcttcgtggctgcgatggctggttttggattagggtttatgatttttggaagtagggcttttagggccactagcagtaacagtcacaccgaggttcaatcacattgttgatttttgtcttagatcgtttttattttccttgtttcccgttgaaataatgattaggaaaataaaaaaattcacgtttttgg

SEQ ID NO: 2408 - protein, 164 aa, Arabidopsis thaliana
KNLHIARKKYLYTMNGMSGSSPAAPAPSPSSFFQHRHRHGGMMHMTFFWVKNTEVLFDGWPGTSLKMYWVCLAVIFVISAFSECLSRCGFMKSGPASLGGGLLQTAVYTVRAALSYLVMLAVMSFNGGVFVAAMAGFGLGFMIFGSRAFRATSSNSHTEVQSHC

SEQ ID NO: 2409 - protein, 151 aa, Arabidopsis thaliana
MNGMSGSSPAAPAPSPSSFFQHRHRHGGMMHMTFFWVKNTEVLFDGWPGTSLKMYWVCLAVIFVISAFSECLSRCGFMKSGPASLGGGLLQTAVYTVRAALSYLVMLAVMSFNGGVFVAAMAGFGLGFMIFGSRAFRATSSNSHTEVQSHC

SEQ ID NO: 2410 - protein, 148 aa, Arabidopsis thaliana
MSGSSPAAPAPSPSSFFQHRHRHGGMMHMTFFWVKNTEVLFDGWPGTSLKMYWVCLAVIFVISAFSECLSRCGFMKSGPASLGGGLLQTAVYTVRAALSYLVMLAVMSFNGGVFVAAMAGFGLGFMIFGSRAFRATSSNSHTEVQSHC

SEQ ID NO: 2411 - DNA, 1014 bp, Arabidopsis thaliana
aactaattaaagtttttggtttggtaagagttgcgaaacgataaccaataataaatgggagacatcattatctctttttctaaatctctccaatggcgtctcttcgtagcctttcgatttggttcttcttcttcttcgtcttcgtcttcttaatcaatccctccatttctattcgaacttccttcatcaagcttcccggaagcgacggatctcgctactgcgacagctggagattagccgccgagaccaataacgtcggaacttgggatctgattccgtcaatctgcgtggattccgtcgccgagtatcttaacggagaccagtttttatccgattacagtgtcatcgtcgattatgctctcgcgtttgcgaaatcggttgaaatttccggcgacggcaaggacgtgtggatcttcgatatcgacgagacgcttctcacgaatattgactactacaaggctcatggttacgggtctgaaccgtatgacgataataaatttagtgagtgggtggaacaaggaacagctccagcttttgatgcgagcttgagactgtacaatgctctcaagaaacttggtttcactatcattttgctaaccggtcgggacgagcatcaaaggacttccaccgagacaaatctccgggatgccggttattccggttgggaacgtctcctcttgagaggtccaaatgatcaagggaagtcagctacaaattacaaatccgagcagcgatcgaaactgattgaggaaggtttcaaaatccgtggcaatagcggtgatcaatggagtgacttgcaaggttttgccgtggctgatcgttctttcaaagtcccaaatcccatgtactacattccttgatcactattcatttctgattttatgtattgagtaacaaccacttatgtgttttagacgttaatattacctttgctcctatattacattgatctttagtataaacattaactaatactttcatataaagtataattataattgctttgtatcttcc

SEQ ID NO: 2412 - protein, 255 aa, Arabidopsis thaliana
MASLRSLSIWFFFFFVFVFLINPSISIRTSFIKLPGSDGSRYCDSWRLAAETNNVGTWDLIPSICVDSVAEYLNGDQFLSDYSVIVDYALAFAKSVEISGDGKDVWIFDIDETLLTNIDYYKAHGYGSEPYDDNKFSEWVEQGTAPAFDASLRLYNALKKLGFTIILLTGRDEHQRTSTETNLRDAGYSGWERLLLRGPNDQGKSATNYKSEQRSKLIEEGFKIRGNSGDQWSDLQGFAVADRSFKVPNPMYYIP

SEQ ID NO: 2413 - DNA, 988 bp, Arabidopsis thaliana
attttctctcactttctctctcagcttacgaacaagaaaaaaagaagaatctttagccacctttgagatcaaaagatgaacatcgctcacactatcttcggcgttttcggaaatgcaactgctctgtttcttttcttggctccttcgataacattcaagagaatcatcaagaacaaatccactgaacaattctctggtatcccttatccaatgactctcctcaactgtctcctctctgcttggtatggacttccctttgtgtcaaaagacaacacacttgtgagcacaatcaatggcacaggagcagtgatcgaaacagtctacgtgttaatctttcttttctacgcaccaaagaaggagaaaattaagatctttggtatcttctcttgcgttttggctgtattcgcaacagtagctctcgtctctctctttgctcttcaaggaaacggtagaaaactcttttgtggtctcgcagctactgttttctccatcatcatgtacgcttctccactctccatcatgagattggtggtaaagacgaagagtgtagagtttatgccattctttttgtcactctttgtcttcctctgtggtacttcgtggttcgtctatggtctaatcggtcgtgacccttttgttgcaatcccaaatgggtttggatgtgcattagggacactgcaattgatactatacttcatctactgtggaaacaaaggagagaaatctgcagatgctcagaaagatgagaagtcagtggagatgaaagatgatgagaagaagcagaatgtggttaatggaaagcaagaccttcaagtttaaaagagcttttgaggatgatttggttatgtgatttcgtattaactctgcttaactagagttttccttttcgtttcgttggaatgtaaaaaaaatgatgctgaaaaatgtaacgtttcctagtttcgtactgatacactagtgattgatgaagaatgacgatgccttttgt

SEQ ID NO: 2414 - protein, 247 aa, Arabidopsis thaliana
MNIAHTIFGVFGNATALFLFLAPSITFKRIIKNKSTEQFSGIPYPMTLLNCLLSAWYGLPFVSKDNTLVSTINGTGAVIETVYVLIFLFYAPKKEKIKIFGIFSCVLAVFATVALVSLFALQGNGRKLFCGLAATVFSIIMYASPLSIMRLVVKTKSVEFMPFFLSLFVFLCGTSWFVYGLIGRDPFVAIPNGFGCALGTLQLILYFIYCGNKGEKSADAQKDEKSVEMKDDEKKQNVVNGKQDLQV

SEQ ID NO: 2415 - protein, 202 aa, Arabidopsis thaliana
MTLLNCLLSAWYGLPFVSKDNTLVSTINGTGAVIETVYVLIFLFYAPKKEKIKIFGIFSCVLAVFATVALVSLFALQGNGRKLFCGLAATVFSIIMYASPLSIMRLVVKTKSVEFMPFFLSLFVFLCGTSWFVYGLIGRDPFVAIPNGFGCALGTLQLILYFIYCGNKGEKSADAQKDEKSVEMKDDEKKQNVVNGKQDLQV

SEQ ID NO: 2416 - DNA, 1127 bp, Arabidopsis thaliana
attttggtgacagtctgttgtttgtttcactcgtggctcctctcccacctctttcttcttcttcttctacatctcttcccatctgtctctcatagatccatccatggcttccttcgtggaatctggttggcagtaccttgtgacacattttagcgactttcaactggcatgtattgggagttttctcctccatgaaagcgtgtttttcttatctggactccctttcatttttcttgaaaggcaaggctttctcagcaagtacaaaattcagacaaaaaaataacacacctgcagcccaaggaaaatgtattactcgcctgttgctttatcatttctccgtaaacttgcccctgatgttggcctcctaccctgtcttccgagccatgggaatgcgaagcagttttcctctgccgtcctggaaagaagtgtctgcccagatattattctactttatcattgaggattttgtcttctattggggtcatcggatcttgcattcaaaatggctgtacaagaacgtgcatagtgtgcatcatgaatatgccacaccatttggtttgacatcagaatatgctcaccccgctgagattctatttctgggttttgctaccatagtcggtccagctcttactggccctcacctaattactctctggttatggatggtgttgagagtgctggagacagttgaggcacattgtggttatcatttcccatggagcctctcaaattttcttcctctgtatggaggtgctgacttccatgactaccatcaccgactgctatacacaaagtccggaaactactcttcaacttttgtgtatatggactggatctttggtactgacaaggggtacagaagactgaagacccttaaagaaaacggtgacatgaaacaaacgtgaaattgccactttggattgcagagtacatttgtcttagagaggtcttattctgcaacctctccttttctttaacattttgctttcaggttgctgcaacgctcatgtgtcttagtttattatgtctgactagaattgctgctcgtgtggcctatttgaaaaaacatatggtacttcaactcagtatgtgtttaggttgggcaattaaaacattttgtatgggtc

SEQ ID NO: 2417 - protein, 237 aa, Arabidopsis thaliana
MKACFSYLDSLSFFLKGKAFSASTKFRQKNNTPAAQGKCITRLLLYHFSVNLPLMLASYPVFRAMGMRSSFPLPSWKEVSAQILFYFIIEDFVFYWGHRILHSKWLYKNVHSVHHEYATPFGLTSEYAHPAEILFLGFATIVGPALTGPHLITLWLWMVLRVLETVEAHCGYHFPWSLSNFLPLYGGADFHDYHHRLLYTKSGNYSSTFVYMDWIFGTDKGYRRLKTLKENGDMKQT

SEQ ID NO: 2418 - protein, 183 aa, Arabidopsis thaliana
MLASYPVFRAMGMRSSFPLPSWKEVSAQILFYFIIEDFVFYWGHRILHSKWLYKNVHSVHHEYATPFGLTSEYAHPAEILFLGFATIVGPALTGPHLITLWLWMVLRVLETVEAHCGYHFPWSLSNFLPLYGGADFHDYHHRLLYTKSGNYSSTFVYMDWIFGTDKGYRRLKTLKENGDMKQT

SEQ ID NO: 2419 - protein, 173 aa, Arabidopsis thaliana
MGMRSSFPLPSWKEVSAQILFYFIIEDFVFYWGHRILHSKWLYKNVHSVHHEYATPFGLTSEYAHPAEILFLGFATIVGPALTGPHLITLWLWMVLRVLETVEAHCGYHFPWSLSNFLPLYGGADFHDYHHRLLYTKSGNYSSTFVYMDWIFGTDKGYRRLKTLKENGDMKQT

SEQ ID NO: 2420 - DNA, 493 bp, Arabidopsis thaliana
aaaaaccattcggcaaaatcaaataatctttttcttagttcgaatttaatttcccaagagaaaaatgtcaggccgaggaaagggaggaaaaggattaggaaagggaggagccaagagacatcggaaagtactcagagacaacatccaagggattaccaaacctgcgattcgtcgtctcgcgagaagaggaggcgtgaagcgtatcagtggtttgatctatgaagagactcgcggcgttctcaagatctttctcgagaacgtgattcgtgacgccgttacttacacggagcacgctcgccggaaaactgttacggcgatggacgtcgtttacgctctcaagagacaaggacgaactttgtatggattcggcggctaaatcgttcggattgcaatttcggattttgtaaactcttcaatttcagcatctagggatttcagatttgtaatttctcagttaaacgatgaatgaattgaaaaaaaaagaattgtctcc

SEQ ID NO: 2421 - protein, 103 aa, Arabidopsis thaliana; identical to SEQ ID NO: 71

SEQ ID NO: 2422 - protein, 73 aa, Arabidopsis thaliana
KNHSAKSNNLFLSSNLISQEKNVRPRKGRKRIRKGRSQETSESTQRQHPRDYQTCDSSSREKRRREAYQWFDL

SEQ ID NO: 2423 - DNA, 868 bp, Arabidopsis thaliana
cttcgtcttcgatctctctaccaactccacgatcaacgaaaccaaagatctctcttcaaagcttccaccatgtttctccgatcactcaatctctgtacaatactactcttcctagcgatttcatcacaagtttctcaatctctccacttcgaattgcaatctggtcgaacaaaatgtatatcggaagacataaaaagcaattcaatgaccgtcgggatgtacaccgtcgttaaccctaacgaagctcatccttctcctcaatctcacaagatctccatcagagtgacatcgagttacgggaacacgtatcatcacgcggaagatgtagaatcgggacaattcgcgttcacggcggtggagtctggagattacatggcttgttacacagctgttgatcataaacctgaggttacattgagtattgatttcgattggagaactggtgttcaatctaaaagctggagtagtgttgctaagaagagccaagtcgaagttatggagtttgatgtaaaaagacttattgaaaccgtcaattcgattcatgaagagatgttttatctcagagaaagggaagaagagatgcagaatctgaaccgggctactaactcgaaaatggcgtggttgagtttcctctctcttttcgtatgcttaggagtcgcgggaatgcagtttgtgcatttgaagacgtttttcgagaagaagaaagtcatctaagatggttagatgaaacaaatcccactcttttcttttcccaactcaaaggagtcttctattcctccatgagttttgtacatttagatctttacttttgagtatgtactctcggaactggaaattaaatgaatatgaaagtattgcccctttttcc

SEQ ID NO: 2424 - protein, 237 aa, Arabidopsis thaliana
LRLRSLYQLHDQRNQRSLFKASTMFLRSLNLCTILLFLAISSQVSQSLHFELQSGRTKCISEDIKSNSMTVGMYTVVNPNEAHPSPQSHKISIRVTSSYGNTYHHAEDVESGQFAFTAVESGDYMACYTAVDHKPEVTLSIDFDWRTGVQSKSWSSVAKKSQVEVMEFDVKRLIETVNSIHEEMFYLREREEEMQNLNRATNSKMAWLSFLSLFVCLGVAGMQFVHLKTFFEKKKVI

SEQ ID NO: 2425 - protein, 214 aa, Arabidopsis thaliana
MFLRSLNLCTILLFLAISSQVSQSLHFELQSGRTKCISEDIKSNSMTVGMYTVVNPNEAHPSPQSHKISIRVTSSYGNTYHHAEDVESGQFAFTAVESGDYMACYTAVDHKPEVTLSIDFDWRTGVQSKSWSSVAKKSQVEVMEFDVKRLIETVNSIHEEMFYLREREEEMQNLNRATNSKMAWLSFLSLFVCLGVAGMQFVHLKTFFEKKKVI

SEQ ID NO: 2426 - protein, 169 aa, Arabidopsis thaliana
MTVGMYTVVNPNEAHPSPQSHKISIRVTSSYGNTYHHAEDVESGQFAFTAVESGDYMACYTAVDHKPEVTLSIDFDWRTGVQSKSWSSVAKKSQVEVMEFDVKRLIETVNSIHEEMFYLREREEEMQNLNRATNSKMAWLSFLSLFVCLGVAGMQFVHLKTFFEKKKVI

SEQ ID NO: 2427 - DNA, 1293 bp, Arabidopsis thaliana
tggtactttcacatttctctgtaataaactcggtaggtttgcgaaaacctcgccgccgggaaaaaaaaaaatcaatggaaggaggaggaagaggaccaaatcaaacgattctcagtgaaatagaacatatgcctgaagctccacgtcaacgtatctctcatcaccgtcgagctcgctctgaaaccttcttctccggcgaatcaatcgacgatctcctcttattcgatccttccgatatcgatttctcttctctagacttcctcaacgctccaccaccaccacaacaatcacaacaacaaccgcaagcttctcccatgtccgttgattcggaagaaacctcatcgaacggtgttgttcctcctaattctcttcctccaaaacccgaagctagattcggtcgccatgttcgtagcttctcggttgattccgatttcttcgatgatttgggtgttactgaggagaagtttatagctacaagttcaggagagaagaagaaagggaatcatcatcatagcaggagtaattctatggatggagagatgagttcggcgtcgtttaatatcgaatcgattttagcttctgtgagtggtaaagatagtgggaagaagaatatgggtatgggtggtgatagacttgctgagcttgctttgcttgatcctaaaagagctaaaaggattttagcgaatagacaatctgcggcgaggtcgaaagagaggaagattaggtatactggtgagttagagaggaaggttcagacacttcagaatgaagctactacattgtctgctcaagtcactatgttacagagaggaacatcagagctgaacactgaaaataaacacctcaaaatgcggcttcaagctttagagcaacaagctgaacttagggatgctttgaatgaagcgctgcgggatgaactgaaccgacttaaggtggtagctggagaaattcctcaggggaatggaaattcttacaaccgtgctcaattctcatctcagcaatcggcaatgaatcagtttgggaacaaaacgaaccaacagatgagtacaaacgggcagccatcgctcccaagctacatggatttcaccaagagaggctgagttcgtgtcacctatatatgtttgctgagttataaatacgttatattcatttcgggctgcaatatttgatgtatgtaaaaagtatgtatgtatccatgtataatggcttttgtgttgttagcgtctatgcagatatgttcatggcgacatcggtctatctttacaagtagtatccattgtaatatactacccc

SEQ ID NO: 2428 - protein, 365 aa, Arabidopsis thaliana
VLSHFSVINSVGLRKPRRREKKKSMEGGGRGPNQTILSEIEHMPEAPRQRISHHRRARSETFFSGESIDDLLLFDPSDIDFSSLDFLNAPPPPQQSQQQPQASPMSVDSEETSSNGVVPPNSLPPKPEARFGRHVRSFSVDSDFFDDLGVTEEKFIATSSGEKKKGNHHHSRSNSMDGEMSSASFNIESILASVSGKDSGKKNMGMGGDRLAELALLDPKRAKRILANRQSAARSKERKIRYTGELERKVQTLQNEATTLSAQVTMLQRGTSELNTENKHLKMRLQALEQQAELRDALNEALRDELNRLKVVAGEIPQGNGNSYNRAQFSSQQSAMNQFGNKTNQQMSTNGQPSLPSYMDFTKRG

SEQ ID NO: 2429 - protein, 341 aa, Arabidopsis thaliana
MEGGGRGPNQTILSEIEHMPEAPRQRISHHRRARSETFFSGESIDDLLLFDPSDIDFSSLDFLNAPPPPQQSQQQPQASPMSVDSEETSSNGVVPPNSLPPKPEARFGRHVRSFSVDSDFFDDLGVTEEKFIATSSGEKKKGNHHHSRSNSMDGEMSSASFNIESILASVSGKDSGKKNMGMGGDRLAELALLDPKRAKRILANRQSAARSKERKIRYTGELERKVQTLQNEATTLSAQVTMLQRGTSELNTENKHLKMRLQALEQQAELRDALNEALRDELNRLKVVAGEIPQGNGNSYNRAQFSSQQSAMNQFGNKTNQQMSTNGQPSLPSYMDFTKRG

SEQ ID NO: 2430 - protein, 323 aa, Arabidopsis thaliana
MPEAPRQRISHHRRARSETFFSGESIDDLLLFDPSDIDFSSLDFLNAPPPPQQSQQQPQASPMSVDSEETSSNGVVPPNSLPPKPEARFGRHVRSFSVDSDFFDDLGVTEEKFIATSSGEKKKGNHHHSRSNSMDGEMSSASFNIESILASVSGKDSGKKNMGMGGDRLAELALLDPKRAKRILANRQSAARSKERKIRYTGELERKVQTLQNEATTLSAQVTMLQRGTSELNTENKHLKMRLQALEQQAELRDALNEALRDELNRLKVVAGEIPQGNGNSYNRAQFSSQQSAMNQFGNKTNQQMSTNGQPSLPSYMDFTKRG

SEQ ID NO: 2431 - DNA, 1665 bp, Arabidopsis thaliana
aacatttgttcgtgtaaggctttttttactatctcttctatttactcaatttcttcttacacatttgttatacgtaaaaggaacatttctttgattctttttttgttgtcactaccaaaacgtactgatttgttttttgaataggtgggttcctagagtaaaaaagagaccgatatttaaacttttgtcccttgactaaaactcaaaacatttctgtttgttttttgttagttaaatatgtttaaaataaataaataatcatatagctatttatgaaagtattaatatacaaataactttcaaaagttattaattaaatttcaaacaataatcctgtgtttcaatatctacttttgcaattgttatttccataattccattaatacaaatttttagatattgatagctacctaactcacactttttaaattttagttatgtcgacaagtttttttttttgttacatgatgttaattacgactaatcaggtttttaaagtaataaatcaatattaaaaagtgcctcaacaaagaaaaagtgttggaccatggtcgtctataattatttatcaaaacatagtcacacacacccttgccgttattgtctagaactctctctcgctctcccaaaaactcatctctcaccaccgtctcaaaccaagttcgatctaaaagccttttcctttagattctctccaacaacaaatctctttgaatcactcagtcatgtcggttttacttcctctctgtctgattatctccatgttcacctattcaaacgcagcgtattgtctttgcaaagaggggaacgagcaagtgcttcagaaggcaatagactacgcttgtggaaatggagctgactgtacccagatccaacccaccggagcttgttaccaacctaacaccgtcaaaaaccactgtgacgtcgccgtcaacagttactaccagaaaaaagcttcttccggtgccacctgtgactttaacggcgccgcctccccctctactacccctccgtcaactgcttcaaactgtttaactggttcaagctctagtggcactcctaccacaggaacaccaactactgggacaccaaccagtgggaccccgactaccggaactccgaccaccggaacccccaccactggaactccaaccagtgggactccaactagtggcttcccaaataccgggactccaaacacagggactaacactgggatgccaaattccaacgggatgccaacttcatcgtcatcttcggtgttcccggggactactcttggcccgactgggagcgggggactaggcgatccaaatgctggagagaagctgtctgttcgaactaacacagtggtcttcttattaaccggtgtagcagcaatgcttgtcatatgagggcttagaagtcacacgcggttatggttgtaattgagttgctgagagatcagatcttgccaacggctcatggttgatagagtcatcttttttttcactcgtctttctaggatttggacttaggttggccgagagacgtaatgctggtagtagctagtattttgggttatgtacaactttaactaagagctttacttttgtaaatccggaggatgagatgctcttttgtttcttatattctttttaatccgtttacttggatctttcatcc

SEQ ID NO: 2432 - protein, 222 aa, Arabidopsis thaliana
MSVLLPLCLIISMFTYSNAAYCLCKEGNEQVLQKAIDYACGNGADCTQIQPTGACYQPNTVKNHCDVAVNSYYQKKASSGATCDFNGAASPSTTPPSTASNCLTGSSSSGTPTTGTPTTGTPTSGTPTTGTPTTGTPTTGTPTSGTPTSGFPNTGTPNTGTNTGMPNSNGMPTSSSSSVFPGTTLGPTGSGGLGDPNAGEKLSVRTNTVVFLLTGVAAMLVI

SEQ ID NO: 2433 - protein, 210 aa, Arabidopsis thaliana
MFTYSNAAYCLCKEGNEQVLQKAIDYACGNGADCTQIQPTGACYQPNTVKNHCDVAVNSYYQKKASSGATCDFNGAASPSTTPPSTASNCLTGSSSSGTPTTGTPTTGTPTSGTPTTGTPTTGTPTTGTPTSGTPTSGFPNTGTPNTGTNTGMPNSNGMPTSSSSSVFPGTTLGPTGSGGLGDPNAGEKLSVRTNTVVFLLTGVAAMLVI

SEQ ID NO: 2434 - DNA, 776 bp, Arabidopsis thaliana
aaagctaagccaaactcagtggctctccggtgaagctttgagatggcgatccttattccggcgagtttcgggcgattaacaattacgtcgcgtgcacaagttagagtgagagtttctgcttctgctaaccaacgcactattcgtcgcgattcagtggattgggttaaggaaacttcaagctttttcgaagaagataaaaggccgatcatgttgttcgacggtgtttgtaatctctgtaatggaggtgtgaaatttgttagagaccatgatcgaaacaggagcataaggtttgaagcattacagagtgaagcgggcaagaaactgttattgcggtcaggaagagctcctgacgatatatcgagtgtcgtactagtcgaaaacgataggtcttacataaagtcagaagcagttttgaagatcatgaaatacattgacttaccatttccacagcttgcgttcttcttgcagtttgctcctctgtttgtgagagactttttgtatgaaaatgttgcaaacaatcgatatgcaatgtttggtcgatctgattcatgtgagctctaagaatacatatgtgatcctactttgccacaaaaaaaaaatctagatatgtaatcctacagattaatataagcttttatacagatgtatagtttacaacagccattaaacaatagatacatatgtactacttttcgaatcatgtactcgtcaaatgtataacctttccgatgttgatatttgtgttatatatatggaaaaaaacttgggattgtgtg

SEQ ID NO: 2435 - protein, 172 aa, Arabidopsis thaliana
MAILIPASFGRLTITSRAQVRVRVSASANQRTIRRDSVDWVKETSSFFEEDKRPIMLFDGVCNLCNGGVKFVRDHDRNRSIRFEALQSEAGKKLLLRSGRAPDDISSVVLVENDRSYIKSEAVLKIMKYIDLPFPQLAFFLQFAPLFVRDFLYENVANNRYAMFGRSDSCEL

SEQ ID NO: 2436 - protein, 117 aa, Arabidopsis thaliana
MLFDGVCNLCNGGVKFVRDHDRNRSIRFEALQSEAGKKLLLRSGRAPDDISSVVLVENDRSYIKSEAVLKIMKYIDLPFPQLAFFLQFAPLFVRDFLYENVANNRYAMFGRSDSCEL

SEQ ID NO: 2437 - DNA, 1647 bp, Arabidopsis thaliana
atatattcaatattcctaacgaaaaaatggccaaagcataaataccttatagcgatatttgagtatttaccataaaaccattcgaatactgtcacggttctaaatttctaatattgttcttttgttattaaaggaaagagtgaagggtgttttcgtcatttaacatatccatcgggtcaataacggagattacctatccggtgaccttatcccctcgccggtgagcgaatctcagatccaaaattttgcaaaatcctcagatcgtcttaccttctccgaatcgatcgatttttcatggaggacgacgacgagattcagtcaattccatctccgggagattcttccctttcaccacaagctcctccttctccgccgattttgccaacaaacgacgtgacggtggccgtcgtgaagaaaccacaaccggggctttcttctcaatctccgtccatgaacgctttagcgttagtggttcatactccttctgtaaccggtggtggtggtagcggaaacagaaacggacgaggaggaggaggaggaagcggtggtggtggaggaggaagagatgattgttggagcgaagaagctacaaaggttctaatcgaagcttggggagatcgattctctgaaccaggtaaaggaactttgaagcaacaacattggaaagaagtagctgagattgtgaacaagagtcgtcaatgcaaataccctaaaactgatattcagtgtaagaacagaattgatacggtgaagaagaagtataagcaagagaaagctaagattgcttctggtgatggacctagtaaatgggttttcttcaagaagcttgagagtttgattggtggtactacaacattcattgcttcttcaaaagcttcagagaaggctcctatgggaggagctcttgggaatagccgttcgagtatgtttaaacggcaaactaaaggtaatcagattgtgcagcaacaacaagagaagagaggctctgattcgatgcggtggcattttaggaaacgtagtgcttctgagactgagtctgagtctgatcctgaacctgaggcttctcctgaggaatctgctgagagtctcccacctttgcaaccgattcaaccgctttcgtttcatatgccaaagcggttgaaggtggataagagtggaggtggagggagtggagttggagatgtggcgagggcgatacttggatttacggaagcttatgagaaggcggaaactgctaagcttaagttaatggcggaactggaaaaggagaggatgaaatttgctaaagagatggagttgcagagaatgcagttcttgaaaactcaattggagataacacagaacaatcaagaagaggaagagaggagcaggcagcgaggagaaaggaggatcgttgatgatgatgatgatcgcaatggcaagaataacggcaatgtaagtagctgacaattgaacacacaaatgttcctatgatatttgctatgataagctggattttaggttttgatgttgttgttgttgttattgttactgccttgtgggatgtgtaaatgtagagaagttatgactctgattatcatcatgttgttgttattgttatccatcttcttgtcttaaacatgggcaaattaaaaagctttgaacttg

SEQ ID NO: 2438 - protein, 383 aa, Arabidopsis thaliana
MEDDDEIQSIPSPGDSSLSPQAPPSPPILPTNDVTVAVVKKPQPGLSSQSPSMNALALVVHTPSVTGGGGSGNRNGRGGGGGSGGGGGGRDDCWSEEATKVLIEAWGDRFSEPGKGTLKQQHWKEVAEIVNKSRQCKYPKTDIQCKNRIDTVKKKYKQEKAKIASGDGPSKWVFFKKLESLIGGTTTFIASSKASEKAPMGGALGNSRSSMFKRQTKGNQIVQQQQEKRGSDSMRWHFRKRSASETESESDPEPEASPEESAESLPPLQPIQPLSFHMPKRLKVDKSGGGGSGVGDVARAILGFTEAYEKAETAKLKLMAELEKERMKFAKEMELQRMQFLKTQLEITQNNQEEEERSRQRGERRIVDDDDDRNGKNNGNVSS

SEQ ID NO: 2439 - protein, 331 aa, Arabidopsis thaliana
MNALALVVHTPSVTGGGGSGNRNGRGGGGGSGGGGGGRDDCWSEEATKVLIEAWGDRFSEPGKGTLKQQHWKEVAEIVNKSRQCKYPKTDIQCKNRIDTVKKKYKQEKAKIASGDGPSKWVFFKKLESLIGGTTTFIASSKASEKAPMGGALGNSRSSMFKRQTKGNQIVQQQQEKRGSDSMRWHFRKRSASETESESDPEPEASPEESAESLPPLQPIQPLSFHMPKRLKVDKSGGGGSGVGDVARAILGFTEAYEKAETAKLKLMAELEKERMKFAKEMELQRMQFLKTQLEITQNNQEEEERSRQRGERRIVDDDDDRNGKNNGNVSS

SEQ ID NO: 2440 - DNA, 570 bp, Arabidopsis thaliana
agagagtggacttagacttagagagataacagataaaatggcgacggggacggcgacggagaaaccgaagatcgtgtggaacgaaggaagacatagattcgagactgatgatcacgaagccttcatagagtacaagatgaagaatgacggtaaagtcatggatctggttcgaaccttcgtaccgccgtcaaaagcaggacttggtttagcttcgcatctatgcgtcgccgctttcgaacacgcctctgaacactctttctccatcatccccacttgctcctacgtttccgaaacgtttcttcatcgaaacccaacgtggcagcgtctggttcactcagaggatgattccaagaacctcaagtctagcatctgatcaagtcctgctttaaagccttttggtgtataataaaaacttgaaaacattatcttacaatagtaaagcttgtttcaagtaatctctgtaaacaaacaaaaatcccaaaatgtatgtttttcacaattcgacagcaacaaacaaacactaatgtttgtcgtaacaataaatataacgtgaaaacattattctatgat

SEQ ID NO: 2441 - protein, 123 aa, Arabidopsis thaliana
ESGLRLREITDKMATGTATEKPKIVWNEGRHRFETDDHEAFIEYKMKNDGKVMDLVRTFVPPSKAGLGLASHLCVAAFEHASEHSFSIIPTCSYVSETFLHRNPTWQRLVHSEDDSKNLKSSI

SEQ ID NO: 2442 - protein, 111 aa, Arabidopsis thaliana
MATGTATEKPKIVWNEGRHRFETDDHEAFIEYKMKNDGKVMDLVRTFVPPSKAGLGLASHLCVAAFEHASEHSFSIIPTCSYVSETFLHRNPTWQRLVHSEDDSKNLKSSI

SEQ ID NO: 2443 - protein, 78 aa, Arabidopsis thaliana
MKNDGKVMDLVRTFVPPSKAGLGLASHLCVAAFEHASEHSFSIIPTCSYVSETFLHRNPTWQRLVHSEDDSKNLKSSI

SEQ ID NO: 2444 - DNA, 935 bp, Arabidopsis thaliana
aataaatacaagcctcctaactcataaaataagcataaccctaactctacaaagttcttctgattctttctctctctctctttctttcaagagcggttttcaatccattcgctaaagaccatgaacctagaagagaaaccaaccatgacggcttcaagggcttcccctcaagccgaacatctctactacgtccggtgtagcatctgcaacaccatcctcgcggttgggataccattgaagagaatgcttgacacggtaacggtgaaatgcggccattgtggtaacctctcgtttctcaccacaactcctcctcttcaaggccatgttagcctcacccttcagatgcagagctttggtggaagtgactataagaagggaagctcttcttcttcctcttcctccacctccagcgaccagcccccatctccctcacctccctttgtcgtcaaacctcctgagaagaagcagaggctcccatctgcatacaaccgcttcatgagggatgagatccaacgcatcaaaagtgccaatccggaaataccacaccgtgaagctttcagtgctgctgccaaaaattgggctaagtacatacccaactctcctacttccattacttccggaggccacaacatgatccatggcttgggattcggtgagaagaagtgaacaaaactcaggggaaaagaagcctaaaaataacaaacgcatgcacgtgtgcgagtggctgcgtcgtttttctcatcttgtgttgttcttctgtgtaattttcttatgtatgtcatgttgcagaaaatgatgttgccttagtttttatgactttatatttctgtctgtctttagatttgaaagtaacgtcacttgctatgtccctttggacgtttatgtctggtctttatttgtcttaatcctatcaaaattttatatgcgtattcctg

SEQ ID NO: 2445 - protein, 181 aa, Arabidopsis thaliana
MNLEEKPTMTASRASPQAEHLYYVRCSICNTILAVGIPLKRMLDTVTVKCGHCGNLSFLTTTPPLQGHVSLTLQMQSFGGSDYKKGSSSSSSSSTSSDQPPSPSPPFVVKPPEKKQRLPSAYNRFMRDEIQRIKSANPEIPHREAFSAAAKNWAKYIPNSPTSITSGGHNMIHGLGFGEKK

SEQ ID NO: 2446 - protein, 173 aa, Arabidopsis thaliana
MTASRASPQAEHLYYVRCSICNTILAVGIPLKRMLDTVTVKCGHCGNLSFLTTTPPLQGHVSLTLQMQSFGGSDYKKGSSSSSSSSTSSDQPPSPSPPFVVKPPEKKQRLPSAYNRFMRDEIQRIKSANPEIPHREAFSAAAKNWAKYIPNSPTSITSGGHNMIHGLGFGEKK

SEQ ID NO: 2447 - protein, 140 aa, Arabidopsis thaliana
MLDTVTVKCGHCGNLSFLTTTPPLQGHVSLTLQMQSFGGSDYKKGSSSSSSSSTSSDQPPSPSPPFVVKPPEKKQRLPSAYNRFMRDEIQRIKSANPEIPHREAFSAAAKNWAKYIPNSPTSITSGGHNMIHGLGFGEKK

SEQ ID NO: 2448 - DNA, 717 bp, Arabidopsis thaliana
cttttcgcgtggtcgaccaaacctaaaacccccaaaaagagaaaaatcaaagaccattcgctatttcgctcgctactcagtttcagaagaagatgccgacactcacaaagctttattccatggaagaagccgcaactcacaacaagcaagatgactgctgggtcgtcatcgacggcaaggtctatgatgtatcctcttatatggatgagcatcctggaggagatgatgtgcttcttgctgtcgcaggcaaagatgcaacggatgattttgaagacgcagggcacagcaaagatgctagggaacttatggagaagtattttattggcgagctagatgaatcttctttaccggaaatacctgagcttaagatctacaagaaggaccagccacaagactctgttcagaagctttttgacttgacaaagcagtattgggttgttcctgtctccattatcaccatctctgtagcggttagtgtcttgttctctcgcaagacttaataagtagtagtctctttcttaccttgatatgctctgggatattgaattacttggggaatcaactttacacccccattatagattttttgaataacagatatgatagagagataattgttatttttcatttttatcagattttgagttgagatcatgtttcaatacacttattatcgatatgattatatatgattaatggatggtttggtttgctggc

SEQ ID NO: 2449 - protein, 135 aa, Arabidopsis thaliana
MPTLTKLYSMEEAATHNKQDDCWVVIDGKVYDVSSYMDEHPGGDDVLLAVAGKDATDDFEDAGHSKDARELMEKYFIGELDESSLPEIPELKIYKKDQPQDSVQKLFDLTKQYWVVPVSIITISVAVSVLFSRKT

SEQ ID NO: 2450 - protein, 126 aa, Arabidopsis thaliana
MEEAATHNKQDDCWVVIDGKVYDVSSYMDEHPGGDDVLLAVAGKDATDDFEDAGHSKDARELMEKYFIGELDESSLPEIPELKIYKKDQPQDSVQKLFDLTKQYWVVPVSIITISVAVSVLFSRKT

SEQ ID NO: 2451 - protein, 110 aa, Arabidopsis thaliana
LFAWSTKPKTPKKRKIKDHSLFRSLLSFRRRCRHSQSFIPWKKPQLTTSKMTAGSSSTARSMMYPLIWMSILEEMMCFLLSQAKMQRMILKTQGTAKMLGNLWRSILLAS

SEQ ID NO: 2452 - DNA, 727 bp, Arabidopsis thaliana
aaaaaaaccaaacgaatctgaaaagatcataacaaaactcaaaagattcttctccaaccacgtatttcatcaaggaaacatgaagataggagtggttttagtgttgcttacagttttcgtggttgtgatgtcttctacaagcgtctctgctcagtcggacgaggacgagtgcttgaaagagacagggcagatgcagttgaattgtttcccctacctaactgataatcgtatccatactcctagtttcgcgtgttgttctgaggtgtatacagtaggcaagacatatgttgactgcttttgtcaattcatcaacaatggaggccctagcttcggtatcgttgtttcccaaaaacttcttgatctgccagagctttgtggcgtttatggtgcctgtggcaacggtaagaatttcaaaaacactagtttatgaataaacaccaatcttcactcttcgcgaatttatgttatgtccatgaaattgattgaaaaatctgtgtaccagttggtgatggcgttgtccgtaaccgaaagtatttgaattgatagagtctttgtttcagttgagtcaataacgaaagacatggtcttcctttccttgtgttaaattaaggagccagctttgccactttcccattcctggtttgtaggagttacaactccatctctttgtacattctatttaagattattaaaaagccacaaaaaggcaatcttaattgtctaaagg

SEQ ID NO: 2453 - protein, 142 aa, Arabidopsis thaliana
KKPNESEKIITKLKRFFSNHVFHQGNMKIGVVLVLLTVFVVVMSSTSVSAQSDEDECLKETGQMQLNCFPYLTDNRIHTPSFACCSEVYTVGKTYVDCFCQFINNGGPSFGIVVSQKLLDLPELCGVYGACGNGKNFKNTSL

SEQ ID NO: 2454 - protein, 116 aa, Arabidopsis thaliana
MKIGVVLVLLTVFVVVMSSTSVSAQSDEDECLKETGQMQLNCFPYLTDNRIHTPSFACCSEVYTVGKTYVDCFCQFINNGGPSFGIVVSQKLLDLPELCGVYGACGNGKNFKNTSL

SEQ ID NO: 2455 - protein, 100 aa, Arabidopsis thaliana
MSSTSVSAQSDEDECLKETGQMQLNCFPYLTDNRIHTPSFACCSEVYTVGKTYVDCFCQFINNGGPSFGIVVSQKLLDLPELCGVYGACGNGKNFKNTSL

SEQ ID NO: 2456 - DNA, 1376 bp, Arabidopsis thaliana
ccttatctctctctctctttctctcttatataaagagagaaatatacaaaacctccaagtacgtttcatcgatcctacctaattcatcaaaaaattgtgtgaggcttatttgatcaataattatgaattctggtcgtcgatcgttaatgtccgccacggcgagtctgagtttgctgttgtgtatcttcaccaccttcgtcgtggtgtcgaacggtgagcttcagagatttatagagccggctaaaagcgacggttccgttagttttatagtcatcggagattggggtcgtcgtggctccttcaatcagtctctcgttgcttatcagatgggaaaaattggagagaagattgacttagatttcgtggtgtctacgggagataacttctacgacaatggattgtttagtgaacatgatccaaacttcgaacaatctttctctaacatctacactgctccaagtcttcagaaacagtggtacagtgttttgggaaaccatgactatagaggtgacgcagaagctcagctgagttctgttctccgggaaatcgacagccgttggatttgtcttcgatcatttgtcgttgatgcagagttggtagagatgttctttgttgacacgactcctttcgtgaaagaatactacacagaagcagatggtcactcatatgattggcgcgcagttccatctcgcaactcttatgtcaaagctcttctccgtgatcttgaagtttccttaaagagttctaaagcaagatggaagattgttgttggtcaccatgcaatgagaagcattggacatcatggagatactaaagagctcaacgaagagcttcttccgattcttaaagagaacggtgttgatctctacatgaatggacatgatcattgtcttcaacatatgagtgatgaagacagtcctattcagtttctaactagtggtgctggatccaaggcttggagaggagatattaacccagtgaccatcaatcccaagctactgaaattctattatgatggtcaaggattcatgtctgctcggttcactcactcggacgcagagatcgtcttctacgatgtctttggtgagattttgcacaaatgggtcacttctaaacaacttcttcattcctctgtttgaagataaaaagccttaataaatttggcttcctttgtaattttgtaacatacatttaagattcttaagtcctattgcaggctaggtaggcttcctgcttagtttagcatccctatcatttttagcaatagcttattccatcacaataacatataaaatgtacgatcttttcctcaaatttttgatacaagtgtaatgatacccttaatgggtatcttcttaatgctacataagttagtc

SEQ ID NO: 2457 - protein, 338 aa, Arabidopsis thaliana
MNSGRRSLMSATASLSLLLCIFTTFVVVSNGELQRFIEPAKSDGSVSFIVIGDWGRRGSFNQSLVAYQMGKIGEKIDLDFVVSTGDNFYDNGLFSEHDPNFEQSFSNIYTAPSLQKQWYSVLGNHDYRGDAEAQLSSVLREIDSRWICLRSFVVDAELVEMFFVDTTPFVKEYYTEADGHSYDWRAVPSRNSYVKALLRDLEVSLKSSKARWKIVVGHHAMRSIGHHGDTKELNEELLPILKENGVDLYMNGHDHCLQHMSDEDSPIQFLTSGAGSKAWRGDINPVTINPKLLKFYYDGQGFMSARFTHSDAEIVFYDVFGEILHKWVTSKQLLHSSV

SEQ ID NO: 2458 - protein, 330 aa, Arabidopsis thaliana
MSATASLSLLLCIFTTFVVVSNGELQRFIEPAKSDGSVSFIVIGDWGRRGSFNQSLVAYQMGKIGEKIDLDFVVSTGDNFYDNGLFSEHDPNFEQSFSNIYTAPSLQKQWYSVLGNHDYRGDAEAQLSSVLREIDSRWICLRSFVVDAELVEMFFVDTTPFVKEYYTEADGHSYDWRAVPSRNSYVKALLRDLEVSLKSSKARWKIVVGHHAMRSIGHHGDTKELNEELLPILKENGVDLYMNGHDHCLQHMSDEDSPIQFLTSGAGSKAWRGDINPVTINPKLLKFYYDGQGFMSARFTHSDAEIVFYDVFGEILHKWVTSKQLLHSSV

SEQ ID NO: 2459 - protein, 270 aa, Arabidopsis thaliana
MGKIGEKIDLDFVVSTGDNFYDNGLFSEHDPNFEQSFSNIYTAPSLQKQWYSVLGNHDYRGDAEAQLSSVLREIDSRWICLRSFVVDAELVEMFFVDTTPFVKEYYTEADGHSYDWRAVPSRNSYVKALLRDLEVSLKSSKARWKIVVGHHAMRSIGHHGDTKELNEELLPILKENGVDLYMNGHDHCLQHMSDEDSPIQFLTSGAGSKAWRGDINPVTINPKLLKFYYDGQGFMSARFTHSDAEIVFYDVFGEILHKWVTSKQLLHSSV

SEQ ID NO: 2460 - DNA, 2416 bp, Arabidopsis thaliana
tctctctctctctgtctcaatggaactcttgtccagggtttgttgttgatttcctatgcccatggtcaagagatagtgcgtttaagagaaggcatcgaggatttacgctgattagaatgaactgtgttggtggattttgatagggatcagttccgggttttgagttttggcctttggttttgtagatttcgatgatgcaaggattggatttgctatatactttgtttagtgtgtggtctgttgtgcggatagcttttggatgaataagctttgtgtgcttctttttttagtttgatttggaaagtcacagacttgacaaggatggagaaagaaggtgtgtgtgataccattaatttaagtgatcagatgtaccctgatgagcctttctgttccgagatgaaaactgaaaccattgcttcatctcagaaatttgaaggaggcgaggggagtaaagtggttttttcgagagaggcacctttaataggaaaggattcagctggaactaattcgggagaatgctgtggttgtagtgctaagaaactaaattttaaaggggatgatgatctcgttgagaaggaaaatattgagcagcagaaaaagcttaataggcaagaaagaattgagttgggacggctcttccaaggcgctgttacctcactggattgggaacttgctgagagattgattcagttggctgatcctcagactttaaatgatttgttgtgtgttggtctagattcagtttggttcttgagtacaaagcctgagtttcaggggatcaccggattgattaagaagatcatatgtcatggtgctcatgactttactagagctactcttaggacttcgtttctcgcttcttgtgtctctgcttgccagagccggacaatgagtctttctgatacagtaactgttatggctcaaaggttgcatgagcgtctccaagagtgcaacggggatgagattctaaaagcagaggctggtgccaaagttcagaagttcactgaatgggctctcaaatgtataggtttccactcccgatgccagggggcaaaggatagagttagccaaaattcggctgctgaaattgaactacaactttctgctttcaagatgttcttagatctagcaggaaaccatctctcaggaagagacttcactgaggcctttgatgcagcttgtttcccgctcactctgttctccaactcgtttgatcctggctgggcatctgggatgtcagctactgttatacagggactgctcggtatgcttgttgaaggtggcgcagataatgtgaaccaatgtttccttgaagcttcacgttttggtagtacagaacttgtccgcgtcttattgcagattgcccaaaggaacagcttagatgttgatgtggacttagctcttggttttgcctcgcattattgtaaaatcggaacaatgaagtgcctagtggaagaaggtaatgccattgccttcttgggtcccttaatgagagcagcagagagaggttgcatgcaagttgttcaatggtttgtgaaaagaggttgccgtgacatggagctttgcttggctctaacagcggccacttcaagttgccaagtcgaggtagctgcttatctcctccctcgtgttccaccacctgtcttaaccgctctcagcatcgaaatcctcaaagcagcaggagaaagaagcggagggtctctccaaggagtagagtttcttctcaaatcagacttcttaggagattccacggctacatactcagtggcagacagcatcgcaaggtcatcagaagacgaatccgttccttcagatctaaaatcgtttctccaagaacactggtcggagtcagcttttgagaaaggaatgagagaaagccatgacgatttcatgaatttcatgagagttttgaaaaaaggggagtcagcgatatccttaagagaccttcctgcaccgctaagagtagcaatagcgtacatgccgctgtacagagagtgcatgaaagcggacggtcggttactgtctcagaggctaagaggacagcttgtagaagcagtgagacagcttcaaggctgtgctgttgcagttgtggaagtaagccagactcgtaaccttatggcggttttggagcatcaccttaccgccattttcgattgaaacaaatggattctgcttttgggcttcactggttttctaatttctacgaatagttgaaaataagcaaataaatactacgatttaaattaacggatattgggatttgggtttgagatgacgaagtgaggttttttttttttttttttttgtataatttcttcttatgatgcttctatattatgtcagtctcttctcctccatttctcttattgtgcgttgaagtattctcacatatatatatattatgataatttaatgc

SEQ ID NO: 2461 - protein, 611 aa, Arabidopsis thaliana
MEKEGVCDTINLSDQMYPDEPFCSEMKTETIASSQKFEGGEGSKVVFSREAPLIGKDSAGTNSGECCGCSAKKLNFKGDDDLVEKENIEQQKKLNRQERIELGRLFQGAVTSLDWELAERLIQLADPQTLNDLLCVGLDSVWFLSTKPEFQGITGLIKKIICHGAHDFTRATLRTSFLASCVSACQSRTMSLSDTVTVMAQRLHERLQECNGDEILKAEAGAKVQKFTEWALKCIGFHSRCQGAKDRVSQNSAAEIELQLSAFKMFLDLAGNHLSGRDFTEAFDAACFPLTLFSNSFDPGWASGMSATVIQGLLGMLVEGGADNVNQCFLEASRFGSTELVRVLLQIAQRNSLDVDVDLALGFASHYCKIGTMKCLVEEGNAIAFLGPLMRAAERGCMQVVQWFVKRGCRDMELCLALTAATSSCQVEVAAYLLPRVPPPVLTALSIEILKAAGERSGGSLQGVEFLLKSDFLGDSTATYSVADSIARSSEDESVPSDLKSFLQEHWSESAFEKGMRESHDDFMNFMRVLKKGESAISLRDLPAPLRVAIAYMPLYRECMKADGRLLSQRLRGQLVEAVRQLQGCAVAVVEVSQTRNLMAVLEHHLTAIFD

SEQ ID NO: 2462 - protein, 596 aa, Arabidopsis thaliana
MYPDEPFCSEMKTETIASSQKFEGGEGSKVVFSREAPLIGKDSAGTNSGECCGCSAKKLNFKGDDDLVEKENIEQQKKLNRQERIELGRLFQGAVTSLDWELAERLIQLADPQTLNDLLCVGLDSVWFLSTKPEFQGITGLIKKIICHGAHDFTRATLRTSFLASCVSACQSRTMSLSDTVTVMAQRLHERLQECNGDEILKAEAGAKVQKFTEWALKCIGFHSRCQGAKDRVSQNSAAEIELQLSAFKMFLDLAGNHLSGRDFTEAFDAACFPLTLFSNSFDPGWASGMSATVIQGLLGMLVEGGADNVNQCFLEASRFGSTELVRVLLQIAQRNSLDVDVDLALGFASHYCKIGTMKCLVEEGNAIAFLGPLMRAAERGCMQVVQWFVKRGCRDMELCLALTAATSSCQVEVAAYLLPRVPPPVLTALSIEILKAAGERSGGSLQGVEFLLKSDFLGDSTATYSVADSIARSSEDESVPSDLKSFLQEHWSESAFEKGMRESHDDFMNFMRVLKKGESAISLRDLPAPLRVAIAYMPLYRECMKADGRLLSQRLRGQLVEAVRQLQGCAVAVVEVSQTRNLMAVLEHHLTAIFD

SEQ ID NO: 2463 - protein, 586 aa, Arabidopsis thaliana
MKTETIASSQKFEGGEGSKVVFSREAPLIGKDSAGTNSGECCGCSAKKLNFKGDDDLVEKENIEQQKKLNRQERIELGRLFQGAVTSLDWELAERLIQLADPQTLNDLLCVGLDSVWFLSTKPEFQGITGLIKKIICHGAHDFTRATLRTSFLASCVSACQSRTMSLSDTVTVMAQRLHERLQECNGDEILKAEAGAKVQKFTEWALKCIGFHSRCQGAKDRVSQNSAAEIELQLSAFKMFLDLAGNHLSGRDFTEAFDAACFPLTLFSNSFDPGWASGMSATVIQGLLGMLVEGGADNVNQCFLEASRFGSTELVRVLLQIAQRNSLDVDVDLALGFASHYCKIGTMKCLVEEGNAIAFLGPLMRAAERGCMQVVQWFVKRGCRDMELCLALTAATSSCQVEVAAYLLPRVPPPVLTALSIEILKAAGERSGGSLQGVEFLLKSDFLGDSTATYSVADSIARSSEDESVPSDLKSFLQEHWSESAFEKGMRESHDDFMNFMRVLKKGESAISLRDLPAPLRVAIAYMPLYRECMKADGRLLSQRLRGQLVEAVRQLQGCAVAVVEVSQTRNLMAVLEHHLTAIFD

SEQ ID NO: 2464 - DNA, 1647 bp, Arabidopsis thaliana
aagatcatcctctgatttttcagacacatatttgtaatttataaagtttgtagctttttccttagcttgagattacacgaagaagaagaagatggatgacgttaaagataagctaaagggattcatgaaaaaagtcaatctctcttcttcttccggcaaattcaaaggccaaggtcgggttctcggatcttcttcttcttcctctgcaccacccgttaacccgattcagaaccggtttaactcttcccaagctcccaatccgactcctagacccaaacccaatccaaatccgttgcctgagaaacccttatcctcctccgatcagaagattagtgggtcaacgagaaacccggatcatgacccggttcgtgctccacaagatgggtttgacccgtacggtgctttcataacgtcttcgaacagatctcagaacggatattctctgagcatgttcgagtgtccgatttgtaaaaatccattcacgtcagaggaagaagtctctgttcatgtcgagagctgtcttggggacactaatggagacgaatcttcatttgagaaggataataatgataacgataaatccgaaatggagaaacttgtggttgtgtatctctctgggaagccaagtgagagctctattgatgttttgcttaggttgtttaagaacatagtgaaagaacctgagaatgctaagtttagaaaagttagaatgagtaatgctaagattaaagaagctattggtgatgttgctggaggtgtcgagcttcttgagttggttggttttgaattgaaagaggaaaatgatgagatttgggctgttatggatgttcctagtgaagaacaatctatattgatcaataaagttgtcggatatctagaaaagagaaagacagagagttcaggatcttcagctcaggttatggaacctgtggctccaaagaagattgatagagagattcgtgtctttttctcggtttctgaaaacgtagcatcgagaatagaggtacctgattcgttctatagtctctcggcggatgaaataaagagagaagcggatttacggaggaaaaagattgcggagtcacagcttttgattccaagatcttataaggagaaacaagcgaaagcagctagaaagagatacaaaagaagtatgataagagtgcagtttcctgacggagttgtgcttcaaggtgtgtttgctccatgggaacctacttttgctctctatgagtttgtgagctctgctttgaaagaaccaagtttgcagtttgagcttctggatcctgtgctggttaaacggcgtgtgattccacatactccagccccgggacagaaaccgataacgttagaggacgaagagcttgttccgtcagcgctcatcaggttcagaccgatcgaaacagactctctcgtctttacaggactccgcaatgaactcctggagatcagtgaaccactctcgtgatcatttgtgttccactgatgatttagcttgagcccatgaaataagtttacaaatttaggtttctctcttatatggtgtgatttgatgatgatttgtgtttgtgattcgagcacattttataggtttataagaaatttgtgtcatttgcacaataagaagaatcataaatttgaaggtcc

SEQ ID NO: 2465 - protein, 458 aa, Arabidopsis thaliana
MDDVKDKLKGFMKKVNLSSSSGKFKGQGRVLGSSSSSSAPPVNPIQNRFNSSQAPNPTPRPKPNPNPLPEKPLSSSDQKISGSTRNPDHDPVRAPQDGFDPYGAFITSSNRSQNGYSLSMFECPICKNPFTSEEEVSVHVESCLGDTNGDESSFEKDNNDNDKSEMEKLVVVYLSGKPSESSIDVLLRLFKNIVKEPENAKFRKVRMSNAKIKEAIGDVAGGVELLELVGFELKEENDEIWAVMDVPSEEQSILINKVVGYLEKRKTESSGSSAQVMEPVAPKKIDREIRVFFSVSENVASRIEVPDSFYSLSADEIKREADLRRKKIAESQLLIPRSYKEKQAKAARKRYKRSMIRVQFPDGVVLQGVFAPWEPTFALYEFVSSALKEPSLQFELLDPVLVKRRVIPHTPAPGQKPITLEDEELVPSALIRFRPIETDSLVFTGLRNELLEISEPLS

SEQ ID NO: 2466 - protein, 447 aa, Arabidopsis thaliana
MKKVNLSSSSGKFKGQGRVLGSSSSSSAPPVNPIQNRFNSSQAPNPTPRPKPNPNPLPEKPLSSSDQKISGSTRNPDHDPVRAPQDGFDPYGAFITSSNRSQNGYSLSMFECPICKNPFTSEEEVSVHVESCLGDTNGDESSFEKDNNDNDKSEMEKLVVVYLSGKPSESSIDVLLRLFKNIVKEPENAKFRKVRMSNAKIKEAIGDVAGGVELLELVGFELKEENDEIWAVMDVPSEEQSILINKVVGYLEKRKTESSGSSAQVMEPVAPKKIDREIRVFFSVSENVASRIEVPDSFYSLSADEIKREADLRRKKIAESQLLIPRSYKEKQAKAARKRYKRSMIRVQFPDGVVLQGVFAPWEPTFALYEFVSSALKEPSLQFELLDPVLVKRRVIPHTPAPGQKPITLEDEELVPSALIRFRPIETDSLVFTGLRNELLEISEPLS

SEQ ID NO: 2467 - protein, 339 aa, Arabidopsis thaliana
MFECPICKNPFTSEEEVSVHVESCLGDTNGDESSFEKDNNDNDKSEMEKLVVVYLSGKPSESSIDVLLRLFKNIVKEPENAKFRKVRMSNAKIKEAIGDVAGGVELLELVGFELKEENDEIWAVMDVPSEEQSILINKVVGYLEKRKTESSGSSAQVMEPVAPKKIDREIRVFFSVSENVASRIEVPDSFYSLSADEIKREADLRRKKIAESQLLIPRSYKEKQAKAARKRYKRSMIRVQFPDGVVLQGVFAPWEPTFALYEFVSSALKEPSLQFELLDPVLVKRRVIPHTPAPGQKPITLEDEELVPSALIRFRPIETDSLVFTGLRNELLEISEPLS

SEQ ID NO: 2468 - DNA, 909 bp, Arabidopsis thaliana
gtaatttttgggtttttttttttcgatttgatcaggcgaattccggcgaagagaagttgaagctctactcttactggagaagctcgtgtgctcatcgtgtccgtatcgccctcgctttgaaagggcttgattatgagtatataccagtgaatttgctcaagggtgatcaattcgattcagtttatcgttttgatcttcaagatttcaagaagatcaatccaatgggaactgtaccagctctggtggatggagatgttgtgattaatgattcttttgcgataataatgtatctggatgagaagtaccctgagccacctttgttacctcgtgacctccataaacgagctgtgaattaccaggcaatgagtattgtcttgtctggcatacagcctcatcaaaatctggctgttattaggtatatcgaggaaaagataaatgtggaggagaagactgcttgggttaataatgctatcacaaaaggatttacagctctcgagaaactgttggtgaattgcgctgggaaacttgcgactggtgatgaaatttacctggctgatctctttctagcaccacagatccacggagcaatcaacagattccagattaacatggaaccatacccaaatcttgcaaaatgttacgaatcatacaaggaactgcctgtgtttcaaaatgcactaccggaaaagcagccagatgctccttcttccaccaactgattccgtgaacccgtaagctacgctcagcttaataaaacctcagacaacaacaacaatgatgagagtaataccttgtactcgtacatgtatcatataaaccagttacatcttagttcctctacttttatcatataaaccagttacatcttactcacagagtttaaaatttgcaaagatatatcatacgttc

SEQ ID NO: 2469 - protein, 238 aa, Arabidopsis thaliana
NFWVFFFRFDQANSGEEKLKLYSYWRSSCAHRVRIALALKGLDYEYIPVNLLKGDQFDSVYRFDLQDFKKINPMGTVPALVDGDVVINDSFAIIMYLDEKYPEPPLLPRDLHKRAVNYQAMSIVLSGIQPHQNLAVIRYIEEKINVEEKTAWVNNAITKGFTALEKLLVNCAGKLATGDEIYLADLFLAPQIHGAINRFQINMEPYPNLAKCYESYKELPVFQNALPEKQPDAPSSTN

SEQ ID NO: 2470 - protein, 165 aa, Arabidopsis thaliana
MGTVPALVDGDVVINDSFAIIMYLDEKYPEPPLLPRDLHKRAVNYQAMSIVLSGIQPHQNLAVIRYIEEKINVEEKTAWVNNAITKGFTALEKLLVNCAGKLATGDEIYLADLFLAPQIHGAINRFQINMEPYPNLAKCYESYKELPVFQNALPEKQPDAPSSTN

SEQ ID NO: 2471 - protein, 144 aa, Arabidopsis thaliana
MYLDEKYPEPPLLPRDLHKRAVNYQAMSIVLSGIQPHQNLAVIRYIEEKINVEEKTAWVNNAITKGFTALEKLLVNCAGKLATGDEIYLADLFLAPQIHGAINRFQINMEPYPNLAKCYESYKELPVFQNALPEKQPDAPSSTN

SEQ ID NO: 2472 - DNA, 1843 bp, Arabidopsis thaliana
cggcacgaggaaaggggaaaaaaaaaaaaaatcagattcctgatattttctgcttcgctttgctttggcctttgggtttgctttgctttttatctccacaataataatattcgttaacctctcctcgttctcgtcgctgtttcttcccgatcttcgctatagttctggattcaaaatctctcttccccaatagatgtttgtctcttaatttttcatttttctgcaaaatcaaaatttttaagagctatggaggaagagaatgttactagttcaccttcaacaccggtacataggcttaggcatcgaagacgttctaatgaggttgttacggatggggataaagtgaatgcaagtcctttgttggttaatgatcggaataagtacaaatctttcatggtccggacctactctacgttatggatgattggtggttttgttttggttgtctacatgggtcatctttatatcacagctatggttgttgttattcaaatatttatggctaaagagttgtttaatctgctgaggaaagctcctgaggataaatgtctcccctatattaaacagctcaattggcacttctttttcactgccatgcttttcgtttatggacggatccttagtcaacggttagccaataccatgactgcagatcagttcttctatcggctagtcagcggcttaatcaaataccatatggcaatctgttacttgttgtatattataggtttcatgtggttcattctcacattaaagaagaagatgtacaagtaccagtttggccagtatgcttggacccacatgatcttgatagtcgtgtttactcaatcgtcgttcactgttgccaacatatttgaagggatcttctggtttcttctcccagcatctttaattataatcaacgacatcttcgcctacattttcggtttcttctttggaagaacgcctttaataaagctgtctccaaagaaaacatgggagggattcatcggagcctctgtgacaactatcatctctgcatttgttctggcaaatattttgggtcgtttcccttggttgacatgcccacgacaggatttgtccactggctggctacagtgtgacgctgatccattgttcaaacctgaaccttttgctttacctgcatggattccagaatggtttccttggaaggaaatgacgatcctccctgttcagtggcatgctttatgcctcggtttgttcgcttcaatcatagcaccttttggaggatttttcgctagcggtttcaaaagagcattcaaaattaaggactttggtgatagtattccaggacatggtggaatcacagatagaatggactgccagatggttatggcagtatttgcctacatatatcttcaatcatttattgtctcccaaagcgtttcggttgacaaaatcctagaccagatattgacgaaccttacctttgaggaacaacaagcgctcttcgtgaagttaggacaaatgctgaaggacaagctctcataggctccattgccaaaagtttcttttattcagattccgattctccaagaacaggttcctctggaatatccttttatctttgtccttactagagacaataaatttaaaattggattaagatttgttgtttcctgccattgtaaatcctctcgaaatttgtcgaaaaaattagaagtttttttaaaagtcttctcattggatacaataggtttgaagaaagttgtatctactactatctacttatttagtagctttggtggtttttagctgtattttgtatattggttaaaatgaaacaacatttggtttgtttgtctcatgattcgatttgttc

SEQ ID NO: 2473 - protein, 421 aa, Arabidopsis thaliana
MEEENVTSSPSTPVHRLRHRRRSNEVVTDGDKVNASPLLVNDRNKYKSFMVRTYSTLWMIGGFVLVVYMGHLYITAMVVVIQIFMAKELFNLLRKAPEDKCLPYIKQLNWHFFFTAMLFVYGRILSQRLANTMTADQFFYRLVSGLIKYHMAICYLLYIIGFMWFILTLKKKMYKYQFGQYAWTHMILIVVFTQSSFTVANIFEGIFWFLLPASLIIINDIFAYIFGFFFGRTPLIKLSPKKTWEGFIGASVTTIISAFVLANILGRFPWLTCPRQDLSTGWLQCDADPLFKPEPFALPAWIPEWFPWKEMTILPVQWHALCLGLFASIIAPFGGFFASGFKRAFKIKDFGDSIPGHGGITDRMDCQMVMAVFAYIYLQSFIVSQSVSVDKILDQILTNLTFEEQQALFVKLGQMLKDKLS

SEQ ID NO: 2474 - protein, 372 aa, Arabidopsis thaliana
MVRTYSTLWMIGGFVLVVYMGHLYITAMVVVIQIFMAKELFNLLRKAPEDKCLPYIKQLNWHFFFTAMLFVYGRILSQRLANTMTADQFFYRLVSGLIKYHMAICYLLYIIGFMWFILTLKKKMYKYQFGQYAWTHMILIVVFTQSSFTVANIFEGIFWFLLPASLIIINDIFAYIFGFFFGRTPLIKLSPKKTWEGFIGASVTTIISAFVLANILGRFPWLTCPRQDLSTGWLQCDADPLFKPEPFALPAWIPEWFPWKEMTILPVQWHALCLGLFASIIAPFGGFFASGFKRAFKIKDFGDSIPGHGGITDRMDCQMVMAVFAYIYLQSFIVSQSVSVDKILDQILTNLTFEEQQALFVKLGQMLKDKLS

SEQ ID NO: 2475 - protein, 363 aa, Arabidopsis thaliana
MIGGFVLVVYMGHLYITAMVVVIQIFMAKELFNLLRKAPEDKCLPYIKQLNWHFFFTAMLFVYGRILSQRLANTMTADQFFYRLVSGLIKYHMAICYLLYIIGFMWFILTLKKKMYKYQFGQYAWTHMILIVVFTQSSFTVANIFEGIFWFLLPASLIIINDIFAYIFGFFFGRTPLIKLSPKKTWEGFIGASVTTIISAFVLANILGRFPWLTCPRQDLSTGWLQCDADPLFKPEPFALPAWIPEWFPWKEMTILPVQWHALCLGLFASIIAPFGGFFASGFKRAFKIKDFGDSIPGHGGITDRMDCQMVMAVFAYIYLQSFIVSQSVSVDKILDQILTNLTFEEQQALFVKLGQMLKDKLS

SEQ ID NO: 2476 - DNA, 1840 bp, Arabidopsis thaliana
tcccccccaatttctacacgccgtgtcggcaaagcctctcgtcacttctctctgacgcttgtcgtcacttttgaatttttttaatttttaaataattgataaccgaaacggtgcgttttactcaccgtcgtcgggaaaaaaaacatgaggaaggaagttttgccgccggtgttatcaaccaccacagtatgtttcgagaagaaaccaataattgctacattactagctctctctctcgtcatgattgtctggaaccttcctccttactaccacaacctcatctccaccgctcgtccctgctccgccgtcaccaccaccaccaccaccaccttactctcctcatcgaacttcacttcggcggagaatttcaccacctctctctcaacgacaactgcagcagcttctcagaagtacgattcaactccctcagatccgaacaaacgcgttttccaaccgttcggaaacgcggcggcgttattcgtactaatgggagcttaccgcggcggtccaacgacgttttccgttatcggactcgcgtcgaaaccgatccacgtttacggaaaaccatggtacaagtgtgagtggatatctaacaatggaacttcgattcgagctaaagcacagaagattctaccagattggggatacggacgagtctacaccgtcgtcgtcgtcaattgcactttcaattcaaaccctaactccgataacaccggaggtaaactcattctcaacgcttactacaacgaatctcccaaactctttgaacgattcactacgttagaagaatcagctggaatctacgacgaatcgaaatactcgccgccgtatcagtacgattacctctattgtggctcgtcactgtacggtaacgtgagcgcgtcgcgtatgagagagtggatggcttaccacgcttggttctttggtgacaaatcgcattttgttttccacgatgctggtggtgtgtcgccggaagttaggaaggttcttgagccgtggattcgagctgggagggtcacggttcagaatattcgggatcagtcgcagtatgatggttactactataatcagtttcttattgttaatgattgcttgcatcggtatcgatacgctgcgaattggaccttcttcttcgatgtcgatgagtatatctatttgccgcatggtaatacactcgaatccgtgctcgatgagttctcggttaacacgcagtttacgattgagcagaatccaatgtctagtgttctttgcataaacgactcttctcaagattatccaaggcaatggggatttgagaaattgttatttaaggattcaaggacgaagatacgacgtgatagaaaatatgcaatccaagcgaagaacgcatttgctacaggagttcatatgtctgaaaacattgtaggcaaaacactacacaagacagagacaaagattcgttattaccattaccacaacaccataactgtgcatgaggagctttgtagagagatgttaccaaattcagccaagaagaaggtgacattgtacaataagcttccgtatgtgtatgatgacaacatgaagaagctagtgaagacgattaaagagtttgagcagaaaaaacttgggacggatgtgaagaatttctcatgaccataatatagctgtaatctctctgataagcattttgtctataaaggtatagttgtttctacattacatgtatcatttttcattctgttttgtcctcttttactatttcattaatgactttgatcaatatttttgaaaattacttgtgttttcttttgttatgtattgaacttaatagaaattagagttactcaagaccttggac

SEQ ID NO: 2477 - protein, 496 aa, Arabidopsis thaliana
MRKEVLPPVLSTTTVCFEKKPIIATLLALSLVMIVWNLPPYYHNLISTARPCSAVTTTTTTTLLSSSNFTSAENFTTSLSTTTAAASQKYDSTPSDPNKRVFQPFGNAAALFVLMGAYRGGPTTFSVIGLASKPIHVYGKPWYKCEWISNNGTSIRAKAQKILPDWGYGRVYTVVVVNCTFNSNPNSDNTGGKLILNAYYNESPKLFERFTTLEESAGIYDESKYSPPYQYDYLYCGSSLYGNVSASRMREWMAYHAWFFGDKSHFVFHDAGGVSPEVRKVLEPWIRAGRVTVQNIRDQSQYDGYYYNQFLIVNDCLHRYRYAANWTFFFDVDEYIYLPHGNTLESVLDEFSVNTQFTIEQNPMSSVLCINDSSQDYPRQWGFEKLLFKDSRTKIRRDRKYAIQAKNAFATGVHMSENIVGKTLHKTETKIRYYHYHNTITVHEELCREMLPNSAKKKVTLYNKLPYVYDDNMKKLVKTIKEFEQKKLGTDVKNFS

SEQ ID NO: 2478 - protein, 464 aa, Arabidopsis thaliana
MIVWNLPPYYHNLISTARPCSAVTTTTTTTLLSSSNFTSAENFTTSLSTTTAAASQKYDSTPSDPNKRVFQPFGNAAALFVLMGAYRGGPTTFSVIGLASKPIHVYGKPWYKCEWISNNGTSIRAKAQKILPDWGYGRVYTVVVVNCTFNSNPNSDNTGGKLILNAYYNESPKLFERFTTLEESAGIYDESKYSPPYQYDYLYCGSSLYGNVSASRMREWMAYHAWFFGDKSHFVFHDAGGVSPEVRKVLEPWIRAGRVTVQNIRDQSQYDGYYYNQFLIVNDCLHRYRYAANWTFFFDVDEYIYLPHGNTLESVLDEFSVNTQFTIEQNPMSSVLCINDSSQDYPRQWGFEKLLFKDSRTKIRRDRKYAIQAKNAFATGVHMSENIVGKTLHKTETKIRYYHYHNTITVHEELCREMLPNSAKKKVTLYNKLPYVYDDNMKKLVKTIKEFEQKKLGTDVKNFS

SEQ ID NO: 2479 - protein, 382 aa, Arabidopsis thaliana
MGAYRGGPTTFSVIGLASKPIHVYGKPWYKCEWISNNGTSIRAKAQKILPDWGYGRVYTVVVVNCTFNSNPNSDNTGGKLILNAYYNESPKLFERFTTLEESAGIYDESKYSPPYQYDYLYCGSSLYGNVSASRMREWMAYHAWFFGDKSHFVFHDAGGVSPEVRKVLEPWIRAGRVTVQNIRDQSQYDGYYYNQFLIVNDCLHRYRYAANWTFFFDVDEYIYLPHGNTLESVLDEFSVNTQFTIEQNPMSSVLCINDSSQDYPRQWGFEKLLFKDSRTKIRRDRKYAIQAKNAFATGVHMSENIVGKTLHKTETKIRYYHYHNTITVHEELCREMLPNSAKKKVTLYNKLPYVYDDNMKKLVKTIKEFEQKKLGTDVKNFS

SEQ ID NO: 2480 - DNA, 1613 bp, Arabidopsis thaliana
aaagaaagaatcgtaacagacggatcacaaacagtcacagatccgagccctgttttgagtttacgagaagaatattaaaattctcatctttaaccattttatccgatcatgaatgtgagagacgagggaaaaactacggcggagaaacacggcggaggagaggagaataaatcaccggagaacaaatggcgatttaattctcctctagctcaagtgagcttaatgggattcgtttgtttctgttgtccaggaatgttcaacgctctctccggcatgggaggcggtggtcaagtagatccaaccgctgctaacaacgctaacaccgccgtttacaccgctttcaccgttttcggccttttaggcggcgggttttacaacgtcctcggtccacggctcacgttagccgctggatgttcgacttacgtactctacgccggatctttcctctactacaaccatcaccaccaccaagccttcgcgatagtcgccggagctttactcggttgcggcgcgggacttctctgggccggagaaggagctgtgatgacgtcataccctccgccgcatcggaaaggcacttacatagcgttgttctggagtatcttcaatctcggcggcgttatcggtggattaatcccgtttatcctcaactaccaacgtagctccgccgcatcggtcaacgactcgacgtacatagcgttcatgtgtttcatgttcgccggcgttcttctctctttcggtatcctcccggcgacctccgtgatccgtaacgacggatctagatgctctgccgtgaaatactcccgtccgtcaactgaagcagccgccgtgctacggctattcctcgatcggaaaatgctcctcatcgtccccgcggcttgggctagcaatttcttctacagctatcaattcaacaatgtgaatggactcctctttaacttaagaaccagaggattcaacaatgtcttctactggggagctcaaatggctggatccatcgccattggttacgtgatggacttcagcttcaaaagccggcgagctagaggattcaccggaatatcactagtcgcggtaatcggaaccattatatgggcgggcgggttagcgaatcagcacggttactcgttggacaaactaccggaaaagaaacttgattttaaagattccgggatagagtttgcgggaccattcgtgttatatatgagctatggattgttagatgcaatgtatcagagtatggtttattggttgataggagcattggctgatgattcgcagactttgagtagatatagtggattctacaaaggagtgcagagtgcaggagctgcagtggcttggcaagtggatactcgtaaggttccgttaatgtcacagcttattgttaattggtcacttactactgtaagttatcctttacttgttcttcttgtgtatttttatgttaaaaatgataatgatgatgatagtaatgataaggtttagaagatagtagtttattagaacattgagtaagttaactgttttttaatacgatgacgttctgttatgaatgtaacagttacatagagaaacaaagatttgaggctctgaaatgcctttattctttt

SEQ ID NO: 2481 - protein, 459 aa, Arabidopsis thaliana
MNVRDEGKTTAEKHGGGEENKSPENKWRFNSPLAQVSLMGFVCFCCPGMFNALSGMGGGGQVDPTAANNANTAVYTAFTVFGLLGGGFYNVLGPRLTLAAGCSTYVLYAGSFLYYNHHHHQAFAIVAGALLGCGAGLLWAGEGAVMTSYPPPHRKGTYIALFWSIFNLGGVIGGLIPFILNYQRSSAASVNDSTYIAFMCFMFAGVLLSFGILPATSVIRNDGSRCSAVKYSRPSTEAAAVLRLFLDRKMLLIVPAAWASNFFYSYQFNNVNGLLFNLRTRGFNNVFYWGAQMAGSIAIGYVMDFSFKSRRARGFTGISLVAVIGTIIWAGGLANQHGYSLDKLPEKKLDFKDSGIEFAGPFVLYMSYGLLDAMYQSMVYWLIGALADDSQTLSRYSGFYKGVQSAGAAVAWQVDTRKVPLMSQLIVNWSLTTVSYPLLVLLVYFYVKNDNDDDSNDKV

SEQ ID NO: 2482 - protein, 421 aa, Arabidopsis thaliana
MGFVCFCCPGMFNALSGMGGGGQVDPTAANNANTAVYTAFTVFGLLGGGFYNVLGPRLTLAAGCSTYVLYAGSFLYYNHHHHQAFAIVAGALLGCGAGLLWAGEGAVMTSYPPPHRKGTYIALFWSIFNLGGVIGGLIPFILNYQRSSAASVNDSTYIAFMCFMFAGVLLSFGILPATSVIRNDGSRCSAVKYSRPSTEAAAVLRLFLDRKMLLIVPAAWASNFFYSYQFNNVNGLLFNLRTRGFNNVFYWGAQMAGSIAIGYVMDFSFKSRRARGFTGISLVAVIGTIIWAGGLANQHGYSLDKLPEKKLDFKDSGIEFAGPFVLYMSYGLLDAMYQSMVYWLIGALADDSQTLSRYSGFYKGVQSAGAAVAWQVDTRKVPLMSQLIVNWSLTTVSYPLLVLLVYFYVKNDNDDDSNDKV

SEQ ID NO: 2483 - protein, 411 aa, Arabidopsis thaliana
MFNALSGMGGGGQVDPTAANNANTAVYTAFTVFGLLGGGFYNVLGPRLTLAAGCSTYVLYAGSFLYYNHHHHQAFAIVAGALLGCGAGLLWAGEGAVMTSYPPPHRKGTYIALFWSIFNLGGVIGGLIPFILNYQRSSAASVNDSTYIAFMCFMFAGVLLSFGILPATSVIRNDGSRCSAVKYSRPSTEAAAVLRLFLDRKMLLIVPAAWASNFFYSYQFNNVNGLLFNLRTRGFNNVFYWGAQMAGSIAIGYVMDFSFKSRRARGFTGISLVAVIGTIIWAGGLANQHGYSLDKLPEKKLDFKDSGIEFAGPFVLYMSYGLLDAMYQSMVYWLIGALADDSQTLSRYSGFYKGVQSAGAAVAWQVDTRKVPLMSQLIVNWSLTTVSYPLLVLLVYFYVKNDNDDDSNDKV

SEQ ID NO: 2484 - DNA, 2365 bp, Arabidopsis thaliana
agagagaaaaaaaaaatgaagagaaggagactttttttctctgttctactctctatcctaactctgttcatcaatggtcctttgataacgacagctcaatctccaccttcttcttcaacttcatgtaaccgtatctgtggaggaatcgagattccttttccttttggaatcggacgaagagactgttttctcaacgactggtacgaggttgtctgtaacagcaccacctccggtaaatccttagctccgttcctctataagatcaacagagaattagttagcatcactcttcgaagcagcatcgacagttcctacggagttgttcacattaaatctccggtgacttcctccggctgttctcaacgacccgtaaagcctcttcctttaaacctcaccggtaaaggaagtccctttttcatcaccgactcgaatcgtctcgtctcagttggttgtgacaacagagcattgattacagacatcgaatctcagatcacaggatgcgaatcgagctgcgacggagataagagtcgtttagacaagatctgcggtggttacacatgttgtcaggcgaagattccggcggatagaccgcaagtaatcggcgttgaccttgaaagctccggtggtaacacaactcaaggaggaaactgtaaagttgctttcttgacgaatgagacttactctccggcgaatgttacagagccggaacaattttatactaatgggtttacggtgattgagcttggttggtactttgatacatcagattctcggttaacgaatcctgtgggttgtgtgaatttgacggaaacagggatttacacgagcgcaccgagctgtgtttgtgagtatggtaacttctctggctttggttacagtaactgttactgcaatcagattggttacagagggaatccttatcttcctggtggatgcattgacattgacgaatgtgaggaaggaaaaggactaagcagctgtggagaactaacttgtgtgaatgttcctggatcgtggaggtgcgagctgaatggagtagggaagatcaagcctctgtttccaggtcttgttctaggttttccactgttgttcttggtacttgggatatggggattgatcaagttcgttaagaagagaaggaagattatccgaaagagaatgttctttaaacgtaatggaggcttgttgttgaaacaacagttaactacaagaggaggtaatgtgcagtcatcgaagatattcagttcgaaagagctggagaaagcgacggataacttcaatatgaacagggttcttgggcaaggaggtcaaggcactgtctacaaaggaatgttggtagatgggcgaattgttgctgtgaaaagatctaaagttttagatgaagataaagttgaggagtttatcaatgaagttggtgttctctcgcagattaaccatagaaatattgtcaaactcatggggtgttgtctcgagacagaggttcctatcttggtttatgaacatattccaaatggagacctattcaagcggcttcaccatgattctgatgattacactatgacttgggatgtgcgattgcgcatctctgttgagattgcaggagcacttgcttacttgcactcggctgcatcaactccggtctatcatagagatgtcaagaccacaaacatacttttggatgagaagtatagagccaaggtatcggatttcgggacctcgagatccataaacgtagatcaaactcacttgactactctagttgcaggtacttttggatacttggatccagagtactttcaaactagccagtttacggataaaagtgatgtttatagttttggggtcgtcttggttgagctcataactggagaaaagccgttttctgtaatgcggcccgaagaaaacagaggacttgtgtctcatttcaatgaggctatgaaacagaacagagttcttgatattgttgattctcggatcaaagaaggttgcacgttggaacaagtgttggctgtggcgaaacttgccagaaggtgtttaagtctaaaagggaagaaacgaccaaatatgagagaggtttcagttgagcttgagaggatccgttcatcacccgaagatttggagttacatattgaagaggaggacgaagaagaatgcgccatggaaatcaacatggatgattcttggagcgtcgacatgactgctccagcttccctctttgatttatcgcccaagttagacgttgaaccgctggttcctcaacgaacatggtgatgatggaacctaaaacactgcaaatgtacaaagtgctgtgataacaaattctctcaatgttccattctttattaataaaaaatttgatgatgtc

SEQ ID NO: 2485 - protein, 756 aa, Arabidopsis thaliana
REKKKMKRRRLFFSVLLSILTLFINGPLITTAQSPPSSSTSCNRICGGIEIPFPFGIGRRDCFLNDWYEVVCNSTTSGKSLAPFLYKINRELVSITLRSSIDSSYGVVHIKSPVTSSGCSQRPVKPLPLNLTGKGSPFFITDSNRLVSVGCDNRALITDIESQITGCESSCDGDKSRLDKICGGYTCCQAKIPADRPQVIGVDLESSGGNTTQGGNCKVAFLTNETYSPANVTEPEQFYTNGFTVIELGWYFDTSDSRLTNPVGCVNLTETGIYTSAPSCVCEYGNFSGFGYSNCYCNQIGYRGNPYLPGGCIDIDECEEGKGLSSCGELTCVNVPGSWRCELNGVGKIKPLFPGLVLGFPLLFLVLGIWGLIKFVKKRRKIIRKRMFFKRNGGLLLKQQLTTRGGNVQSSKIFSSKELEKATDNFNMNRVLGQGGQGTVYKGMLVDGRIVAVKRSKVLDEDKVEEFINEVGVLSQINHRNIVKLMGCCLETEVPILVYEHIPNGDLFKRLHHDSDDYTMTWDVRLRISVEIAGALAYLHSAASTPVYHRDVKTTNILLDEKYRAKVSDFGTSRSINVDQTHLTTLVAGTFGYLDPEYFQTSQFTDKSDVYSFGVVLVELITGEKPFSVMRPEENRGLVSHFNEAMKQNRVLDIVDSRIKEGCTLEQVLAVAKLARRCLSLKGKKRPNMREVSVELERIRSSPEDLELHIEEEDEEECAMEINMDDSWSVDMTAPASLFDLSPKLDVEPLVPQRTW

SEQ ID NO: 2486 - protein, 751 aa, Arabidopsis thaliana
MKRRRLFFSVLLSILTLFINGPLITTAQSPPSSSTSCNRICGGIEIPFPFGIGRRDCFLNDWYEVVCNSTTSGKSLAPFLYKINRELVSITLRSSIDSSYGVVHIKSPVTSSGCSQRPVKPLPLNLTGKGSPFFITDSNRLVSVGCDNRALITDIESQITGCESSCDGDKSRLDKICGGYTCCQAKIPADRPQVIGVDLESSGGNTTQGGNCKVAFLTNETYSPANVTEPEQFYTNGFTVIELGWYFDTSDSRLTNPVGCVNLTETGIYTSAPSCVCEYGNFSGFGYSNCYCNQIGYRGNPYLPGGCIDIDECEEGKGLSSCGELTCVNVPGSWRCELNGVGKIKPLFPGLVLGFPLLFLVLGIWGLIKFVKKRRKIIRKRMFFKRNGGLLLKQQLTTRGGNVQSSKIFSSKELEKATDNFNMNRVLGQGGQGTVYKGMLVDGRIVAVKRSKVLDEDKVEEFINEVGVLSQINHRNIVKLMGCCLETEVPILVYEHIPNGDLFKRLHHDSDDYTMTWDVRLRISVEIAGALAYLHSAASTPVYHRDVKTTNILLDEKYRAKVSDFGTSRSINVDQTHLTTLVAGTFGYLDPEYFQTSQFTDKSDVYSFGVVLVELITGEKPFSVMRPEENRGLVSHFNEAMKQNRVLDIVDSRIKEGCTLEQVLAVAKLARRCLSLKGKKRPNMREVSVELERIRSSPEDLELHIEEEDEEECAMEINMDDSWSVDMTAPASLFDLSPKLDVEPLVPQRTW

SEQ ID NO: 2487 - DNA, 1679 bp, Arabidopsis thaliana
acaaatcaaaacaacataattaacttacccaaacaagaaacccaagaatccaaaatggaaatgctcaacgcaataattctcatcctatttccaatcatagggtttgtattaatcttctcattcccaacaaaaaccctaaaagccaaaaccgcatcaccctctaatccgacatcgtaccaactcatcggctctattctctccttcaacaaaaaccgccaccgtcttctccaatggtacacagatctcctccgtctctctccgtctcaaaccatcaccgtcgatctcctcttcggtcgtcggactatcatcactgcaaaccctgaaaacgttgagcacattctcaaaacaaatttttataacttccctaaaggcaaacctttcaccgacctcctaggagatctactcggcggcggaatctttaattctgacggcgagttatggagctcacagcgtaaactcgcgagccacgagtttacaatgcgttctcttagggaattcactttcgaaatcctccgtgaagaagtccaaaaccgcctcattccggtgctttcctccgccgtggactgtggagagacggttgattttcaggaggttttgaagcgctttgctttcgatgttgtatgcaaagtgtcgttgggttgggatccggattgtttggatttgacccgacccgttccagaacttgttaaggcttttgatgtagcggcggagatcagcgctcgccgcgccacggagccggtttacgccgtgtggaaagtaaagcgtttcttgaacgtagggagcgagaagaggttgagagaagccatcaagaccgtacacttgtctgtgtctgagatcatccgggccaaaaagaaaagcctcgatatcggtggtgacgtgtcggacaagcaggacctgctgtcgaggtttctcgccgctggccacggggaagaagccgtgagggatagtgtaatcagctttattatggcgggaagggatacaacgtcggcagcgatgacgtggctgttttggttgttgagtcaaaatgatgacgtggagacgaagatactcgacgaattgagaaacaaagggtctttagggttagggtttgaggatttgagagagatgagttacacaaaagcttgtctgtgtgaagcaatgaggctttacccaccagtggcttgggactcaaagcatgcagcaaacgacgacattttgccagatggaacacctctcaaaaagggagacaaagtcacttatttcccttacggtatgggaaggatggagaaggtgtggggtaaagattgggacgagtttaaaccaaaccggtggtttgaggaagaaccgagttacggtacaaaaccggttttgaaaagtgtgagttcgttcaagtttccggttttccaagccggaccaagggtttgcataggtaaagaaatggcttttacacaaatgaaagacgtggttggttcagttttgagtcggtttaagattataccggtttgcaataaccggccggtctttgttcctcttctaaccgctcacatggctggtgggctaaaggtgaagatcaagaggagagagcaatgtgattcgatgtatatttaattaattgattaatcaagtcatgtccttgtagaatatccaactaatatgtaaaatgtgtggtttataaattaaatcaaataaatatattatat

SEQ ID NO: 2488 - protein, 528 aa, Arabidopsis thaliana
TNQNNIINLPKQETQESKMEMLNAIILILFPIIGFVLIFSFPTKTLKAKTASPSNPTSYQLIGSILSFNKNRHRLLQWYTDLLRLSPSQTITVDLLFGRRTIITANPENVEHILKTNFYNFPKGKPFTDLLGDLLGGGIFNSDGELWSSQRKLASHEFTMRSLREFTFEILREEVQNRLIPVLSSAVDCGETVDFQEVLKRFAFDVVCKVSLGWDPDCLDLTRPVPELVKAFDVAAEISARRATEPVYAVWKVKRFLNVGSEKRLREAIKTVHLSVSEIIRAKKKSLDIGGDVSDKQDLLSRFLAAGHGEEAVRDSVISFIMAGRDTTSAAMTWLFWLLSQNDDVETKILDELRNKGSLGLGFEDLREMSYTKACLCEAMRLYPPVAWDSKHAANDDILPDGTPLKKGDKVTYFPYGMGRMEKVWGKDWDEFKPNRWFEEEPSYGTKPVLKSVSSFKFPVFQAGPRVCIGKEMAFTQMKDVVGSVLSRFKIIPVCNNRPVFVPLLTAHMAGGLKVKIKRREQCDSMYI

SEQ ID NO: 2489 - protein, 510 aa, Arabidopsis thaliana
MEMLNAIILILFPIIGFVLIFSFPTKTLKAKTASPSNPTSYQLIGSILSFNKNRHRLLQWYTDLLRLSPSQTITVDLLFGRRTIITANPENVEHILKTNFYNFPKGKPFTDLLGDLLGGGIFNSDGELWSSQRKLASHEFTMRSLREFTFEILREEVQNRLIPVLSSAVDCGETVDFQEVLKRFAFDVVCKVSLGWDPDCLDLTRPVPELVKAFDVAAEISARRATEPVYAVWKVKRFLNVGSEKRLREAIKTVHLSVSEIIRAKKKSLDIGGDVSDKQDLLSRFLAAGHGEEAVRDSVISFIMAGRDTTSAAMTWLFWLLSQNDDVETKILDELRNKGSLGLGFEDLREMSYTKACLCEAMRLYPPVAWDSKHAANDDILPDGTPLKKGDKVTYFPYGMGRMEKVWGKDWDEFKPNRWFEEEPSYGTKPVLKSVSSFKFPVFQAGPRVCIGKEMAFTQMKDVVGSVLSRFKIIPVCNNRPVFVPLLTAHMAGGLKVKIKRREQCDSMYI

SEQ ID NO: 2490 - protein, 508 aa, Arabidopsis thaliana
MLNAIILILFPIIGFVLIFSFPTKTLKAKTASPSNPTSYQLIGSILSFNKNRHRLLQWYTDLLRLSPSQTITVDLLFGRRTIITANPENVEHILKTNFYNFPKGKPFTDLLGDLLGGGIFNSDGELWSSQRKLASHEFTMRSLREFTFEILREEVQNRLIPVLSSAVDCGETVDFQEVLKRFAFDVVCKVSLGWDPDCLDLTRPVPELVKAFDVAAEISARRATEPVYAVWKVKRFLNVGSEKRLREAIKTVHLSVSEIIRAKKKSLDIGGDVSDKQDLLSRFLAAGHGEEAVRDSVISFIMAGRDTTSAAMTWLFWLLSQNDDVETKILDELRNKGSLGLGFEDLREMSYTKACLCEAMRLYPPVAWDSKHAANDDILPDGTPLKKGDKVTYFPYGMGRMEKVWGKDWDEFKPNRWFEEEPSYGTKPVLKSVSSFKFPVFQAGPRVCIGKEMAFTQMKDVVGSVLSRFKIIPVCNNRPVFVPLLTAHMAGGLKVKIKRREQCDSMYI

SEQ ID NO: 2491 - DNA, 684 bp, Arabidopsis thaliana
ataagaggcagcgaacgaaagttcgattccgagaaagtgagagaaaatgacgaagagagctcccaagtcagggcctttgtctccgtcgtgcagcggaggctctagtcggaacttagagttggctgtgaagtcaagtgaaggtgcaaggaggtctacaagactgagacttcagcctttgagaaagccaaagacaagccccaagaagaaacccgttaaactccaaacgaagatgcccaagaaacctgccactgctttcttctttttcctggatgatttccggaagcaatatcaagaggagaatccagatgtcaagtccatgcgcgagattgggaagacatgtggagagaaatggaaaacaatgacttacgaggaaaaggtaaagtattatgatatagctactgagaagagggaagaatttcaccgagcaatgacagaatataccaagagaatggaatcaggtgcccacgatgaatcagagaccgactcagactattctgaatagattactttttagtttctaccacattagaaacattgttctaagccttctaggatgggtttgtatatcggtgatatttaagagtttctgtttcgtttttgagatcattctttcactgatactcatgtttctgtggattgcatttggagatcaatgaatactaaccagtttcttgagtggttgcc

SEQ ID NO: 2492 - protein, 151 aa, Arabidopsis thaliana
MTKRAPKSGPLSPSCSGGSSRNLELAVKSSEGARRSTRLRLQPLRKPKTSPKKKPVKLQTKMPKKPATAFFFFLDDFRKQYQEENPDVKSMREIGKTCGEKWKTMTYEEKVKYYDIATEKREEFHRAMTEYTKRMESGAHDESETDSDYSE

SEQ ID NO: 2493 - protein, 90 aa, Arabidopsis thaliana
MPKKPATAFFFFLDDFRKQYQEENPDVKSMREIGKTCGEKWKTMTYEEKVKYYDIATEKREEFHRAMTEYTKRMESGAHDESETDSDYSE

SEQ ID NO: 2494 - DNA, 1934 bp, Arabidopsis thaliana
agagttagagagagagagaccacgccagatatacctttcttgtttcaccggttttcatacacaaaaatggcgggcagtgcctcattcgccgccgcattattcatcggactctctcttctcttcgccgtcacggctgaagatccgtacagattctttgaatggaacataacttacggcgatatatacccactcggtgttcgccaacagggtattttgatcaacggggcgtttccgggaccggacattcattcggttactaatgacaatctcatcatcaacgtctacaatagcctcgacgaacctttccttctttcatggaatggaattcaacagaggaggaactctttcgttgatggagtgtatggaacgacatgcccaatcccgccggggaagaactacacttacattcttcagatgaaggatcagatcggaagtttttactacttcccttctctcggctttcacaaagccgccggtggatttggtggcattcgtatcctcagtcgtcctagaatcccggtccctttccctgatcccgccggagataccactgtccttatcggagactggtacaaagcaaaccacacggatttgagagcacagcttgataatggtaagaagcttcctttaccagacggcatcctcatcaatggtcgttcaagtggtgcaactcttaatgttgaacaaggtaagacatacaggtttagaatatccaatgtagggttacaagactctctcaacttccgcattcaagaccataagatgaaagtggtggaagtcgaaggaacacacactcttcagactactttctcttcactagatgttcatgttggacaatcttactcagtccttgtaaccgcggaccagactccacgggattattacgtggtcgtctcttctcggtttacctcaaatgtccttactaccacgggtattttccgatacagtaattctgctggtggtgtttctggacctattcctggtggacctaccattcaaatcgactggtccttgaaccaggctcgagccatcaggactaacctttcagcgagcggaccaaggccaaatccacaaggatcgtaccactacggtatgataaacactacaagaacgatcagacttgctagctctgctggtcaggttgatgggaagcaacgatacgctgtgaacagtgtctcattcaaacccgcagacactcctctgaaaatcgcggactacttcaagattgacggtgtttacagaagtggaagcatacagtaccaacccactggtggaggaatatacctcgacacatctgttatgcaagttgattacagaacctttgtggagattattttcgaaaattctgaggatattgtccagagctggcatcttgatggttactctttctgggttgttggaatggatggtggacagtggagtccagatagtaggaacgagtataacctacgcgatgcagtcgctcgctgcaccgttcaggtatacccaagctcatggacggctatattgatagcactcgacaacgtaggaatgtggaatctaagacccgagttctgggcgaggcaatacttaggacaacaattgtatttacgtgtgtacacaccctcaacttctctcagagatgaatatccaatccccaagaacgctcttctctgcgggagagccagtggtcgcagcaccagaccgctttgagctggtggttagatatagaaatgacggagagatggtcagccaaaccagctgacgcgttcttgaggcgggtttcttgttttatacacattcttcattttgctaatgaatgagaagagtttatgttaaaatcagtatatcagtttgtaacgatctcagctcgaggtctcattcttgattcttatattctttctttttctatggaacgaaacatttattcaatataattccacagtttcatcgtg

SEQ ID NO: 2495 - protein, 563 aa, Arabidopsis thaliana
RVRERETTPDIPFLFHRFSYTKMAGSASFAAALFIGLSLLFAVTAEDPYRFFEWNITYGDIYPLGVRQQGILINGAFPGPDIHSVTNDNLIINVYNSLDEPFLLSWNGIQQRRNSFVDGVYGTTCPIPPGKNYTYILQMKDQIGSFYYFPSLGFHKAAGGFGGIRILSRPRIPVPFPDPAGDTTVLIGDWYKANHTDLRAQLDNGKKLPLPDGILINGRSSGATLNVEQGKTYRFRISNVGLQDSLNFRIQDHKMKVVEVEGTHTLQTTFSSLDVHVGQSYSVLVTADQTPRDYYVVVSSRFTSNVLTTTGIFRYSNSAGGVSGPIPGGPTIQIDWSLNQARAIRTNLSASGPRPNPQGSYHYGMINTTRTIRLASSAGQVDGKQRYAVNSVSFKPADTPLKIADYFKIDGVYRSGSIQYQPTGGGIYLDTSVMQVDYRTFVEIIFENSEDIVQSWHLDGYSFWVVGMDGGQWSPDSRNEYNLRDAVARCTVQVYPSSWTAILIALDNVGMWNLRPEFWARQYLGQQLYLRVYTPSTSLRDEYPIPKNALLCGRASGRSTRPL

SEQ ID NO: 2496 - protein, 541 aa, Arabidopsis thaliana
MAGSASFAAALFIGLSLLFAVTAEDPYRFFEWNITYGDIYPLGVRQQGILINGAFPGPDIHSVTNDNLIINVYNSLDEPFLLSWNGIQQRRNSFVDGVYGTTCPIPPGKNYTYILQMKDQIGSFYYFPSLGFHKAAGGFGGIRILSRPRIPVPFPDPAGDTTVLIGDWYKANHTDLRAQLDNGKKLPLPDGILINGRSSGATLNVEQGKTYRFRISNVGLQDSLNFRIQDHKMKVVEVEGTHTLQTTFSSLDVHVGQSYSVLVTADQTPRDYYVVVSSRFTSNVLTTTGIFRYSNSAGGVSGPIPGGPTIQIDWSLNQARAIRTNLSASGPRPNPQGSYHYGMINTTRTIRLASSAGQVDGKQRYAVNSVSFKPADTPLKIADYFKIDGVYRSGSIQYQPTGGGIYLDTSVMQVDYRTFVEIIFENSEDIVQSWHLDGYSFWVVGMDGGQWSPDSRNEYNLRDAVARCTVQVYPSSWTAILIALDNVGMWNLRPEFWARQYLGQQLYLRVYTPSTSLRDEYPIPKNALLCGRASGRSTRPL

SEQ ID NO: 2497 - protein, 425 aa, Arabidopsis thaliana
MKDQIGSFYYFPSLGFHKAAGGFGGIRILSRPRIPVPFPDPAGDTTVLIGDWYKANHTDLRAQLDNGKKLPLPDGILINGRSSGATLNVEQGKTYRFRISNVGLQDSLNFRIQDHKMKVVEVEGTHTLQTTFSSLDVHVGQSYSVLVTADQTPRDYYVVVSSRFTSNVLTTTGIFRYSNSAGGVSGPIPGGPTIQIDWSLNQARAIRTNLSASGPRPNPQGSYHYGMINTTRTIRLASSAGQVDGKQRYAVNSVSFKPADTPLKIADYFKIDGVYRSGSIQYQPTGGGIYLDTSVMQVDYRTFVEIIFENSEDIVQSWHLDGYSFWVVGMDGGQWSPDSRNEYNLRDAVARCTVQVYPSSWTAILIALDNVGMWNLRPEFWARQYLGQQLYLRVYTPSTSLRDEYPIPKNALLCGRASGRSTRPL

SEQ ID NO: 2498 - DNA, 1152 bp, Arabidopsis thaliana
ttgaggtttaagatcttcaaaacatgaagaacatatgagattctgaggttgtctttacacaaagccgtctcttttaaccttattcttcatcatcgaccatacgattacagtcgtcttagtttatgatcttcgtaaagtgaataacttttcatccctcgattattctctatgataaactgcgtttaattctttcaaaaaaaaaatcatttcttgcccaagtttggatctttttggcatcgttaatctcaattctcaagacaggtagattgctaggtgctttagcggcagtgaacgatgatcggtcataggatctcaagattggggtctactattgttaaacagctcgcaagagagggatatttagcaacatacgggacaaagaatctacaccggtcttatggccactacttgcagtctttgccagtggtaccaaggcaagctaggacttctcaggaagcctggtttttgaagagccataagttttgtacttcttcaacaacttcctctgagaatggtgatgaagaaactgagaagataaccataatctttgttgataaggacggagaggaaattcctgttaaagtaccaattggaatgtcagtgctcgaagctgctcatgaaaatgatatagaccttgaaggggcttgtgaggcttctctagcgtgttcaacgtgtcatgtgattgtgatggatactgaatactataacaaacttgaagaaccaacagatgaagagaatgatatgcttgatcttgcttttgggctcacagaaacgtcacgactcggatgccaagtcattgcaagaccagagctagatggtgtgcgcttggctattccttcagcaacaaggaatttcgcggttgacgggtttgttccaaaacctcattagtttccgcagagattcttcgacttgaggcattaatgatcaaagagctgattcatgtttctattggagttttgatgattgcttaccgagaggaaacagttcttagacctgaggcatgaaatgatcaaagagatgattatgtttctattggaggacttgatgattttttttattacttatcttagttttgatattggcatttctcgttgttgtctgagtttctaacagaacaacaagcgttaagcaaattttttggagaataaacgc

SEQ ID NO: 2499 - protein, 197 aa, Arabidopsis thaliana
MIGHRISRLGSTIVKQLAREGYLATYGTKNLHRSYGHYLQSLPVVPRQARTSQEAWFLKSHKFCTSSTTSSENGDEETEKITIIFVDKDGEEIPVKVPIGMSVLEAAHENDIDLEGACEASLACSTCHVIVMDTEYYNKLEEPTDEENDMLDLAFGLTETSRLGCQVIARPELDGVRLAIPSATRNFAVDGFVPKPH

SEQ ID NO: 2500 - DNA, 1712 bp, Arabidopsis thaliana
ttggaacacaaaattagaaaaaacacaacacaaaaataaaaaaaacttaagaacattgtttcgagagatttggtttggagtgaaaatggcactagcaatcaacgtttcttcatcttcttcttctgcgatctcaagctctagcttcccttcttcagatctcaaagtaacaaaaatcggatcattgaggttattgaatcgtaccaatgtctctgcggcttctctgagtttgtccgggaagagatcctccgtgaaagctcttaatgtgcaatcaattacaaaggaatccattgttgcttctgaggttacagagaagctagatgtggtggaagttgaagactttgaggaactagcaaagagattagagaatgcttctcctcttgagatcatggataaagctcttgagaagtttgggaatgacattgctattgcctttagtggagctgaagatgttgctctgattgagtatgctcatttaactggaagaccttatagggtattcagtttggatacagggagattgaatccagaaacatatagactcttcgataccgtggagaaacattacggtattcggattgagtatatgtttcctgatgctgttgaggttcaagctttagttaggaacaagggtttgttctctttctatgaagatggtcaccaggagtgttgccgtattagaaaggtgagacctttgaggcgtgcgttgaagggtttacgtgcttggatcactggtcagaggaaagatcaatcacccgggacaagatcggagattcctgttgttcaggttgatccagtgtttgaaggattagatggtggagttggtagtttggtgaagtggaatccggttgctaatgttgaagggaatgatgtttggaatttcttgaggacgatggatgttcctgtcaacacgcttcacgctgcgggttatgtttcaatcggatgtgagccatgcacgagagcggttttgccgggtcagcatgagagagaagggagatggtggtgggaagatgctaaggctaaagagtgtggccttcacaaagggaatatcaaggagaataccaatggaaacgcaaccgctaatgtcaacgggacagcctcagtcgcggatatcttcaatagcgagaatgttgtgaacttgagcaggcaagggattgagaatttgatgaagttagagaaccggaaagaggcttggatcgttgtgctttatgcaccgtggtgcccgttttgtcaggcaatggaagcttcattcgatgaattggcggataagctgggaggaagtggtgtgaaggttgctaagtttagagctgatggtgaccagaaggactttgccaaaaaggagttgcagcttggaagctttccaacaatacttgtgttcccaaagaactcttcaagaccaatcaagtatccatcagagaagagagatgttgattctttgacatctttcttgaatcttgttcggtaaatccgcaataaaatccgccgactctacgatgacgaagagatcaataatagaccatccagtctcgttccagattgctagaacagatgaagaaggtgaagatgagaatctctatttggagctttagccttttgtatagctgtggttaaaaataattacgccaaggttttgccttttgtgagtttatttttaccaattttcagtgtattactccttttttgcctttgtgatggatatgaacaagtttgatatg

SEQ ID NO: 2501 - protein, 486 aa, Arabidopsis thaliana
WNTKLEKTQHKNKKNLRTLFREIWFGVKMALAINVSSSSSSAISSSSFPSSDLKVTKIGSLRLLNRTNVSAASLSLSGKRSSVKALNVQSITKESIVASEVTEKLDVVEVEDFEELAKRLENASPLEIMDKALEKFGNDIAIAFSGAEDVALIEYAHLTGRPYRVFSLDTGRLNPETYRLFDTVEKHYGIRIEYMFPDAVEVQALVRNKGLFSFYEDGHQECCRIRKVRPLRRALKGLRAWITGQRKDQSPGTRSEIPVVQVDPVFEGLDGGVGSLVKWNPVANVEGNDVWNFLRTMDVPVNTLHAAGYVSIGCEPCTRAVLPGQHEREGRWWWEDAKAKECGLHKGNIKENTNGNATANVNGTASVADIFNSENVVNLSRQGIENLMKLENRKEAWIVVLYAPWCPFCQAMEASFDELADKLGGSGVKVAKFRADGDQKDFAKKELQLGSFPTILVFPKNSSRPIKYPSEKRDVDSLTSFLNLVR

SEQ ID NO: 2502 - protein, 458 aa, Arabidopsis thaliana
MALAINVSSSSSSAISSSSFPSSDLKVTKIGSLRLLNRTNVSAASLSLSGKRSSVKALNVQSITKESIVASEVTEKLDVVEVEDFEELAKRLENASPLEIMDKALEKFGNDIAIAFSGAEDVALIEYAHLTGRPYRVFSLDTGRLNPETYRLFDTVEKHYGIRIEYMFPDAVEVQALVRNKGLFSFYEDGHQECCRIRKVRPLRRALKGLRAWITGQRKDQSPGTRSEIPVVQVDPVFEGLDGGVGSLVKWNPVANVEGNDVWNFLRTMDVPVNTLHAAGYVSIGCEPCTRAVLPGQHEREGRWWWEDAKAKECGLHKGNIKENTNGNATANVNGTASVADIFNSENVVNLSRQGIENLMKLENRKEAWIVVLYAPWCPFCQAMEASFDELADKLGGSGVKVAKFRADGDQKDFAKKELQLGSFPTILVFPKNSSRPIKYPSEKRDVDSLTSFLNLVR

SEQ ID NO: 2503 - protein, 358 aa, Arabidopsis thaliana
MDKALEKFGNDIAIAFSGAEDVALIEYAHLTGRPYRVFSLDTGRLNPETYRLFDTVEKHYGIRIEYMFPDAVEVQALVRNKGLFSFYEDGHQECCRIRKVRPLRRALKGLRAWITGQRKDQSPGTRSEIPVVQVDPVFEGLDGGVGSLVKWNPVANVEGNDVWNFLRTMDVPVNTLHAAGYVSIGCEPCTRAVLPGQHEREGRWWWEDAKAKECGLHKGNIKENTNGNATANVNGTASVADIFNSENVVNLSRQGIENLMKLENRKEAWIVVLYAPWCPFCQAMEASFDELADKLGGSGVKVAKFRADGDQKDFAKKELQLGSFPTILVFPKNSSRPIKYPSEKRDVDSLTSFLNLVR

SEQ ID NO: 2504 - DNA, 1109 bp, Arabidopsis thaliana
aagaagatatttgttgctgatggcgggtacttgcacttcgataaggcctcgtctcattggctcttcttcaattgttgagctttcaaggttgattaatcgagctggagttcctttctctgtacgattctctacaagaaccagagccctccacggtggtggtttaaccgcacctacctctcgtgaggaaggtccttcttgtatcttcgttggacctattgattctgctcgcaaagaaactctagaagctctttatcgccaagctaaggatgcgtattacaatggcaagcctttgatagttgatgacatgtttgacagagttgagctaaagcttcggtggtatggttcaaaatctgttgtcaagtatcctcggtgtagtctactaagacagtcaacatatgctgatgcagaggatgatgcatcgcaagttctcctgttagctaccgtatggattatgattttcttatttggtagttcggcatgtgttttacccacgatatatggcgtcggcctggtttatggaggagatccgtttgactcagggcttgtctatagcaatcagttgtcatcttctgtgcctattttgtcaaagtttaatggcatcctcctctccgtgctagggcctgcttttggatatccgattgcatcttctgcagtaagagcacttaaagggttatggagaaatgacttaacggctctaaaaggagactgcccgaattgcggggaagaggttttcgcatttgtgagatccgatcaatcgaaccgatcagctcacaaagccgactgtcatgtctgtgagtgcaccttggagttccgtaccaaagtagagaaatctgcctcacgattggggagaaaatgggtttacggtaggatataccttgtttcacggccaaggagagatcggcgttcaaagtttacataattctaacaaaagaagaaagatttttttgggatggtttctactcaattgtgtattgtaaaaatgatactatagaaagcttttgtaacattcaaaagattcataaaaattgttactataacgttttgtctcttgtagccttatcttcagacagtttacaaaaacaaaacaaaagaacaaaaagattcgttcc

SEQ ID NO: 2505 - protein, 305 aa, Arabidopsis thaliana
RRYLLLMAGTCTSIRPRLIGSSSIVELSRLINRAGVPFSVRFSTRTRALHGGGLTAPTSREEGPSCIFVGPIDSARKETLEALYRQAKDAYYNGKPLIVDDMFDRVELKLRWYGSKSVVKYPRCSLLRQSTYADAEDDASQVLLLATVWIMIFLFGSSACVLPTIYGVGLVYGGDPFDSGLVYSNQLSSSVPILSKFNGILLSVLGPAFGYPIASSAVRALKGLWRNDLTALKGDCPNCGEEVFAFVRSDQSNRSAHKADCHVCECTLEFRTKVEKSASRLGRKWVYGRIYLVSRPRRDRRSKFT

SEQ ID NO: 2506 - protein, 299 aa, Arabidopsis thaliana
MAGTCTSIRPRLIGSSSIVELSRLINRAGVPFSVRFSTRTRALHGGGLTAPTSREEGPSCIFVGPIDSARKETLEALYRQAKDAYYNGKPLIVDDMFDRVELKLRWYGSKSVVKYPRCSLLRQSTYADAEDDASQVLLLATVWIMIFLFGSSACVLPTIYGVGLVYGGDPFDSGLVYSNQLSSSVPILSKFNGILLSVLGPAFGYPIASSAVRALKGLWRNDLTALKGDCPNCGEEVFAFVRSDQSNRSAHKADCHVCECTLEFRTKVEKSASRLGRKWVYGRIYLVSRPRRDRRSKFT

SEQ ID NO: 2507 - protein, 204 aa, Arabidopsis thaliana
MFDRVELKLRWYGSKSVVKYPRCSLLRQSTYADAEDDASQVLLLATVWIMIFLFGSSACVLPTIYGVGLVYGGDPFDSGLVYSNQLSSSVPILSKFNGILLSVLGPAFGYPIASSAVRALKGLWRNDLTALKGDCPNCGEEVFAFVRSDQSNRSAHKADCHVCECTLEFRTKVEKSASRLGRKWVYGRIYLVSRPRRDRRSKFT

SEQ ID NO: 2508 - DNA, 1175 bp, Arabidopsis thaliana
atcaattcaataaggaggaggaatagagagctaaagaaaaagaaaaaagactacatttctacaaggacgttggttcttttagtcgtcgtcggtcgtcgaagaaagatcttctccttctttcttcgccgtacgatcgtcgtctaatgggagaatcatcaaatccaatggctacaagttcttcttcctcctcctcctcaattcctccttcgtctccaacaccctctccgacgtccacaaccactccgccacgtcaacatcctctcctccagccaccatcttcaaaaaagaagaaaaacagaacaaacgttttcagagtcttacgcaccgtgtttcgatctttcccaatctttacaacaccatccgtagcatgcaaaatcccggttatacatcccggtttaggcttaccggatccacatcacaacacgtcaagaatcaccggaacgttattcggataccgtaaaggccgagtaagtctttccattcaagaaaaccctaaatgtttaccttctttagtcgtggagctcgccatgcaaaccacaacgcttcaaaaagagctaagcacgggaatggtgagaatagctctcgagactgagaaacagcctcgagctgataataacaattctaaaaccgagaagaagacagatattttggaagaaccgttatggacaatgtattgtaaaggagagaaaacgggttacggtgtgaaacgagaagcgaccgaagaagatcttaacgtgatggagttgttacgtccggtgtctatgggcgccggagttttgccgggaaactcggagtcggaaggacccgacggcgaaatggcgtatatgagagcttattttgagagagttattgggtctaaagattcagagactttttatatgttgagtcctgaagggaataatggacccgaacttagctttttctttgtgagagtttgacttattttgttatggttcaaattaatgtaacgtgtatgtaaatgaccggaaacggcggtggtcgtcgacgttatatactattgtttaggataattgtaagaattttttgttgttctttcgttgttaatctctcgatctttataaaaagattgaattgtaagtgtgtgtatatacacacttcttcgtcctgaaaggaaatgtatgtgatgacattggataggaggaggtttaattgac

SEQ ID NO: 2509 - protein, 264 aa, Arabidopsis thaliana
MGESSNPMATSSSSSSSSIPPSSPTPSPTSTTTPPRQHPLLQPPSSKKKKNRTNVFRVLRTVFRSFPIFTTPSVACKIPVIHPGLGLPDPHHNTSRITGTLFGYRKGRVSLSIQENPKCLPSLVVELAMQTTTLQKELSTGMVRIALETEKQPRADNNNSKTEKKTDILEEPLWTMYCKGEKTGYGVKREATEEDLNVMELLRPVSMGAGVLPGNSESEGPDGEMAYMRAYFERVIGSKDSETFYMLSPEGNNGPELSFFFVRV

SEQ ID NO: 2510 - protein, 257 aa, Arabidopsis thaliana
MATSSSSSSSSIPPSSPTPSPTSTTTPPRQHPLLQPPSSKKKKNRTNVFRVLRTVFRSFPIFTTPSVACKIPVIHPGLGLPDPHHNTSRITGTLFGYRKGRVSLSIQENPKCLPSLVVELAMQTTTLQKELSTGMVRIALETEKQPRADNNNSKTEKKTDILEEPLWTMYCKGEKTGYGVKREATEEDLNVMELLRPVSMGAGVLPGNSESEGPDGEMAYMRAYFERVIGSKDSETFYMLSPEGNNGPELSFFFVRV

SEQ ID NO: 2511 - protein, 136 aa, Arabidopsis thaliana
MQTTTLQKELSTGMVRIALETEKQPRADNNNSKTEKKTDILEEPLWTMYCKGEKTGYGVKREATEEDLNVMELLRPVSMGAGVLPGNSESEGPDGEMAYMRAYFERVIGSKDSETFYMLSPEGNNGPELSFFFVRV

SEQ ID NO: 2512 - DNA, 1132 bp, Arabidopsis thaliana
gttcgttgtcctctttagccgtcgttacttgattctacagattttctctgttcaagtgtgatctttattgattaggttcacgtgtcgacatgaaaggagctggtaagtttgaaggcagctcgagtaagatagtttttgaggatagtgaagaagatgaagatctctcgtgttcatctgtgtcttcttcagatgaggaagaagaaacagaaaaagagttaacctttgaggagattcataaattacgagctgatgggtctaaagctgttccatggaaaccaaatcaagtgaagaaaacaggtcgtgctcgtgctaacaaaaacagaccaatggaagtgagttctaagaaacctgtgagtcgttatagagaggtggttcacgttccaaagaaggaggttcgtgatcctcgctttaaccaattgggtggaacacttgacgtcgaggggttcaggaagcgatataatttcttttttgaggacaaacttcctgtggaaagagaggaattgaaaaagaagttaaagaaaacaaagaatccacaagaaatcgacgaattgaagaaccagttaacttacgttgagaaaatgttgaagtatgagccatcaacacagaacaaaggagcagcaatactaacagaacacaaaaagaaagaacgagaagccgcaaaagaaggaaaaaggccttactatctcaaaaaatcggaaatccgaaagcaaacactcatcgaaaagtacaacagtctcaaggaatctgggaagcttacatcgtatcttgacaaacggaggaagaagaatgcaacaaaggatcataggttcatgccctatcgtcgagcagaggaatagagagaagcagttttgctttaagacctatctcttaccctggtccatgacaaattttgtggcggtctctgtgatgtagtgtactaaaattcatgtttgaggtttgaaagccaaatcgaatacaaaggctgcttagtttgctgttggttctgtgaagacatgagactctagacctttcagagggttcaaatctactttacgtttcttatgttacttcaactgtttaatgtttttttaaagcattagtgtttcataattcatactgttggttcttttcaagaatgaatgaaaaaatatcc

SEQ ID NO: 2513 - protein, 248 aa, Arabidopsis thaliana
MKGAGKFEGSSSKIVFEDSEEDEDLSCSSVSSSDEEEETEKELTFEEIHKLRADGSKAVPWKPNQVKKTGRARANKNRPMEVSSKKPVSRYREVVHVPKKEVRDPRFNQLGGTLDVEGFRKRYNFFFEDKLPVEREELKKKLKKTKNPQEIDELKNQLTYVEKMLKYEPSTQNKGAAILTEHKKKEREAAKEGKRPYYLKKSEIRKQTLIEKYNSLKESGKLTSYLDKRRKKNATKDHRFMPYRRAEE

SEQ ID NO: 2514 - protein, 169 aa, Arabidopsis thaliana
MEVSSKKPVSRYREVVHVPKKEVRDPRFNQLGGTLDVEGFRKRYNFFFEDKLPVEREELKKKLKKTKNPQEIDELKNQLTYVEKMLKYEPSTQNKGAAILTEHKKKEREAAKEGKRPYYLKKSEIRKQTLIEKYNSLKESGKLTSYLDKRRKKNATKDHRFMPYRRAEE

SEQ ID NO: 2515 - DNA, 1140 bp, Arabidopsis thaliana
tgcttattcaccagggaaaaatgttgcagaagatttctcagtctatttctttatgtaacggcgatcaatttaagccgttaatatacctcgccggagctccgacgaacttcatctcttcccctctctcagtttcaggcaagaagaaatcatcttctctgagaattaaaaggatacaacaacttcaaagtacattagaagatagaataaatccaccactagtatgtggaacagtatcgccacgtcttagtgttcctgatcatatactaaagcctctatatgttgagtctagcaaagttccagagatatcaagtgaattacagattcctgactctataggcattgtgaaaatgaagaaagcgtgtgagcttgcggctcgtgtattagactatgcaggaactttggttagaccgtttgttactacagatgaaattgataaagcagtgcatcagatggttattgagtttggtgcatatccttcacctcttggatatggtggatttcctaaaagtgtttgtacatcggttaatgaatgtatgtttcacgggattcccgattctcgtccgctacagaatggagatattataaacatcgatgttgcggtttacttggatgggtatcatggagatacgtcaaagactttcttatgtggagacgtcaatggaagccttaaacaacttgtcaaggtcacagaagaatgcttggagaaaggtatatctgtttgtaaagatggagcaagcttcaaacaaatcgggaagataatcagtgagcatgctgcaaagtatggctataatatggagcgattcatcggtcatggtttaggaacggtattacactcggaacctcttatatatcttcatagtaactatgattatgaacttgaatatatgattgaaggtcaaacttttacgctcgaaccaattctcaccattggaacaacagagtttgtaacatggcctgacaaatggacaattgtgaccgcagatggtggtccggccgcacagtttgagcatacaattcttattaccaccactggtgcagaaattctcaccatatcatcatgaattatatcacaaaatgttaaggaatttacattatgaaccatccatttctgttgtaaataagataaaaactgtttggttg

SEQ ID NO: 2516 - protein, 352 aa, Arabidopsis thaliana
LIHQGKMLQKISQSISLCNGDQFKPLIYLAGAPTNFISSPLSVSGKKKSSSLRIKRIQQLQSTLEDRINPPLVCGTVSPRLSVPDHILKPLYVESSKVPEISSELQIPDSIGIVKMKKACELAARVLDYAGTLVRPFVTTDEIDKAVHQMVIEFGAYPSPLGYGGFPKSVCTSVNECMFHGIPDSRPLQNGDIINIDVAVYLDGYHGDTSKTFLCGDVNGSLKQLVKVTEECLEKGISVCKDGASFKQIGKIISEHAAKYGYNMERFIGHGLGTVLHSEPLIYLHSNYDYELEYMIEGQTFTLEPILTIGTTEFVTWPDKWTIVTADGGPAAQFEHTILITTTGAEILTISS

SEQ ID NO: 2517 - protein, 346 aa, Arabidopsis thaliana
MLQKISQSISLCNGDQFKPLIYLAGAPTNFISSPLSVSGKKKSSSLRIKRIQQLQSTLEDRINPPLVCGTVSPRLSVPDHILKPLYVESSKVPEISSELQIPDSIGIVKMKKACELAARVLDYAGTLVRPFVTTDEIDKAVHQMVIEFGAYPSPLGYGGFPKSVCTSVNECMFHGIPDSRPLQNGDIINIDVAVYLDGYHGDTSKTFLCGDVNGSLKQLVKVTEECLEKGISVCKDGASFKQIGKIISEHAAKYGYNMERFIGHGLGTVLHSEPLIYLHSNYDYELEYMIEGQTFTLEPILTIGTTEFVTWPDKWTIVTADGGPAAQFEHTILITTTGAEILTISS

SEQ ID NO: 2518 - protein, 237 aa, Arabidopsis thaliana
MKKACELAARVLDYAGTLVRPFVTTDEIDKAVHQMVIEFGAYPSPLGYGGFPKSVCTSVNECMFHGIPDSRPLQNGDIINIDVAVYLDGYHGDTSKTFLCGDVNGSLKQLVKVTEECLEKGISVCKDGASFKQIGKIISEHAAKYGYNMERFIGHGLGTVLHSEPLIYLHSNYDYELEYMIEGQTFTLEPILTIGTTEFVTWPDKWTIVTADGGPAAQFEHTILITTTGAEILTISS

SEQ ID NO: 2519 - DNA, 1296 bp, Arabidopsis thaliana
aaaataaaagtttctataagaagaaatctcgtctctgtttaattctctctttaacgttttgatccgtttccataagaacataacagagcaagaaaaaaaagaaagcacaagctttgttgttctgaagagaaaacaaacaaaacagagagtttaagacagagagaagctcatggatgtttttgctttcaatgcttctttatccatgtgtaaagatgttgccggaatcgcaggcaacatatttgcatttggactcttcgtttcaccaatgccaacgtttaggaggatcatgaggaacaaatcgacggagcaattctccggtttaccatacatttacgctctcttaaactgcttgatctgcctttggtatggcacacctttcatatcacacagcaatgccatgcttatgactgtgaattccgttggagctacgtttcagctttgctacattatcctcttcatcatgcatacagacaagaagaacaagatgaagatgcttggtttgctttttgtggtgtttgctgtggttggagtgattgtagctggaagtttgcagatacctgaccagctcacacggtggtactttgtcgggttcttgagctgcggttctcttgtttcaatgtttgcctcgccgttgtttgttattaacctagtgattcggactaagagcgttgagtttatgccgttttatctctcgctatcgactttcttgatgagtgcttccttccttctttacgggttattcaacagcgatgcctttgtttatacaccaaatggaataggaacgattcttggcattgtgcagctggctttgtactgttactaccacaggaattctatagaagaagaaacaaaagagcctttgattgtttcttacgtgtgaggttcgcgcaaagaagcaaatttatagtggggaaattaaaagaaaccagaaaatgtggtgacatcaagattctttgttgttgttgttattgttgtctactctgtgtagctcattgtgactatctaccggctttcattctctcatggcgtgaagatgtttattctctctgcttctgtcatgatcgaaggatggaagtctttttcagttttgatggctcaattgctgaagattatgtgaagacacatgacagattcactggtgtacgtgggttttgtttttttgtggtggaaatctcatggtgggtcgataacgtttgtccatatattgtttgttttttttgaagattactctatttttttgttcataagattttttttctttgatatggaaatctctggtgggttgatttgaagacc

SEQ ID NO: 2520 - protein, 236 aa, Arabidopsis thaliana
MDVFAFNASLSMCKDVAGIAGNIFAFGLFVSPMPTFRRIMRNKSTEQFSGLPYIYALLNCLICLWYGTPFISHSNAMLMTVNSVGATFQLCYIILFIMHTDKKNKMKMLGLLFVVFAVVGVIVAGSLQIPDQLTRWYFVGFLSCGSLVSMFASPLFVINLVIRTKSVEFMPFYLSLSTFLMSASFLLYGLFNSDAFVYTPNGIGTILGIVQLALYCYYHRNSIEEETKEPLIVSYV

SEQ ID NO: 2521 - protein, 225 aa, Arabidopsis thaliana
MCKDVAGIAGNIFAFGLFVSPMPTFRRIMRNKSTEQFSGLPYIYALLNCLICLWYGTPFISHSNAMLMTVNSVGATFQLCYIILFIMHTDKKNKMKMLGLLFVVFAVVGVIVAGSLQIPDQLTRWYFVGFLSCGSLVSMFASPLFVINLVIRTKSVEFMPFYLSLSTFLMSASFLLYGLFNSDAFVYTPNGIGTILGIVQLALYCYYHRNSIEEETKEPLIVSYV

SEQ ID NO: 2522 - protein, 204 aa, Arabidopsis thaliana
MPTFRRIMRNKSTEQFSGLPYIYALLNCLICLWYGTPFISHSNAMLMTVNSVGATFQLCYIILFIMHTDKKNKMKMLGLLFVVFAVVGVIVAGSLQIPDQLTRWYFVGFLSCGSLVSMFASPLFVINLVIRTKSVEFMPFYLSLSTFLMSASFLLYGLFNSDAFVYTPNGIGTILGIVQLALYCYYHRNSIEEETKEPLIVSYV

SEQ ID NO: 2523 - DNA, 1034 bp, Arabidopsis thaliana
gattctctatattgcagatcgatctccgagtttgctaaatcgccgggaaatttactgaatttggagctagtcatgtcttcagatcctgacaaaatgatgtccaaagccgacaaaatgacaaagctcacgcttactagatggagtgctgattggagaggtgctactgagttgtatgagcaagcagcaaatgggtttagagcctcaaaaaattatgagaaagctaaagtggctctcgagaaagcttcaaaaggacaagagatgcaagcttctccttgggatgctgcaaagcatatggagtctgctgctgccttagcacagaagctaagtatttggaatgaagttgctgatttttatagaaaggcgtccgagctgtatgttgagtgtggaagggcacaacccgcatcagatgctcttggaaaggctgcccgtgctttggaagatgtcaaaccagatgactccatccaactatacactgatgcttgtgaaattcttgaagaggatgggagggaccaaatggcctttgatctgtaccgtgcttgtgctaatgtctacattaagcttgagaagttcacagatgctgcaacctttttcttaagattgggtgtagctgctgataagtgtgatgcgacaaatagccagtgtaaggcgtatctcagtgcaatcatcttatatctgtatgctcacgacctgcagcaggcagaaaaatgctacaatgactgttctcagattgacgcttttctgaagagtgatcagagccgaagtgctagtagacttctcacagcctataatgaaggtgacattgaagaaatcaagaaggtggcgagtgcaagcactgtctcgaatttggatcatatgattatcaagttggctaggaagctacccactggagatgttactgcaattcagatgaacactaatgacgatctagacgaggatgatctcacttaaagtttctccactttgtacagattcatatttacacttggcttcttttcagtccaaagattaaaaaaaaacttattatcgtttttccc

SEQ ID NO: 2524 - protein, 315 aa, Arabidopsis thaliana
DSLYCRSISEFAKSPGNLLNLELVMSSDPDKMMSKADKMTKLTLTRWSADWRGATELYEQAANGFRASKNYEKAKVALEKASKGQEMQASPWDAAKHMESAAALAQKLSIWNEVADFYRKASELYVECGRAQPASDALGKAARALEDVKPDDSIQLYTDACEILEEDGRDQMAFDLYRACANVYIKLEKFTDAATFFLRLGVAADKCDATNSQCKAYLSAIILYLYAHDLQQAEKCYNDCSQIDAFLKSDQSRSASRLLTAYNEGDIEEIKKVASASTVSNLDHMIIKLARKLPTGDVTAIQMNTNDDLDEDDLT

SEQ ID NO: 2525 - protein, 291 aa, Arabidopsis thaliana
MSSDPDKMMSKADKMTKLTLTRWSADWRGATELYEQAANGFRASKNYEKAKVALEKASKGQEMQASPWDAAKHMESAAALAQKLSIWNEVADFYRKASELYVECGRAQPASDALGKAARALEDVKPDDSIQLYTDACEILEEDGRDQMAFDLYRACANVYIKLEKFTDAATFFLRLGVAADKCDATNSQCKAYLSAIILYLYAHDLQQAEKCYNDCSQIDAFLKSDQSRSASRLLTAYNEGDIEEIKKVASASTVSNLDHMIIKLARKLPTGDVTAIQMNTNDDLDEDDLT

SEQ ID NO: 2526 - protein, 284 aa, Arabidopsis thaliana
MMSKADKMTKLTLTRWSADWRGATELYEQAANGFRASKNYEKAKVALEKASKGQEMQASPWDAAKHMESAAALAQKLSIWNEVADFYRKASELYVECGRAQPASDALGKAARALEDVKPDDSIQLYTDACEILEEDGRDQMAFDLYRACANVYIKLEKFTDAATFFLRLGVAADKCDATNSQCKAYLSAIILYLYAHDLQQAEKCYNDCSQIDAFLKSDQSRSASRLLTAYNEGDIEEIKKVASASTVSNLDHMIIKLARKLPTGDVTAIQMNTNDDLDEDDLT

SEQ ID NO: 2527 - DNA, 1076 bp, Arabidopsis thaliana
aaatgtgtataaatgaaatctctttcttctttagaattactgtttctctccgctacaaataccagatttttctctctctcgtcgaaagcaaaacagtctcctttctctatcttctgctcatatcagccattgacacagttgctttgggtttccctcaaacggcgccgattgtctggattttgaccactgatggccttagatcaatcttttgaagatgctgctttacttggagaactctatggagaaggtgcattttgtttcaagagcaagaaacctgaacccattacagtctcggttccttctgatgatactgatgattcgaattttgactgcaatatttgcttagactcggtgcaagaacctgttgtgactctctgtggtcacctcttttgctggccttgtattcacaaatggcttgatgtacagagcttctcaacaagtgatgaataccaaagacatagacagtgtcctgtttgtaaatctaaagtttctcattctactttggttcctttgtatggtagaggccgttgtactactcaggaggaaggtaaaaacagtgtgcctaaaagacccgtaggaccggtttatcggcttgaaatgccgaattcaccttatgcaagtactgatctgcggttatcacaacgggttcatttcaatagcccacaggaaggttactaccctgtctcaggggtgatgagctcgaacagtttatcatactctgctgttttggatccggtgatggtgatggttggagaaatggtagctacgaggttgtttggaacacgagtgatggatagatttgcgtatccggacacttacaatctcgcagggactagcgggccgaggatgagaaggcggataatgcaggcagataaatcgctgggaagaatcttcttcttctttatgtgttgtgttgttctgtgtcttctcttgttttaggttttcatagctagcttggttctgctactgttcagtttcttcaggtgtaaggaaaacatagtcaaagaaatgtacatttgtgttggaaacaaatcaaagttgcttaatgttgaggaatgaggagtttatgttgggtt

SEQ ID NO: 2528 - protein, 249 aa, Arabidopsis thaliana
MALDQSFEDAALLGELYGEGAFCFKSKKPEPITVSVPSDDTDDSNFDCNICLDSVQEPVVTLCGHLFCWPCIHKWLDVQSFSTSDEYQRHRQCPVCKSKVSHSTLVPLYGRGRCTTQEEGKNSVPKRPVGPVYRLEMPNSPYASTDLRLSQRVHFNSPQEGYYPVSGVMSSNSLSYSAVLDPVMVMVGEMVATRLFGTRVMDRFAYPDTYNLAGTSGPRMRRRIMQADKSLGRIFFFFMCCVVLCLLLF

SEQ ID NO: 2529 - DNA, 910 bp, Arabidopsis thaliana
atcaactctctctctcactttcacaactctccctttctatttctctctctagaaaaatatcatcatctatcaattatatagagtacttatttagattcatttcataaaaatggagaaaagagaaagtagtggtggttctggatcaggagatgcagaggtgagaaaagggccatggacgatggaagaagatttgattctcatcaattatatcgccaatcatggtgaaggtgtttggaactctctcgccaaatctgcaggactaaaacgcaccgggaaaagttgccggctccggtggctgaactacctccgacctgatgtgcgacggggaaatatcacaccagaagaacagctcaccatcatggaacttcatgcaaaatggggaaataggtggtcaaaaattgcaaagcatttaccaggaaggaccgacaatgagataaagaacttttggaggactaagatccagaaatacatcatcaagagcggagaaacgacgaccgttggatcacaaagctccgagtttataaaccatcatgcgacaacgagccatgtcatgaatgatactcaagaaaccatggatatgtattctccaacgacgtcgtatcaacatgccagcaatattaatcagcagcttaattatggtaattatgtgcctgaatccagttcgatcatgatgccattatctgttgatcaatccgaacaaaactattggagcgtcgatgatctttggcccatgaatatatataatggtaattaataaataagttcgttaaaacttatatatatttacggtccaaagagggttctatataaacagagtactgtatgggtttgcctcattgtttagaggtaggtacttaatataaggttggagatcttatatgaattaataaataactcgtatttactagat

SEQ ID NO: 2530 - protein, 214 aa, Arabidopsis thaliana
MEKRESSGGSGSGDAEVRKGPWTMEEDLILINYIANHGEGVWNSLAKSAGLKRTGKSCRLRWLNYLRPDVRRGNITPEEQLTIMELHAKWGNRWSKIAKHLPGRTDNEIKNFWRTKIQKYIIKSGETTTVGSQSSEFINHHATTSHVMNDTQETMDMYSPTTSYQHASNINQQLNYGNYVPESSSIMMPLSVDQSEQNYWSVDDLWPMNIYNGN

SEQ ID NO: 2531 - protein, 191 aa, Arabidopsis thaliana
MEEDLILINYIANHGEGVWNSLAKSAGLKRTGKSCRLRWLNYLRPDVRRGNITPEEQLTIMELHAKWGNRWSKIAKHLPGRTDNEIKNFWRTKIQKYIIKSGETTTVGSQSSEFINHHATTSHVMNDTQETMDMYSPTTSYQHASNINQQLNYGNYVPESSSIMMPLSVDQSEQNYWSVDDLWPMNIYNGN

SEQ ID NO: 2532 - protein, 131 aa, Arabidopsis thaliana
MELHAKWGNRWSKIAKHLPGRTDNEIKNFWRTKIQKYIIKSGETTTVGSQSSEFINHHATTSHVMNDTQETMDMYSPTTSYQHASNINQQLNYGNYVPESSSIMMPLSVDQSEQNYWSVDDLWPMNIYNGN

SEQ ID NO: 2533 - DNA, 1176 bp, Arabidopsis thaliana
atccaaagtccaaacacagcataaaagtagctctattgactttttttcttcctccaaactctttttacgtcaagcaatggaggatcttgatccaacctacatccaagcaccagagcatagatcagattcgaatttcatccctaaccaaccagaagaaatacccgtgattgatctctcgcgcctcgatgaccccgaagatgtccaaaacgttatctcagagatcggtgatgcttgtgaaaaatggggattttttcaggtgcttaatcatggtgtgccttctgacgcaaggcaacgtgtggagaagactgtgaagatgtttttcgatttgcctatggaagagaagataaaggtgaagagagacgatgtgaatcctgtagggtatcatgatggagaacacaccaagaacgttaaagattggaaagaagtgtttgatatttatttcaaagatccaatggtcattccttcaaccactgatcctgaagatgaaggcttaagacttgtttacaacaagtggcctcaatctccttctgatttcagggaagcatgtgaagtatatgcgagacacgctgaaaaattagcgttcaagctcttggaactgatttcgttaagcttaggcttgccaaaagagcgttttcatgactacttcaaagaacaaatgagttttttcaggataaatcgttatccaccatgtccaagacctgacctagctttaggtgttggtcaccacaaagatgccgacgttattagtctattggctcaagatgatgttggaggattacaagttagtcgtagatcggacggtgtttggtttccgattagacccgtccctaatgctcttgtcatcaatataggcaattgtatggagatatggacgaatgacaagtattggagtgctgaacatagagtggtggtgaacacaacaagagagagatactcgataccattcttcttgttgccttcacacgatgtggaagtgaagccattagaagaacttgtgagtcctgaaaaccctccaaaatacaaaggctataaatggggtaagttctacgtcagtaggaatagaagcgattttcgaaaactggaaatcgaaaacatccaaatcgatgacttcaaagttaaaacttaatatactatgtatcggcttttttttttgtttaccaagctatgatattaacc

SEQ ID NO: 2534 - protein, 374 aa, Arabidopsis thaliana
SKVQTQHKSSSIDFFSSSKLFLRQAMEDLDPTYIQAPEHRSDSNFIPNQPEEIPVIDLSRLDDPEDVQNVISEIGDACEKWGFFQVLNHGVPSDARQRVEKTVKMFFDLPMEEKIKVKRDDVNPVGYHDGEHTKNVKDWKEVFDIYFKDPMVIPSTTDPEDEGLRLVYNKWPQSPSDFREACEVYARHAEKLAFKLLELISLSLGLPKERFHDYFKEQMSFFRINRYPPCPRPDLALGVGHHKDADVISLLAQDDVGGLQVSRRSDGVWFPIRPVPNALVINIGNCMEIWTNDKYWSAEHRVVVNTTRERYSIPFFLLPSHDVEVKPLEELVSPENPPKYKGYKWGKFYVSRNRSDFRKLEIENIQIDDFKVKT

SEQ ID NO: 2535 - protein, 349 aa, Arabidopsis thaliana
MEDLDPTYIQAPEHRSDSNFIPNQPEEIPVIDLSRLDDPEDVQNVISEIGDACEKWGFFQVLNHGVPSDARQRVEKTVKMFFDLPMEEKIKVKRDDVNPVGYHDGEHTKNVKDWKEVFDIYFKDPMVIPSTTDPEDEGLRLVYNKWPQSPSDFREACEVYARHAEKLAFKLLELISLSLGLPKERFHDYFKEQMSFFRINRYPPCPRPDLALGVGHHKDADVISLLAQDDVGGLQVSRRSDGVWFPIRPVPNALVINIGNCMEIWTNDKYWSAEHRVVVNTTRERYSIPFFLLPSHDVEVKPLEELVSPENPPKYKGYKWGKFYVSRNRSDFRKLEIENIQIDDFKVKT

SEQ ID NO: 2536 - protein, 270 aa, Arabidopsis thaliana
MFFDLPMEEKIKVKRDDVNPVGYHDGEHTKNVKDWKEVFDIYFKDPMVIPSTTDPEDEGLRLVYNKWPQSPSDFREACEVYARHAEKLAFKLLELISLSLGLPKERFHDYFKEQMSFFRINRYPPCPRPDLALGVGHHKDADVISLLAQDDVGGLQVSRRSDGVWFPIRPVPNALVINIGNCMEIWTNDKYWSAEHRVVVNTTRERYSIPFFLLPSHDVEVKPLEELVSPENPPKYKGYKWGKFYVSRNRSDFRKLEIENIQIDDFKVKT

SEQ ID NO: 2537 - DNA, 1355 bp, Arabidopsis thaliana
gttgtactctcaaattcttgggtcgttctgagtcgtctccgcgttaaatcttttccctttttgatcctttcttcctttcttcttcttcttcgcattgatttggtcctccttcctcttctattctattcattaagaacctaatcttcatcttctccatcttcttcttcacggactccacttcgctcatccaggaaggtttattagtagtaaccaatccaagtgttccttttgtttgaagcaacaagctttgtgatattatcctgagagacaatgtttggtttaaggaaatcaccggcaaatcttcccaagcataactcagtcgacctcaagtcttccaagccaaatcctttcgattcagatgatgaatctgacaacaaacatacccttaacccttctaagaggactacctctgaaccctctttggctgatatgacaaacccttttggtggtgagagagttcagaaaggagatagtagttcatccaaacagtcattgttttcgaactccaaataccagtacaagaacaatttccgtgattctggtggtattgaaaaccagtcggttcaggagcttgaaggttatgctgtgtacaaggctgaagagactacgaaatctgtacaaggttgtttgaaggtagcagaagatataaggtctgatgctaccagaactttggtcatgttacacgatcagggcgagcaaatcactaggacgcaccataaagccgttgaaatcgaccatgatctcagtcgtggtgagaaacttcttggaagccttggaggcatgttttcaaagacttggaaaccaaagaagactcgtcctataaatggtcccgtcgtaaccagagatgactcaccaacgagaagagttaaccacttagagaaaagggaaaaactgggactgaactcagcacccagaggacaatcaagaacccgagaaccactccccgaatcagctgatgcttatcagagagtggagatggaaaaagctaagcaagacgatgggctttcagacttgagtgatatactcggcgagctaaagaacatggctgttgacatgggaagcgaaatcgagaagcagaacaaaggacttgaccatcttcatgatgatgttgacgaactcaacttcagagtgcaacaatcaaaccaacgtggtcgccgtttgcttggaaagtagatgaacagagggtttatatgttcattacactcattcctcgtttgttttattctctatgaagttgttctttaaaactggaaagattcttatcatgttaaatacattattgctatctgtgtttgtatttgatcttgtgacaaaaaaccaaaaaacttattgatcaaacagaagctaactttggt

SEQ ID NO: 2538 - protein, 300 aa, Arabidopsis thaliana
MFGLRKSPANLPKHNSVDLKSSKPNPFDSDDESDNKHTLNPSKRTTSEPSLADMTNPFGGERVQKGDSSSSKQSLFSNSKYQYKNNFRDSGGIENQSVQELEGYAVYKAEETTKSVQGCLKVAEDIRSDATRTLVMLHDQGEQITRTHHKAVEIDHDLSRGEKLLGSLGGMFSKTWKPKKTRPINGPVVTRDDSPTRRVNHLEKREKLGLNSAPRGQSRTREPLPESADAYQRVEMEKAKQDDGLSDLSDILGELKNMAVDMGSEIEKQNKGLDHLHDDVDELNFRVQQSNQRGRRLLGK

SEQ ID NO: 2539 - protein, 247 aa, Arabidopsis thaliana
MTNPFGGERVQKGDSSSSKQSLFSNSKYQYKNNFRDSGGIENQSVQELEGYAVYKAEETTKSVQGCLKVAEDIRSDATRTLVMLHDQGEQITRTHHKAVEIDHDLSRGEKLLGSLGGMFSKTWKPKKTRPINGPVVTRDDSPTRRVNHLEKREKLGLNSAPRGQSRTREPLPESADAYQRVEMEKAKQDDGLSDLSDILGELKNMAVDMGSEIEKQNKGLDHLHDDVDELNFRVQQSNQRGRRLLGK

SEQ ID NO: 2540 - protein, 165 aa, Arabidopsis thaliana
MLHDQGEQITRTHHKAVEIDHDLSRGEKLLGSLGGMFSKTWKPKKTRPINGPVVTRDDSPTRRVNHLEKREKLGLNSAPRGQSRTREPLPESADAYQRVEMEKAKQDDGLSDLSDILGELKNMAVDMGSEIEKQNKGLDHLHDDVDELNFRVQQSNQRGRRLLGK

SEQ ID NO: 2541 - DNA, 1905 bp, Arabidopsis thaliana
gctattttcccgtaattttggtctgaggttttggtgacgatggcgacggcggtagtgatgaacggcgagctgaaaaagcaacctcggccaggtaaaggcggctatcagggccgtggattaactgaagaagaagctcgagttcgcgccatatcggagattgttagcaccatgattgagcgttcacaccgcaacgagaatgttgacctaaacgcaattaaaaccgccgcttgccggaaatacggcctagcacgtgcgcctaagctcgtggagatgattgctgcgcttcctgattcagagagagagactcttctcccgaagctccgtgccaaaccggttcgaacagcttcagggatcgccgttgtggcggttatgtcgaagcctcataggtgcccgcatatagctacgacggggaatatatgcgtttattgtcccggtggacctgactctgactttgagtatagtactcagtcttacactggatatgagcctaccagcatgcgagctattcgagccaggtacaatccatatgttcaggcaagaagcaggatagatcagctgaagcggttgggtcacagtgtagataaggttgagttcattttgatgggaggtactttcatgtcactgcctgctgagtatcgggatttcttcatacggaatcttcatgatgctttatcaggacacacttctgccaacgttgaagaggcagttgcttactctgaacatagtgcaactaaatgcattgggatgacaattgaaacgaggccagattactgccttggacctcatttacgacaaatgctgatttacggttgcacccggctagagataggtgtccagagcacatatgaagatgttgcccgtgacacaaatagaggtcatactgttgctgctgtagctgactgcttctgcttggctaaagatgctggtttcaaggtggttgcacatatgatgcctgatcttcctaatgttggggttgagagagacatggaaagtttcaaggagtttttcgagagcccatcttttagagcagatgggttaaaaatatatcccacccttgtgatccgtggaactggactttatgaactatggaaaactgggaggtaccgaaattatccacctgagcagcttgtggatatagttgcaaggattctctccatggtacctccatggacacgtgtatatagagttcagcgtgatattcctatgcctctggttacgtcaggggtagaaaaaggaaatcttcgtgaactggctctagccagaatggatgacttgggccttaaatgccgtgatgtccgtactcgtgaagctggaattcaggacattcatcataaaattaagccagaacaagtagagcttgtgcgtcgtgattacactgccaatgaaggttgggagacgttcctttcttatgaagatacacgccaggacattcttgttggattgctacgtttgcgaaaatgcgggaagaatgtaacgtgtccagaactcatgggaaagtgttctgttgtccgtgagcttcatgtatacggaacagctgtaccagttcatggtcgagatgctgataagttgcaacatcagggctatggtacacttctgatggaagaagcagagaggattgctagaagagaacatcgatctaacaaaatcggtgtgatttctggtgtaggaaccagacattactacagaaagttgggttatgaattggaaggtccttacatggtgaagcatcttctttgaaattatgtttacttaaaaaccaaattcgtaaaatctttatgttgaactagtgagattaatcccttgtggtatcattttgctctttaaattttcatagtcaaaaagttgagaaaacggctaattccttcacgaactatggcgattttgtaagattaatctgtaatgcgc

SEQ ID NO: 2542 - protein, 565 aa, Arabidopsis thaliana
MATAVVMNGELKKQPRPGKGGYQGRGLTEEEARVRAISEIVSTMIERSHRNENVDLNAIKTAACRKYGLARAPKLVEMIAALPDSERETLLPKLRAKPVRTASGIAVVAVMSKPHRCPHIATTGNICVYCPGGPDSDFEYSTQSYTGYEPTSMRAIRARYNPYVQARSRIDQLKRLGHSVDKVEFILMGGTFMSLPAEYRDFFIRNLHDALSGHTSANVEEAVAYSEHSATKCIGMTIETRPDYCLGPHLRQMLIYGCTRLEIGVQSTYEDVARDTNRGHTVAAVADCFCLAKDAGFKVVAHMMPDLPNVGVERDMESFKEFFESPSFRADGLKIYPTLVIRGTGLYELWKTGRYRNYPPEQLVDIVARILSMVPPWTRVYRVQRDIPMPLVTSGVEKGNLRELALARMDDLGLKCRDVRTREAGIQDIHHKIKPEQVELVRRDYTANEGWETFLSYEDTRQDILVGLLRLRKCGKNVTCPELMGKCSVVRELHVYGTAVPVHGRDADKLQHQGYGTLLMEEAERIARREHRSNKIGVISGVGTRHYYRKLGYELEGPYMVKHLL

SEQ ID NO: 2543 - protein, 559 aa, Arabidopsis thaliana
MNGELKKQPRPGKGGYQGRGLTEEEARVRAISEIVSTMIERSHRNENVDLNAIKTAACRKYGLARAPKLVEMIAALPDSERETLLPKLRAKPVRTASGIAVVAVMSKPHRCPHIATTGNICVYCPGGPDSDFEYSTQSYTGYEPTSMRAIRARYNPYVQARSRIDQLKRLGHSVDKVEFILMGGTFMSLPAEYRDFFIRNLHDALSGHTSANVEEAVAYSEHSATKCIGMTIETRPDYCLGPHLRQMLIYGCTRLEIGVQSTYEDVARDTNRGHTVAAVADCFCLAKDAGFKVVAHMMPDLPNVGVERDMESFKEFFESPSFRADGLKIYPTLVIRGTGLYELWKTGRYRNYPPEQLVDIVARILSMVPPWTRVYRVQRDIPMPLVTSGVEKGNLRELALARMDDLGLKCRDVRTREAGIQDIHHKIKPEQVELVRRDYTANEGWETFLSYEDTRQDILVGLLRLRKCGKNVTCPELMGKCSVVRELHVYGTAVPVHGRDADKLQHQGYGTLLMEEAERIARREHRSNKIGVISGVGTRHYYRKLGYELEGPYMVKHLL

SEQ ID NO: 2544 - protein, 522 aa, Arabidopsis thaliana
MIERSHRNENVDLNAIKTAACRKYGLARAPKLVEMIAALPDSERETLLPKLRAKPVRTASGIAVVAVMSKPHRCPHIATTGNICVYCPGGPDSDFEYSTQSYTGYEPTSMRAIRARYNPYVQARSRIDQLKRLGHSVDKVEFILMGGTFMSLPAEYRDFFIRNLHDALSGHTSANVEEAVAYSEHSATKCIGMTIETRPDYCLGPHLRQMLIYGCTRLEIGVQSTYEDVARDTNRGHTVAAVADCFCLAKDAGFKVVAHMMPDLPNVGVERDMESFKEFFESPSFRADGLKIYPTLVIRGTGLYELWKTGRYRNYPPEQLVDIVARILSMVPPWTRVYRVQRDIPMPLVTSGVEKGNLRELALARMDDLGLKCRDVRTREAGIQDIHHKIKPEQVELVRRDYTANEGWETFLSYEDTRQDILVGLLRLRKCGKNVTCPELMGKCSVVRELHVYGTAVPVHGRDADKLQHQGYGTLLMEEAERIARREHRSNKIGVISGVGTRHYYRKLGYELEGPYMVKHLL

SEQ ID NO: 2545 - DNA, 2010 bp, Arabidopsis thaliana
gcactttttatagaccaaagtccctacattactctattttctcaaaccccatttagaagaagagttcttagctgtcttcaatctctttgtctgtatcattctttacggaagccatgaaaatggcatcaagaaaaacaacatccttgcttaatcatcttcttcttcttggagctttgactcttttgagcagtttggtgatagtgaaaggagaaagcccttacaagttttacacttggactgtgacttatggcattatctctcctcttggtgttcctcaacaggttattctcatcaatggtcagtttcctggtccaaaacttgaagttgtgaccaacgacaacatcatcctcaacctcatcaacaaacttgaccagcctttcctcttgacctggaatgggattaagcagaggaagaactcatggcaagatggtgttttgggaacaaactgtccgatccaaccaaactcaaacttcacttacaaattccaaaccaaagatcagatcggaactttcaactacttcccttccactgcttttcacaaagccgccggtggattcggagccatcaatgtctacgcaagacctggaattccaatcccttaccctctcccaaccgcagatttcactttactcgttggtgattggttcaaaaccaaccacaaaacgcttcaacagcgtttggattctggtggggttcttccatttcccgatgggatgcttataaatggacaaacccaatcaacgttttcaggcgaccaagggaagacttacatgttgagaatctccaatgttgggttatcaagcactttcaatttcagaatccaaggccatacaatgaaagtagttgaagttgaaggctctcatgttattcaaactgattatgattctcttgacattcacgttggccagtctttagcagttcttgttactttaaaccaatctcctaaagattattacatcgttgcaagcacccggttcataagaagcaagctttctgttatgggtttgttgcgttattctaactctcgcgtcccagcttctggtgatcctcccgctcttccacctggagagcttgtttggtccatgagacaagctagaaccttcagatggaacttaacagcaaatgcagctagaccaaaccctcaaggatctttccactatggaatgatcagtccaacaaagacatttgtcttctcaaattcagctcctttgattaatgggaagcaaagatatgcagtcaatggagtctcttatgtgaaatcagagacgcctcttaaactcgctgatcactttggcatctcaggagttttcagcaccaatgccattcaaagcgtcccatcaaactctccgccaacagttgcaacatcagttgttcaaacatctcaccatgacttccttgaaattgtatttcagaacaatgagaagtcaatgcagtcttggcatcttgatggatatgacttctgggtcgttggatttggttctggacaatggacacctgcaaaaagatcacttcacaatcttgttgatgctctgaccagacacacaactcaggtctacccagagtcttggacaacaatcttagtgtctttagacaatcaagggatgtggaatatgagatcagcgatatgggaaagacaatattcaggacaacagttttatctcaaagtatggaattcagtacagagtcttgccaatgaatacaatcctcctgacaatcttcaactctgtggcaaagctgttggacgacatgtttagagaaaatcctcttacagtttcctctgttctttcttaaaagtgatttactttaaggctttttcgattcaatttggttgaggttttgcgtttgttcgttatggtcatgagagtatggctgatggcttacttgtagtaaacaaagggaagaggaaagttatatgtgtcattggtggtaggctagcttggagttttataataatcttcctatatacaattctattcatgtgttttttctaatcgaaatctcttgcggttt

SEQ ID NO: 2546 - protein, 546 aa, Arabidopsis thaliana
MKMASRKTTSLLNHLLLLGALTLLSSLVIVKGESPYKFYTWTVTYGIISPLGVPQQVILINGQFPGPKLEVVTNDNIILNLINKLDQPFLLTWNGIKQRKNSWQDGVLGTNCPIQPNSNFTYKFQTKDQIGTFNYFPSTAFHKAAGGFGAINVYARPGIPIPYPLPTADFTLLVGDWFKTNHKTLQQRLDSGGVLPFPDGMLINGQTQSTFSGDQGKTYMLRISNVGLSSTFNFRIQGHTMKVVEVEGSHVIQTDYDSLDIHVGQSLAVLVTLNQSPKDYYIVASTRFIRSKLSVMGLLRYSNSRVPASGDPPALPPGELVWSMRQARTFRWNLTANAARPNPQGSFHYGMISPTKTFVFSNSAPLINGKQRYAVNGVSYVKSETPLKLADHFGISGVFSTNAIQSVPSNSPPTVATSVVQTSHHDFLEIVFQNNEKSMQSWHLDGYDFWVVGFGSGQWTPAKRSLHNLVDALTRHTTQVYPESWTTILVSLDNQGMWNMRSAIWERQYSGQQFYLKVWNSVQSLANEYNPPDNLQLCGKAVGRHV

SEQ ID NO: 2547 - protein, 544 aa, Arabidopsis thaliana
MASRKTTSLLNHLLLLGALTLLSSLVIVKGESPYKFYTWTVTYGIISPLGVPQQVILINGQFPGPKLEVVTNDNIILNLINKLDQPFLLTWNGIKQRKNSWQDGVLGTNCPIQPNSNFTYKFQTKDQIGTFNYFPSTAFHKAAGGFGAINVYARPGIPIPYPLPTADFTLLVGDWFKTNHKTLQQRLDSGGVLPFPDGMLINGQTQSTFSGDQGKTYMLRISNVGLSSTFNFRIQGHTMKVVEVEGSHVIQTDYDSLDIHVGQSLAVLVTLNQSPKDYYIVASTRFIRSKLSVMGLLRYSNSRVPASGDPPALPPGELVWSMRQARTFRWNLTANAARPNPQGSFHYGMISPTKTFVFSNSAPLINGKQRYAVNGVSYVKSETPLKLADHFGISGVFSTNAIQSVPSNSPPTVATSVVQTSHHDFLEIVFQNNEKSMQSWHLDGYDFWVVGFGSGQWTPAKRSLHNLVDALTRHTTQVYPESWTTILVSLDNQGMWNMRSAIWERQYSGQQFYLKVWNSVQSLANEYNPPDNLQLCGKAVGRHV

SEQ ID NO: 2548 - protein, 346 aa, Arabidopsis thaliana
MLINGQTQSTFSGDQGKTYMLRISNVGLSSTFNFRIQGHTMKVVEVEGSHVIQTDYDSLDIHVGQSLAVLVTLNQSPKDYYIVASTRFIRSKLSVMGLLRYSNSRVPASGDPPALPPGELVWSMRQARTFRWNLTANAARPNPQGSFHYGMISPTKTFVFSNSAPLINGKQRYAVNGVSYVKSETPLKLADHFGISGVFSTNAIQSVPSNSPPTVATSVVQTSHHDFLEIVFQNNEKSMQSWHLDGYDFWVVGFGSGQWTPAKRSLHNLVDALTRHTTQVYPESWTTILVSLDNQGMWNMRSAIWERQYSGQQFYLKVWNSVQSLANEYNPPDNLQLCGKAVGRHV

SEQ ID NO: 2549 - DNA, 1839 bp, Arabidopsis thaliana
aaattggtttcattctatcagttggtgttgtggtgtgttggaagatgtgaatcgcctctactagggttcgattccaacataaaattgtacttttggaagatacagagaaagagatgggcaaatctcagattcttctaaacgctgagagctttacttgttcttctttcaatactttcttcactttatggatcttctttactcttcactcctttccatttcaagctcaagctgctccttctggttccttgattaagcacatgtcatcggttctcaagtggactactggatcatcctctaaattatcccaatcagacactaatgttcttcagtttgagaatggttacttggtcgaaactgttgtggaaggaaacgatattggtgttgttccttacaagattcgagtttctgatgatggagaactttatgctgttgatgaacttaatagcaacatcatgaaaatcactcctcccttgtctcagtacagcaggggaagattggtggctggatcttttcaaggaaaaacagggcatgcagatggaaaaccgagtgaggctcgttttaaccatccgagaggcgttacaatggatgacaaagggaacgtttatgtcgctgatactttgaatctcgccatccgaaagattggtgattcaggtgttactacgatagctgggggaaaatcaaatatagctgggtatagagatgggccaagtgaggatgcaaagttctcaaatgattttgatgtcgtatatgttcggcctacctgctcgttgctggtcatcgatagaggaaatgcggctcttcgccaaatctctctcagtgaagaggactgtgactatcaagatgatagctcaatctctctaactgatatactcttggttattggtgctgttctcattggttatgctacttgtatgctccagcagggctttggaaattctttcttctcaaagacggtaggatcagaaaccagctatgaagaagagcatccaggaaaagagaaactctcccggcctgtccatgagaaaacaataaccaaggaagaacctggttggccatcatttgggcaactccttactgatctctgcaaacttgctctcgagtttataaccagccacctagttccagcccgattccaaaccaaccccaatctaaggccattaaaagatagactcataatgcctgaagacgaacaagaaccacctcgagtccaaaggcatactgccccagcaccaatctcagaatcccgacatgctcacttacctaaagctgatgatagttaccctgaacataagacgccaaagctaagatcaagtagtgtaatgaaggaccctactttgtcatcatccaagcaccatcggacatcatcaaaacggcaggactatgctcagttctatgcctcgggagaggttgcccaaccgaagatccataaagagcggtcaaggcgtcgtcatagagataaaacaaccgagacagaaccaaagccaacaccatcagatacggtgaagcctgtggagtacagtaatagttcaaagtttgatcattacaacatgaggagcagcaagtatggacctgaaactccatttcgattctagaaagtaaaatcacatactcattagaacccttttctgagtatgttgtgccctttcttttgtccttggtttgaggagattccttatgttttctttttgttagttactaagaaaatcttattacacagatgatgaaaaagaggttaaaggcttttcttgtaacgaaggattgatgaatcatgactgaaaatctgatgtattatgaacttatacgatcacaagaacaggctcttcgttaaaaaaaaaaaac

SEQ ID NO: 2550 - protein, 492 aa, Arabidopsis thaliana
MGKSQILLNAESFTCSSFNTFFTLWIFFTLHSFPFQAQAAPSGSLIKHMSSVLKWTTGSSSKLSQSDTNVLQFENGYLVETVVEGNDIGVVPYKIRVSDDGELYAVDELNSNIMKITPPLSQYSRGRLVAGSFQGKTGHADGKPSEARFNHPRGVTMDDKGNVYVADTLNLAIRKIGDSGVTTIAGGKSNIAGYRDGPSEDAKFSNDFDVVYVRPTCSLLVIDRGNAALRQISLSEEDCDYQDDSSISLTDILLVIGAVLIGYATCMLQQGFGNSFFSKTVGSETSYEEEHPGKEKLSRPVHEKTITKEEPGWPSFGQLLTDLCKLALEFITSHLVPARFQTNPNLRPLKDRLIMPEDEQEPPRVQRHTAPAPISESRHAHLPKADDSYPEHKTPKLRSSSVMKDPTLSSSKHHRTSSKRQDYAQFYASGEVAQPKIHKERSRRRHRDKTTETEPKPTPSDTVKPVEYSNSSKFDHYNMRSSKYGPETPFRF

SEQ ID NO: 2551 - protein, 444 aa, Arabidopsis thaliana
MSSVLKWTTGSSSKLSQSDTNVLQFENGYLVETVVEGNDIGVVPYKIRVSDDGELYAVDELNSNIMKITPPLSQYSRGRLVAGSFQGKTGHADGKPSEARFNHPRGVTMDDKGNVYVADTLNLAIRKIGDSGVTTIAGGKSNIAGYRDGPSEDAKFSNDFDVVYVRPTCSLLVIDRGNAALRQISLSEEDCDYQDDSSISLTDILLVIGAVLIGYATCMLQQGFGNSFFSKTVGSETSYEEEHPGKEKLSRPVHEKTITKEEPGWPSFGQLLTDLCKLALEFITSHLVPARFQTNPNLRPLKDRLIMPEDEQEPPRVQRHTAPAPISESRHAHLPKADDSYPEHKTPKLRSSSVMKDPTLSSSKHHRTSSKRQDYAQFYASGEVAQPKIHKERSRRRHRDKTTETEPKPTPSDTVKPVEYSNSSKFDHYNMRSSKYGPETPFRF

SEQ ID NO: 2552 - protein, 379 aa, Arabidopsis thaliana
MKITPPLSQYSRGRLVAGSFQGKTGHADGKPSEARFNHPRGVTMDDKGNVYVADTLNLAIRKIGDSGVTTIAGGKSNIAGYRDGPSEDAKFSNDFDVVYVRPTCSLLVIDRGNAALRQISLSEEDCDYQDDSSISLTDILLVIGAVLIGYATCMLQQGFGNSFFSKTVGSETSYEEEHPGKEKLSRPVHEKTITKEEPGWPSFGQLLTDLCKLALEFITSHLVPARFQTNPNLRPLKDRLIMPEDEQEPPRVQRHTAPAPISESRHAHLPKADDSYPEHKTPKLRSSSVMKDPTLSSSKHHRTSSKRQDYAQFYASGEVAQPKIHKERSRRRHRDKTTETEPKPTPSDTVKPVEYSNSSKFDHYNMRSSKYGPETPFRF

SEQ ID NO: 2553 - DNA, 2671 bp, Arabidopsis thaliana
attcatcatcatcatcatcatcaccaatcgatctctctagaaacaaatttcccaacttccttcttagagctctcttgtcagtttaagctatcattatgtcaaacgaaccggaatcctccgactcgaaaactaagaaggatttcagtactgcgattctagagaggaagaagtctccaaaccgacttgttgtcgatgaagctattaacgatgacaactctgttgtctctctccatcctactaccatggaaaaactccagcttttccgaggcgatacaattctcatcaagggtaagaagaggaaggacactgtatgcattgccctcgctgatgaaacatgtgaggaacccaagatcagaatgaataaggttgtaaggtctaacttgagggttaggctgggagatgttatttctgttcaccaatgcccagatgtcaagtatggaaagcgtgttcacatcttgcctgttgatgatacagttgaaggcgttactggaaacctctttgatgcttacctgaaaccttactttctggaggcgtaccgtccagtgaggaagggagatcttttcctagtgagaggaggaatgaggagtgtggagttcaaagtgatcgagactgatcctgctgagtactgtgtggtggctccagatacagagattttctgtgagggtgaaccagttaagagggaggacgaagaaaggcttgatgaggttggttatgacgatgttggtggtgtcaggaaacagatggctcagattagggaattggttgaacttcccttgaggcatccacaactctttaaatcaattggtgtgaagccaccaaagggaattctgctttacggacctcctggatccgggaagactcttattgctcgtgctgtggctaatgaaaccggagcattcttcttctgtatcaatggaccggaaatcatgtcgaaactagctggtgagagtgagagcaacctcaggaaagcatttgaggaggctgagaagaatgccccgtctatcatattcattgatgagattgactctattgcaccaaaaagagagaagacgaatggtgaggttgagaggaggattgtctctcagctccttacgcttatggatggactaaaatcacgtgcccatgttattgttatgggagcaacaaatcgtcccaacagtattgatccggctttgagaaggtttggaagattcgacagggaaattgatatcggtgttcctgatgaaattggacgtcttgaagttcttaggatccacacgaagaacatgaagctagctgaagatgttgatctagaaagaatctccaaggacacgcatggatatgttggagctgatcttgcagctctatgcactgaagctgcccttcaatgtatcagagagaagatggatgtgattgacttggaagatgactcaattgacgccgaaatcctcaattccatggctgtgtctaatgaacacttccacactgctcttggaaacagcaacccatccgcccttcgtgaaactgttgtggaggttccaaatgtctcctgggaggatattggaggtctcgagaatgttaagagagagcttcaggagactgttcaataccctgtggagcatccagagaaattcgagaagtttggtatgtctccatcaaagggagttcttttctacggtcctcctggatgtggtaaaaccctgttagccaaagctatagcaaacgagtgccaagcaaacttcatcagtgtcaagggacccgagcttctcacaatgtggtttggagaaagtgaagccaacgtccgagaaatctttgacaaggctcgtcaatctgctccttgtgttctgtttttcgatgagctagactccattgctactcagagagggaacagcgcgggtgatgccggcggtgcagctgacagagtgttgaatcagcttttgacagaaatggatggaatgaatgcaaagaagacggtattcattattggagcaactaacagaccggatatcatagattcagctcttcttcgacctggaagactcgaccagcttatctacattcctctacctgatgaagattcccgtctcaatatctttaaggcctgcttgagaaaatctcccgtcgctaaagatgtagatgttactgcactcgcaaagtacactcagggattcagtggtgctgatatcaccgagatctgccagagagcttgcaagtacgccatcagagaaaacatcgaaaaggatattgagaacgagcgtagaaggagccagaatccagaggccatggaggaagatatggtggatgatgaagtttcagagattagagctgctcatttcgaagagtcgatgaaatatgcaaggagaagtgtgagtgatgctgatattcgcaagtaccaagcttttgctcagacgctgcagcaatccagagggtttggatctgagttcaggtttgactcaaccgctggtgtcggacgcaccactggtgttgcagccgccgatccctttgccacttctgcagctgcagctgatgacgacgatctctacagttagattttgatttcttagtgatcgtttttcttctttctttaacttaaattaggttcttttggatgatgtcgagattgatacagtttaaaatcatctgggtttgccagcttataatcacttgagcaaattatttctatgtttattcc

SEQ ID NO: 2554 - protein, 810 aa, Arabidopsis thaliana
MSNEPESSDSKTKKDFSTAILERKKSPNRLVVDEAINDDNSVVSLHPTTMEKLQLFRGDTILIKGKKRKDTVCIALADETCEEPKIRMNKVVRSNLRVRLGDVISVHQCPDVKYGKRVHILPVDDTVEGVTGNLFDAYLKPYFLEAYRPVRKGDLFLVRGGMRSVEFKVIETDPAEYCVVAPDTEIFCEGEPVKREDEERLDEVGYDDVGGVRKQMAQIRELVELPLRHPQLFKSIGVKPPKGILLYGPPGSGKTLIARAVANETGAFFFCINGPEIMSKLAGESESNLRKAFEEAEKNAPSIIFIDEIDSIAPKREKTNGEVERRIVSQLLTLMDGLKSRAHVIVMGATNRPNSIDPALRRFGRFDREIDIGVPDEIGRLEVLRIHTKNMKLAEDVDLERISKDTHGYVGADLAALCTEAALQCIREKMDVIDLEDDSIDAEILNSMAVSNEHFHTALGNSNPSALRETVVEVPNVSWEDIGGLENVKRELQETVQYPVEHPEKFEKFGMSPSKGVLFYGPPGCGKTLLAKAIANECQANFISVKGPELLTMWFGESEANVREIFDKARQSAPCVLFFDELDSIATQRGNSAGDAGGAADRVLNQLLTEMDGMNAKKTVFIIGATNRPDIIDSALLRPGRLDQLIYIPLPDEDSRLNIFKACLRKSPVAKDVDVTALAKYTQGFSGADITEICQRACKYAIRENIEKDIENERRRSQNPEAMEEDMVDDEVSEIRAAHFEESMKYARRSVSDADIRKYQAFAQTLQQSRGFGSEFRFDSTAGVGRTTGVAAADPFATSAAAADDDDLYS

SEQ ID NO: 2555 - protein, 761 aa, Arabidopsis thaliana
MEKLQLFRGDTILIKGKKRKDTVCIALADETCEEPKIRMNKVVRSNLRVRLGDVISVHQCPDVKYGKRVHILPVDDTVEGVTGNLFDAYLKPYFLEAYRPVRKGDLFLVRGGMRSVEFKVIETDPAEYCVVAPDTEIFCEGEPVKREDEERLDEVGYDDVGGVRKQMAQIRELVELPLRHPQLFKSIGVKPPKGILLYGPPGSGKTLIARAVANETGAFFFCINGPEIMSKLAGESESNLRKAFEEAEKNAPSIIFIDEIDSIAPKREKTNGEVERRIVSQLLTLMDGLKSRAHVIVMGATNRPNSIDPALRRFGRFDREIDIGVPDEIGRLEVLRIHTKNMKLAEDVDLERISKDTHGYVGADLAALCTEAALQCIREKMDVIDLEDDSIDAEILNSMAVSNEHFHTALGNSNPSALRETVVEVPNVSWEDIGGLENVKRELQETVQYPVEHPEKFEKFGMSPSKGVLFYGPPGCGKTLLAKAIANECQANFISVKGPELLTMWFGESEANVREIFDKARQSAPCVLFFDELDSIATQRGNSAGDAGGAADRVLNQLLTEMDGMNAKKTVFIIGATNRPDIIDSALLRPGRLDQLIYIPLPDEDSRLNIFKACLRKSPVAKDVDVTALAKYTQGFSGADITEICQRACKYAIRENIEKDIENERRRSQNPEAMEEDMVDDEVSEIRAAHFEESMKYARRSVSDADIRKYQAFAQTLQQSRGFGSEFRFDSTAGVGRTTGVAAADPFATSAAAADDDDLYS

SEQ ID NO: 2556 - protein, 723 aa, Arabidopsis thaliana
MNKVVRSNLRVRLGDVISVHQCPDVKYGKRVHILPVDDTVEGVTGNLFDAYLKPYFLEAYRPVRKGDLFLVRGGMRSVEFKVIETDPAEYCVVAPDTEIFCEGEPVKREDEERLDEVGYDDVGGVRKQMAQIRELVELPLRHPQLFKSIGVKPPKGILLYGPPGSGKTLIARAVANETGAFFFCINGPEIMSKLAGESESNLRKAFEEAEKNAPSIIFIDEIDSIAPKREKTNGEVERRIVSQLLTLMDGLKSRAHVIVMGATNRPNSIDPALRRFGRFDREIDIGVPDEIGRLEVLRIHTKNMKLAEDVDLERISKDTHGYVGADLAALCTEAALQCIREKMDVIDLEDDSIDAEILNSMAVSNEHFHTALGNSNPSALRETVVEVPNVSWEDIGGLENVKRELQETVQYPVEHPEKFEKFGMSPSKGVLFYGPPGCGKTLLAKAIANECQANFISVKGPELLTMWFGESEANVREIFDKARQSAPCVLFFDELDSIATQRGNSAGDAGGAADRVLNQLLTEMDGMNAKKTVFIIGATNRPDIIDSALLRPGRLDQLIYIPLPDEDSRLNIFKACLRKSPVAKDVDVTALAKYTQGFSGADITEICQRACKYAIRENIEKDIENERRRSQNPEAMEEDMVDDEVSEIRAAHFEESMKYARRSVSDADIRKYQAFAQTLQQSRGFGSEFRFDSTAGVGRTTGVAAADPFATSAAAADDDDLYS

SEQ ID NO: 2557 - DNA, 1428 bp, Arabidopsis thaliana
ctttcatcaattttactgtgtttataacataaaacaaaacaaacgatcgatttttgttttttttgggggatgacgatcagaagcaaaagcaaaggctatcgtcacgagatcaaatcaacttgcaccgactccaacactctgttctcaaaaggtcgatttttgttttttggagatgacgatcagaagcaaaagcaaaggatgtcttcaagagatcaaatcaacttgcgccgactccaacactctgttctcaaaagattttggatcccaccatttaaccgtaatcattagcgattccacaaattcaacatgtttgtgtacaaatgcgtcatcattactcgagaaaccggtcgagaacattgtccgtatctcgaatcaggtgttcacattatttcgtggagcacgattactcgagggtactctcaggcactcaggcaggtttaggagaagaagtttttacgtatttctcatggatgagacaagcagggtcaaaaccaaatcctgctcttactagtttgctgagtgtttcaggaaccatggcagttcttgagcaaggcaggcaagttcatgcgcttgctctttatcttagtttagaacagaactctactattcgtagtgctctgattaatatgtactcaaaatgtggaagtatcgaagaagcttcaaagtattcgcagaaatagacagagatgatattgtttctttgatcaatggatatgcagaacatggaaagacctaaaaagctatagatctgtttgagaagagtctgaaggttggtctcagacccgactctgtaactttcatcagcattctctcgccctttactcattcaggacatcatgaccttggttttcactatttcaacttgatgcaagagaagtatattatcagaccaaccaaggaacactatggatgtatggttgatctgctgtgtagagcaggacggccaagtgttgcagagcagatgatcaatgagatgccatggaagaaggacgatgtagtctggaccacacttctcaatgcgtgtaaggcgaaaggagacactgaacgtggaagaagggcggctgagaggattctagagctggatcctacttctgaaactgcatttgtaacactagccaatatatattcaagcacaaggaaattggaagaagctgcgcatgtaaggaaagtaatgaaatcaaacggcgtgatcaaagtgcctggatggtcatcaactaagatcattgcagttggtctcattcacaaagtgaagatatatacagtatattggaattagtagtatccggtgcagaagctcataatatgattcttaactctaatatgttaaaacaaacttggcccttgatacaatagcagcacaagtggtatcattgaatgttaaaatagctcaatcaatatgaattataaggagaatcaaatgcattcctc

SEQ ID NO: 2558 - protein, 136 aa, Arabidopsis thaliana
MQEKYIIRPTKEHYGCMVDLLCRAGRPSVAEQMINEMPWKKDDVVWTTLLNACKAKGDTERGRRAAERILELDPTSETAFVTLANIYSSTRKLEEAAHVRKVMKSNGVIKVPGWSSTKIIAVGLIHKVKIYTVYWN

SEQ ID NO: 2559 - protein, 120 aa, Arabidopsis thaliana
MVDLLCRAGRPSVAEQMINEMPWKKDDVVWTTLLNACKAKGDTERGRRAAERILELDPTSETAFVTLANIYSSTRKLEEAAHVRKVMKSNGVIKVPGWSSTKIIAVGLIHKVKIYTVYWN

SEQ ID NO: 2560 - protein, 119 aa, Arabidopsis thaliana
MRHHYSRNRSRTLSVSRIRCSHYFVEHDYSRVLSGTQAGLGEEVFTYFSWMRQAGSKPNPALTSLLSVSGTMAVLEQGRQVHALALYLSLEQNSTIRSALINMYSKCGSIEEASKYSQK

SEQ ID NO: 2561 - DNA, 1391 bp, Arabidopsis thaliana
gtctccgaaacgcaaccgcagagaacccaaatttatatcattctatatcttctcttcttcaccggcgtacaatagcactcaactcttaacttacgcacctctcttctctcatggcggtttcagtctcagctccggttttgtccctctgttacaatcagagcggcgaattgtctcgtagtttgggatatagactaccgaagaaagtgggatttagctctggtcgtcgttcagtgagttatatcggtttcggtgcggagaaagttggaagatttagggttagggttccgatttgcagagctgtacctcctctcttgttcaaagatctcgatgctgatgatttccgacatccttttgataagcagaacacgttgttactaagggctataccggggttgaacgaattcggcaaagctcttttagggtcaatgacggagcagattatgcttcttgagaacattgggacttctgttcttgtttccaagaatcagctctctgatcttcacggtttgttggttgaggctgctgagattttgaatatagaggctcctgatctatatgtgcgacagagtcctgttcctaatgcgtatacgctggcaataagcggtaagaagccgtttattgttgtccacaccagcttgatcgagcttcttactagcgcggagctacaggctgtcttagcccatgaactaggccatctgaagtgtgatcacggcgtgtggctcacatttgcaaatattcttactcttggggcttatacagttcctgcttttgggcaaatgatagctcgaaccttggaagaacagttacttcgttggctacgttcagcagagctgacttgtgatcgcgcagcactactcgtcgcccaagatccaaaggttgttgtatctgttctgatgaaattagccggaggatgtccatcaatcgctgatcagctaaatgttgacgcatttctagaacaagcccgttcatatgacaaagcttcttcaagccccttgggatggtacataagaaatgctcagactagtcaactttcgcatccattgccggttcttcgtgcacgtgagattgatgagtggtccaggagtctcgagtacaaaagtctcctgaaacgggcaaatcgaaaaagcacagtacagaaggtttagtgacgttgttaaagatttaaaaggaaggaagcgaaataaacatgtataggaacaatacagaaggagcaaagaagaaatgagagattggactctaggtctaaataggtactgtaaaactcttgtatttatttagtggcatactggcattgttgtatatcttataactgtaatagataaattcaaatgtatattccggaaaacaaaagggccttagctcaaagataatatatgataaagattgtttgt

SEQ ID NO: 2562 - protein, 344 aa, Arabidopsis thaliana
MAVSVSAPVLSLCYNQSGELSRSLGYRLPKKVGFSSGRRSVSYIGFGAEKVGRFRVRVPICRAVPPLLFKDLDADDFRHPFDKQNTLLLRAIPGLNEFGKALLGSMTEQIMLLENIGTSVLVSKNQLSDLHGLLVEAAEILNIEAPDLYVRQSPVPNAYTLAISGKKPFIVVHTSLIELLTSAELQAVLAHELGHLKCDHGVWLTFANILTLGAYTVPAFGQMIARTLEEQLLRWLRSAELTCDRAALLVAQDPKVVVSVLMKLAGGCPSIADQLNVDAFLEQARSYDKASSSPLGWYIRNAQTSQLSHPLPVLRAREIDEWSRSLEYKSLLKRANRKSTVQKV

SEQ ID NO: 2563 - protein, 239 aa, Arabidopsis thaliana
MTEQIMLLENIGTSVLVSKNQLSDLHGLLVEAAEILNIEAPDLYVRQSPVPNAYTLAISGKKPFIVVHTSLIELLTSAELQAVLAHELGHLKCDHGVWLTFANILTLGAYTVPAFGQMIARTLEEQLLRWLRSAELTCDRAALLVAQDPKVVVSVLMKLAGGCPSIADQLNVDAFLEQARSYDKASSSPLGWYIRNAQTSQLSHPLPVLRAREIDEWSRSLEYKSLLKRANRKSTVQKV

SEQ ID NO: 2564 - protein, 234 aa, Arabidopsis thaliana
MLLENIGTSVLVSKNQLSDLHGLLVEAAEILNIEAPDLYVRQSPVPNAYTLAISGKKPFIVVHTSLIELLTSAELQAVLAHELGHLKCDHGVWLTFANILTLGAYTVPAFGQMIARTLEEQLLRWLRSAELTCDRAALLVAQDPKVVVSVLMKLAGGCPSIADQLNVDAFLEQARSYDKASSSPLGWYIRNAQTSQLSHPLPVLRAREIDEWSRSLEYKSLLKRANRKSTVQKV

SEQ ID NO: 2565 - DNA, 1682 bp, Arabidopsis thaliana
gttatttgtatgtcggtacacaacatccgtccttgtcaactctcttcacgatcttattctttccaattatatatttcccaaaatatcttccagaaattttgaaattaactccgacgaccaaaagaaggaaactgaaaaagacaatgagcagcagcagcgatactcatgccggagaatctcgtcatcgccgtaacccgatccggtggctactcggtttcggtttcttcgtacaaggattcagaggattcccatggcttggagccaatttcttcctcacagaacagctccgtgttaatccttcagtgcttcagcttcttcaaaactcagccaatcttccaatggtcgctaaacccatctacggcgtcgtttcagactctgtctacttctttggccaacatcgaatcccatacatcgccgttggagctttgttacaagcaatctcatggctagctatagcattcttgtcaagatccaatgtatcaatcttagctttatcgatatatcttctccttagtaatctcggtgcttccttagtagaagtagcgaatgatgctattgttgctgaatccggaaagcaaaaaacctcagagacgcaatccggtgagctaccgtcatttgtttggatggtttcttctcttggtggaatcttaggtaaccttttaggtggtattgctatcaaaacgttttcagctcagtcaacgtttcttgtgtttgggatcttggctcttcttcagttcttggtaactataaacatcagagaaaagtctcttaatcttccggaaaatccatcaccagctggtggtattaggaaacatctctctgatctttcgcatgtgttgaggaagcccgagatttcttattcgatagcttggatcgcggtatcaaccgctgtggttccggttttgacagggactatgtttttttaccaaacaaagtttctgaagattgatgcatcacttttagggatctccaaggtgtttggtcaaattgcaatgcttctttggggttttgcatataatcgttggctaaaagctatgcggccgaggaaactgctgacagccattcaggtgacgatagctttctttgtgatatccgatctcttgtttgtgaaaggcgtgtaccgggatttgggagtgtcggactctgtatatgtactcttcttttctggattcttggaaactctattttacttcaagattctgccgtttactgtcttgatggctcgtctctgtcctcctggatgtgaagggtctctcatggcatttgtcatgtcagccattgctcttgcattcatagttagcggatatcttggaatcgttcttgcatcgtttgtcggtgtaacagaggatgatttctcggggtttactcgcggactcgctatagaagcgtgctgcgttgggattccgttgatcttaacttcttggatatatgatgaagcggaaacaaaagagaagagtaaaaagatagagtgagttcatttgggttaatgtgtactttgtatatctttgtgacattcttgtgatttgaggttttacatagtctctgtcattgtctacatggtccaactttcgattgtgtaactttttctttgattttgcttcatatttcgatggtagaagcatactttgtatatatgtgactttgtttggtgctagtgctattagtgattacttgtttatgct

SEQ ID NO: 2566 - protein, 489 aa, Arabidopsis thaliana
YLYVGTQHPSLSTLFTILFFPIIYFPKYLPEILKLTPTTKRRKLKKTMSSSSDTHAGESRHRRNPIRWLLGFGFFVQGFRGFPWLGANFFLTEQLRVNPSVLQLLQNSANLPMVAKPIYGVVSDSVYFFGQHRIPYIAVGALLQAISWLAIAFLSRSNVSILALSIYLLLSNLGASLVEVANDAIVAESGKQKTSETQSGELPSFVWMVSSLGGILGNLLGGIAIKTFSAQSTFLVFGILALLQFLVTINIREKSLNLPENPSPAGGIRKHLSDLSHVLRKPEISYSIAWIAVSTAVVPVLTGTMFFYQTKFLKIDASLLGISKVFGQIAMLLWGFAYNRWLKAMRPRKLLTAIQVTIAFFVISDLLFVKGVYRDLGVSDSVYVLFFSGFLETLFYFKILPFTVLMARLCPPGCEGSLMAFVMSAIALAFIVSGYLGIVLASFVGVTEDDFSGFTRGLAIEACCVGIPLILTSWIYDEAETKEKSKKIE

SEQ ID NO: 2567 - protein, 442 aa, Arabidopsis thaliana
MSSSSDTHAGESRHRRNPIRWLLGFGFFVQGFRGFPWLGANFFLTEQLRVNPSVLQLLQNSANLPMVAKPIYGVVSDSVYFFGQHRIPYIAVGALLQAISWLAIAFLSRSNVSILALSIYLLLSNLGASLVEVANDAIVAESGKQKTSETQSGELPSFVWMVSSLGGILGNLLGGIAIKTFSAQSTFLVFGILALLQFLVTINIREKSLNLPENPSPAGGIRKHLSDLSHVLRKPEISYSIAWIAVSTAVVPVLTGTMFFYQTKFLKIDASLLGISKVFGQIAMLLWGFAYNRWLKAMRPRKLLTAIQVTIAFFVISDLLFVKGVYRDLGVSDSVYVLFFSGFLETLFYFKILPFTVLMARLCPPGCEGSLMAFVMSAIALAFIVSGYLGIVLASFVGVTEDDFSGFTRGLAIEACCVGIPLILTSWIYDEAETKEKSKKIE

SEQ ID NO: 2568 - protein, 377 aa, Arabidopsis thaliana
MVAKPIYGVVSDSVYFFGQHRIPYIAVGALLQAISWLAIAFLSRSNVSILALSIYLLLSNLGASLVEVANDAIVAESGKQKTSETQSGELPSFVWMVSSLGGILGNLLGGIAIKTFSAQSTFLVFGILALLQFLVTINIREKSLNLPENPSPAGGIRKHLSDLSHVLRKPEISYSIAWIAVSTAVVPVLTGTMFFYQTKFLKIDASLLGISKVFGQIAMLLWGFAYNRWLKAMRPRKLLTAIQVTIAFFVISDLLFVKGVYRDLGVSDSVYVLFFSGFLETLFYFKILPFTVLMARLCPPGCEGSLMAFVMSAIALAFIVSGYLGIVLASFVGVTEDDFSGFTRGLAIEACCVGIPLILTSWIYDEAETKEKSKKIE

SEQ ID NO: 2569 - DNA, 1106 bp, Arabidopsis thaliana
tctttttgtcgactgcttcttcacgccgtcgaggaattcttctccaccaacgaatccggcgacgtcttatcaccaccttgtcgaatctttagttgatgttgtttaaaggttttagctaataagggcatgaaacggatctgctcggtttcaagtgttcaacttttttccagaagtttcagagctttagcatcgccacgttccttgaactatcccctgcagtgtatcaagcgttcatcagttcggatggagagtagcaactgttcttctggtgtcagaaccgagagtagtgtgaagccaagaggagcattgatagttctagaaggtcttgatcgcagcgggaaatcaacacagtgtgctaagctactctctttcttgaatggtttaggacatccgaccgagctctggagattccccgatagagagacgagtgtcggtcagatgatatccgcgtatctttctaataagtcgcagttagatgatcacacaattcatctccttttcagcgccaatcgttgggagaaaaggtcgttgatggaggaaaagctaaaaacaggaactacgcttatcgtggatcgttattcgtattctggtgttgcattctcatcagctaaaggtctcgatatcgaatggtgcaaggctcccgaaatcgggttactggctccagattctgtactttacctggacatttcacctgaaagagctgctgagagaggtggatatggagatgagaggtatgagcgagtggagtttcagaagaaagttgcagacttttatcaaacccttggcgattctttcatggaagataatcaatgccagtgatgccatggaggaagtagagaagaagattcaacaagtggtattagatcaagtcaaagaatgtactgaaggaaagcctctgtctctcctatggtcgtcatagaacgttttcgagtcatagcacttgcaagtttagtgattttgaaggaacttttgttgaagtttatactatgttgtgccatctaagcccattaacaggcccaaaagtttagtttatgtcgtcactcatgacatcttaatcgattattttggtgtaaactaattgagcgtcattaagtaaaggacaaatc

SEQ ID NO: 2570 - protein, 230 aa, Arabidopsis thaliana
MKRICSVSSVQLFSRSFRALASPRSLNYPLQCIKRSSVRMESSNCSSGVRTESSVKPRGALIVLEGLDRSGKSTQCAKLLSFLNGLGHPTELWRFPDRETSVGQMISAYLSNKSQLDDHTIHLLFSANRWEKRSLMEEKLKTGTTLIVDRYSYSGVAFSSAKGLDIEWCKAPEIGLLAPDSVLYLDISPERAAERGGYGDERYERVEFQKKVADFYQTLGDSFMEDNQCQ

SEQ ID NO: 2571 - protein, 191 aa, Arabidopsis thaliana
MESSNCSSGVRTESSVKPRGALIVLEGLDRSGKSTQCAKLLSFLNGLGHPTELWRFPDRETSVGQMISAYLSNKSQLDDHTIHLLFSANRWEKRSLMEEKLKTGTTLIVDRYSYSGVAFSSAKGLDIEWCKAPEIGLLAPDSVLYLDISPERAAERGGYGDERYERVEFQKKVADFYQTLGDSFMEDNQCQ

SEQ ID NO: 2572 - protein, 126 aa, Arabidopsis thaliana
MISAYLSNKSQLDDHTIHLLFSANRWEKRSLMEEKLKTGTTLIVDRYSYSGVAFSSAKGLDIEWCKAPEIGLLAPDSVLYLDISPERAAERGGYGDERYERVEFQKKVADFYQTLGDSFMEDNQCQ

SEQ ID NO: 2573 - DNA, 1523 bp, Arabidopsis thaliana
gaagaacctctgtttcttcctcttcttcttcagggtcggtgttaggtgatgaagctccgtttttttcgttttcgtcttcttcttcttcaaggtctcttcgttttgtgcttgaagtaagaaaatttgggagaacaatgtcggcttcttcttcctcctttgaacaacctcaagtcataacctgcaacgcggcggtggcatggcgtgctggtgagccattggttatggaggaagttgaagtgagtccacctcaaccacttgagatcagaattaaagttgtatgtacatctctctgtcgtagtgatctctctgcttgggaatctcagtctcttttgcctcgaatatttggccatgaagctgcaggtatagtggagagcattggagaaggtgtaactgagtttgaaaaaggagatcatgtgcttgctgtattcactggagaatgtgggtcatgtcggcattgcatatctgggaaaagtaacatgtgtcaggttcttggaatggagaggaaaggtttgatgcatagtgatcagaagacacgcttctccatcaaaggcaaacctgtttaccattactgcgcggtttctagtttcagcgagtacactgtggttcactctggctgtgctgtcaaagtcgatccactggcacctctgcataaaatttgtcttctaagctgtggagtagctgcaggtcttggtgcagcatggaatgttgctgatgtacaaaaaggttcaagtgttgtgatatttggtcttggaactgtcggtctttctgttgctcaaggtgccaaacttagaggagcagctcaaatacttggggttgatataaatcctgctaaggctgaacaagcaaagacatttggtgtcacggatttcatcaattcaaatgacctctctgaacctataccccaggtgatcaaaagaatgacaggaggaggtgcagatttctcatttgaatgtgttggtgatacaggaatagctacaactgctttacaatcgtgctcggatggatggggaatgacggttactctaggtgtaccgaaagctaagcctgaagtttcagctcattacggacttttcctttctgggaaatctttaaaagggactctttttggtggttggaagcctaaatctgatcttccttcactcattgacaagtacatgaacaaggagattatgatcgatgaatttattacgcataacctgtcatttgatgaaatcaacaaagcttttgttcttatgagagaaggaaaatgtttgcgttgtgttcttcacatgccaaagtaatgtctcggaaaacacatgtcacagattcaagaaagattaacgagagctctgtatattctacagctgagttgttgtataaaacaaaagtgatggttttctatagggttatgagacttttttttttcttttggtttgttgtgaagtgatcgttcatacattataaagatggattctcacatgatgaatcaaacgagttcctagaaccaaggacattgatcttaaattgataacagtgtttcaagt

SEQ ID NO: 2574 - protein, 425 aa, Arabidopsis thaliana
RTSVSSSSSSGSVLGDEAPFFSFSSSSSSRSLRFVLEVRKFGRTMSASSSSFEQPQVITCNAAVAWRAGEPLVMEEVEVSPPQPLEIRIKVVCTSLCRSDLSAWESQSLLPRIFGHEAAGIVESIGEGVTEFEKGDHVLAVFTGECGSCRHCISGKSNMCQVLGMERKGLMHSDQKTRFSIKGKPVYHYCAVSSFSEYTVVHSGCAVKVDPLAPLHKICLLSCGVAAGLGAAWNVADVQKGSSVVIFGLGTVGLSVAQGAKLRGAAQILGVDINPAKAEQAKTFGVTDFINSNDLSEPIPQVIKRMTGGGADFSFECVGDTGIATTALQSCSDGWGMTVTLGVPKAKPEVSAHYGLFLSGKSLKGTLFGGWKPKSDLPSLIDKYMNKEIMIDEFITHNLSFDEINKAFVLMREGKCLRCVLHMPK

SEQ ID NO: 2575 - protein, 381 aa, Arabidopsis thaliana
MSASSSSFEQPQVITCNAAVAWRAGEPLVMEEVEVSPPQPLEIRIKVVCTSLCRSDLSAWESQSLLPRIFGHEAAGIVESIGEGVTEFEKGDHVLAVFTGECGSCRHCISGKSNMCQVLGMERKGLMHSDQKTRFSIKGKPVYHYCAVSSFSEYTVVHSGCAVKVDPLAPLHKICLLSCGVAAGLGAAWNVADVQKGSSVVIFGLGTVGLSVAQGAKLRGAAQILGVDINPAKAEQAKTFGVTDFINSNDLSEPIPQVIKRMTGGGADFSFECVGDTGIATTALQSCSDGWGMTVTLGVPKAKPEVSAHYGLFLSGKSLKGTLFGGWKPKSDLPSLIDKYMNKEIMIDEFITHNLSFDEINKAFVLMREGKCLRCVLHMPK

SEQ ID NO: 2576 - protein, 352 aa, Arabidopsis thaliana
MEEVEVSPPQPLEIRIKVVCTSLCRSDLSAWESQSLLPRIFGHEAAGIVESIGEGVTEFEKGDHVLAVFTGECGSCRHCISGKSNMCQVLGMERKGLMHSDQKTRFSIKGKPVYHYCAVSSFSEYTVVHSGCAVKVDPLAPLHKICLLSCGVAAGLGAAWNVADVQKGSSVVIFGLGTVGLSVAQGAKLRGAAQILGVDINPAKAEQAKTFGVTDFINSNDLSEPIPQVIKRMTGGGADFSFECVGDTGIATTALQSCSDGWGMTVTLGVPKAKPEVSAHYGLFLSGKSLKGTLFGGWKPKSDLPSLIDKYMNKEIMIDEFITHNLSFDEINKAFVLMREGKCLRCVLHMPK

SEQ ID NO: 2577 - DNA, 1970 bp, Arabidopsis thaliana
ctgatattggcatctccattactaactcctgatttacggttaaaacgcctcttccctctctccgacgcttctcgtcggaaatctgggtttaagtttcttctgcagatcggaagagattctattgaagcggcgttgacacgatttcatctataattgtacgataatgaagcagaagaaccagcataagaagaagaagaagcgatcctgcgccgcgaaaccttccggtgatggaacgacgtcggacgggaacaaaaaagatgtggaggaagagaggaaggacggtgaaggaaagagggagatagaaaacgttggaaaaaattttatcgaatcgttaatggaagccttttgctcggtttcaatggaggaagcgatggctgcttataaggaagcaggcggagatctgaacaaagccgctgagattttatcggatctggtggaaagcggtgatgatccgtcgacgagttcggtggcgagtggttcttcgggtcaggaaacagcgtctacctctgagtatggggcagggtcaagttctagctgtagcgaagatttgactagagatagatggtttaagggaagcaagcagagtagagttattgctgctacagggatggtttcttctgtgattgcgaaggattacttgaagccaaaccctgtgcgaaaagagtttcctatgatggaacggtctaaagagctctgtgggaacgggaaaaaagctgcggatagagagaaagctgaacagttcttaagttcaatgcttggagatgattgcgagcttagcatggctgttgttagagatgttttgtgtcaatgtggctatgatgtcgacatggctttgaatgtcttgcttgacatgtcttcttcatcaactgatgattcattgagtggtaaatgtttcggcataggagtcagcgatagtctggcagagtcatcttttgatactgatacttctgattgtgaacttttctggggtggagactatagtcaaagggactacgcaaaagctctcatgagttctcaagatccttttgcaactacccaaggaattgatgagcttggtcttccacaaaaagtgttggagtctctgttcaacattcgccagaatcctaaacatgaatcaaagacaacgagttggaggaatgtggcaaagaaaatgcagtcacttggcattgatgcttcttcatctagtggggaagagcctcaccctaatacgtttgtgaaggatgacagttatcatgaacttagaaaaggtgcaaatgaccagtggaatgttacgaagtcctactatcaaaaagctgccgaagcatattcgaaaggagggagggctcatgcggcttacctttctgacaagggaagagtggcatctaaacaagctcaacgggctgatgagagggcaagccaagatatattcgttgcaagaaacaaaggtatagagaatgtggtaaccattgatctgcatggtcagcatgttaaaccagcaatgaagctactgaagctacatctcttatttggatcatatgttccttccattcagactctacgagtgatcacaggatgtggagcttctgggtttgggaagtctaaggtgaaacaatcagtggtaaagctgctagaaagagaaggagttaggtattgtgaagagaacagagggacactgctgatcaagcttgacggaggtagtagagagttcagtttcttagacacagagagtgactctgatgaataagtgataactaaaactaaagtcaggttttagctttagatcttaaaatttatgtcgattttgtctatatctgatgctagctctctgttgttaagtaaatgttgggcaaaacttagcttccttctttttcctttccgtatttcacgttatttaagttctgaaaacactttgtctgacacagacagaatgtatatttttcgctaactcttctttaggagtttactgatatatatattatcgtgtaacttct

SEQ ID NO: 2578 - protein, 519 aa, Arabidopsis thaliana
MKQKNQHKKKKKRSCAAKPSGDGTTSDGNKKDVEEERKDGEGKREIENVGKNFIESLMEAFCSVSMEEAMAAYKEAGGDLNKAAEILSDLVESGDDPSTSSVASGSSGQETASTSEYGAGSSSSCSEDLTRDRWFKGSKQSRVIAATGMVSSVIAKDYLKPNPVRKEFPMMERSKELCGNGKKAADREKAEQFLSSMLGDDCELSMAVVRDVLCQCGYDVDMALNVLLDMSSSSTDDSLSGKCFGIGVSDSLAESSFDTDTSDCELFWGGDYSQRDYAKALMSSQDPFATTQGIDELGLPQKVLESLFNIRQNPKHESKTTSWRNVAKKMQSLGIDASSSSGEEPHPNTFVKDDSYHELRKGANDQWNVTKSYYQKAAEAYSKGGRAHAAYLSDKGRVASKQAQRADERASQDIFVARNKGIENVVTIDLHGQHVKPAMKLLKLHLLFGSYVPSIQTLRVITGCGASGFGKSKVKQSVVKLLEREGVRYCEENRGTLLIKLDGGSREFSFLDTESDSDE

SEQ ID NO: 2579 - protein, 462 aa, Arabidopsis thaliana
MEAFCSVSMEEAMAAYKEAGGDLNKAAEILSDLVESGDDPSTSSVASGSSGQETASTSEYGAGSSSSCSEDLTRDRWFKGSKQSRVIAATGMVSSVIAKDYLKPNPVRKEFPMMERSKELCGNGKKAADREKAEQFLSSMLGDDCELSMAVVRDVLCQCGYDVDMALNVLLDMSSSSTDDSLSGKCFGIGVSDSLAESSFDTDTSDCELFWGGDYSQRDYAKALMSSQDPFATTQGIDELGLPQKVLESLFNIRQNPKHESKTTSWRNVAKKMQSLGIDASSSSGEEPHPNTFVKDDSYHELRKGANDQWNVTKSYYQKAAEAYSKGGRAHAAYLSDKGRVASKQAQRADERASQDIFVARNKGIENVVTIDLHGQHVKPAMKLLKLHLLFGSYVPSIQTLRVITGCGASGFGKSKVKQSVVKLLEREGVRYCEENRGTLLIKLDGGSREFSFLDTESDSDE

SEQ ID NO: 2580 - protein, 454 aa, Arabidopsis thaliana
MEEAMAAYKEAGGDLNKAAEILSDLVESGDDPSTSSVASGSSGQETASTSEYGAGSSSSCSEDLTRDRWFKGSKQSRVIAATGMVSSVIAKDYLKPNPVRKEFPMMERSKELCGNGKKAADREKAEQFLSSMLGDDCELSMAVVRDVLCQCGYDVDMALNVLLDMSSSSTDDSLSGKCFGIGVSDSLAESSFDTDTSDCELFWGGDYSQRDYAKALMSSQDPFATTQGIDELGLPQKVLESLFNIRQNPKHESKTTSWRNVAKKMQSLGIDASSSSGEEPHPNTFVKDDSYHELRKGANDQWNVTKSYYQKAAEAYSKGGRAHAAYLSDKGRVASKQAQRADERASQDIFVARNKGIENVVTIDLHGQHVKPAMKLLKLHLLFGSYVPSIQTLRVITGCGASGFGKSKVKQSVVKLLEREGVRYCEENRGTLLIKLDGGSREFSFLDTESDSDE

SEQ ID NO: 2581 - DNA, 1221 bp, Arabidopsis thaliana
actcaatcttttacttactctccacacaaaattcagtttttccgcttcgtctgaaattactcttcctctctagccatggccgtctgtaactgcttcctccaagctccaccactctctcgcatactcctaccggttttatctcgccgagctactactctctctgccggttatggtcggctcaaatccacggtcacgttctgctctactgtgaaccggaccagtcctctgacatcttcggtccgcgcagaagtaaagcgcgtctcgcgtaaagacgataaagtagcttcagctactgatgttcaatttgagacgcctttgaagattgttgagtatccggatcctatactacgggctaagaacaagaggattgatatttttgacgagaatttaaagaacttggttgatgctatgtttgatgttatgtacaaaacggatggcattgggctctcagcaccacaagtaggtctcaatgttcaactcatggtgtttaatccagctggagagcctggagaaggaaaagaaattgtccttgtaaatccgaaaatcaagaaatattccgataaattagtaccgtttgatgaaggatgcctctccttcccggggatctatgctgaagttgttcgaccacaatctgtcaagattgatgcaagggatattactggtgaaagattttcaatcagtctatcacgtttacctgcacgaatctttcagcacgaatacgaccatctggagggagttctcttctttgacagaatgacggatcaagttcttgatagcattcgtgaagagctagaggccctagaaaagaagtacgaagaaaaaactggattgccaagccctgaaagagtagaagcacgacaaaaaaggaaagcaggagttggttttggcaaacgttgatgagacattctcgctcaaattcctttcatctacgtgaatttactatggtataggaagcagacaatgacaagagacacgtttgctttttaaatttagaggagcacatcacattatgtgatgcaaatctcccaaataggatgtacggttgagacacagatcatatatttcagaatcttattttggtctgagtaatatatttcttcagtttgtctgtcttgtgctgttagcttgagctttggaactgcgttaagaatgttcttgccgactaagttgaaccatgtcgtggtttatccgttgttacaaagtaaaatgcgttagttgttt

SEQ ID NO: 2582 - protein, 273 aa, Arabidopsis thaliana
MAVCNCFLQAPPLSRILLPVLSRRATTLSAGYGRLKSTVTFCSTVNRTSPLTSSVRAEVKRVSRKDDKVASATDVQFETPLKIVEYPDPILRAKNKRIDIFDENLKNLVDAMFDVMYKTDGIGLSAPQVGLNVQLMVFNPAGEPGEGKEIVLVNPKIKKYSDKLVPFDEGCLSFPGIYAEVVRPQSVKIDARDITGERFSISLSRLPARIFQHEYDHLEGVLFFDRMTDQVLDSIREELEALEKKYEEKTGLPSPERVEARQKRKAGVGFGKR

SEQ ID NO: 2583 - protein, 162 aa, Arabidopsis thaliana
MFDVMYKTDGIGLSAPQVGLNVQLMVFNPAGEPGEGKEIVLVNPKIKKYSDKLVPFDEGCLSFPGIYAEVVRPQSVKIDARDITGERFSISLSRLPARIFQHEYDHLEGVLFFDRMTDQVLDSIREELEALEKKYEEKTGLPSPERVEARQKRKAGVGFGKR

SEQ ID NO: 2584 - protein, 158 aa, Arabidopsis thaliana
MYKTDGIGLSAPQVGLNVQLMVFNPAGEPGEGKEIVLVNPKIKKYSDKLVPFDEGCLSFPGIYAEVVRPQSVKIDARDITGERFSISLSRLPARIFQHEYDHLEGVLFFDRMTDQVLDSIREELEALEKKYEEKTGLPSPERVEARQKRKAGVGFGKR

SEQ ID NO: 2585 - DNA, 2150 bp, Arabidopsis thaliana
agacttaacatttcatatagagaaacttgaaacaacaatctgagcaaagagcgttttatcttgttaattttggaatctccattacgatggaaggtgcggctgatcaaactacgaaagcgttatctgaattagccatggattcttctaccaccttgaatgctgctgagtctagcgctggtgatggagctggacctcggagtaaaaatgctttgaagaaggaacagaaaatgaagcagaaagaggaagagaagagacgaaaggacgaagagaaagctgaaaaggctaaacaagcacctaaagcaagctcccagaaggcagtggcagcagatgatgaagagatggatgcaacgcaatactatgagaacagattgaaatatcttgcggctgagaaggctaaaggggagaatccatatcctcacaagttcgctgtgtcaatgtcgattcctaaatacattgagacgtatggtagtttgaacaatggagatcatgttgaaaacgctgaggagtctttagctgggcggataatgagcaagcgatcttcctcttccaagctcttcttctatgatctacacggtgatgatttcaaggtccaagtcatggctgatgcaagtaagtcaggattggatgaagctgagttcttaaagctccattcgaatgctaagcgtggtgatattgttggagtcattgggtttccaggaaaaactaagaggggagaattgagtatctttccccgatcatttattcttctgtcccattgcctccacatgatgccgagaaaggctgataatgttaatgcaaagaaacctgaaatctgggttccaggtcaaacgagaaatcctgaagcatatgttctgaaagaccaggaatcaagatatcgtcagcgtcatcttgatatgattttgaacgtggaggttcgtcagatattcaggactagagctaaaatcatctcctatgtccgcagattcctcgacaacaaaaatttcttggaggtcgagacacctatgatgaacatgattgctggtggagcagctgctagaccttttgtgacacatcacaatgatctagatatgaggctgtacatgcgaatcgcacctgaactctatctcaagcaacttattgttggtggcttggaacgtgtttacgagataggaaagcaattcagaaacgagggtatagacctgacccacaatccggagttcaccacttgcgagttctatatggcttttgcagactacaatgacctgatggaaatgactgaggttatgttgagtggcatggttaaggaattaacaggtggttataaaatcaagtataatgctaatgggtatgacaaggatccaattgaaatcgactttactccaccattcaggaggattgagatgataggagagttagagaaggttgctaagctcaatataccaaaagacttggctagcgaagaagctaacaagtatctgattgatgcatgtgcgaggtttgatgtcaaatgccctcctcctcagacaacagctcgtctgttagataaacttgttggagaatttctggaaccgacatgtgtgaacccaactttcatcatcaaccagcccgagatcatgagtcctttggctaaatggcacagatcgaagagtggattgacagagagattcgagctgttcatcaacaaacatgaactctgcaatgcctacacggagctaaacgatcctgtggtacagcgccagcgttttgctgatcagctcaaggatcgacagtctggagacgatgaagcgatggctttagatgaaacattttgtaatgctttagaatatgggttggctcctacaggtggctggggattaggaatagacagactctctatgcttttgaccgactcactgaacatcaaggaggttcttttcttcccggcaatgaggccaccacaggaggagtcagcagccgctcaagctcctttaacagaagagaagaaataaggagtctacacaagttttctgactaagcttagtcaattcgctattatgcactctgttctcaagttacttgtaattgcagaccatatttttcaaaaaacaaataccaattaattattatcaaaaacctttgtaagacttttttgcaattagtagtgatttcacttatattgaagggcctttttt

SEQ ID NO: 2586 - protein, 626 aa, Arabidopsis thaliana
MEGAADQTTKALSELAMDSSTTLNAAESSAGDGAGPRSKNALKKEQKMKQKEEEKRRKDEEKAEKAKQAPKASSQKAVAADDEEMDATQYYENRLKYLAAEKAKGENPYPHKFAVSMSIPKYIETYGSLNNGDHVENAEESLAGRIMSKRSSSSKLFFYDLHGDDFKVQVMADASKSGLDEAEFLKLHSNAKRGDIVGVIGFPGKTKRGELSIFPRSFILLSHCLHMMPRKADNVNAKKPEIWVPGQTRNPEAYVLKDQESRYRQRHLDMILNVEVRQIFRTRAKIISYVRRFLDNKNFLEVETPMMNMIAGGAAARPFVTHHNDLDMRLYMRIAPELYLKQLIVGGLERVYEIGKQFRNEGIDLTHNPEFTTCEFYMAFADYNDLMEMTEVMLSGMVKELTGGYKIKYNANGYDKDPIEIDFTPPFRRIEMIGELEKVAKLNIPKDLASEEANKYLIDACARFDVKCPPPQTTARLLDKLVGEFLEPTCVNPTFIINQPEIMSPLAKWHRSKSGLTERFELFINKHELCNAYTELNDPVVQRQRFADQLKDRQSGDDEAMALDETFCNALEYGLAPTGGWGLGIDRLSMLLTDSLNIKEVLFFPAMRPPQEESAAAQAPLTEEKK

SEQ ID NO: 2587 - protein, 610 aa, Arabidopsis thaliana
MDSSTTLNAAESSAGDGAGPRSKNALKKEQKMKQKEEEKRRKDEEKAEKAKQAPKASSQKAVAADDEEMDATQYYENRLKYLAAEKAKGENPYPHKFAVSMSIPKYIETYGSLNNGDHVENAEESLAGRIMSKRSSSSKLFFYDLHGDDFKVQVMADASKSGLDEAEFLKLHSNAKRGDIVGVIGFPGKTKRGELSIFPRSFILLSHCLHMMPRKADNVNAKKPEIWVPGQTRNPEAYVLKDQESRYRQRHLDMILNVEVRQIFRTRAKIISYVRRFLDNKNFLEVETPMMNMIAGGAAARPFVTHHNDLDMRLYMRIAPELYLKQLIVGGLERVYEIGKQFRNEGIDLTHNPEFTTCEFYMAFADYNDLMEMTEVMLSGMVKELTGGYKIKYNANGYDKDPIEIDFTPPFRRIEMIGELEKVAKLNIPKDLASEEANKYLIDACARFDVKCPPPQTTARLLDKLVGEFLEPTCVNPTFIINQPEIMSPLAKWHRSKSGLTERFELFINKHELCNAYTELNDPVVQRQRFADQLKDRQSGDDEAMALDETFCNALEYGLAPTGGWGLGIDRLSMLLTDSLNIKEVLFFPAMRPPQEESAAAQAPLTEEKK

SEQ ID NO: 2588 - protein, 579 aa, Arabidopsis thaliana
MKQKEEEKRRKDEEKAEKAKQAPKASSQKAVAADDEEMDATQYYENRLKYLAAEKAKGENPYPHKFAVSMSIPKYIETYGSLNNGDHVENAEESLAGRIMSKRSSSSKLFFYDLHGDDFKVQVMADASKSGLDEAEFLKLHSNAKRGDIVGVIGFPGKTKRGELSIFPRSFILLSHCLHMMPRKADNVNAKKPEIWVPGQTRNPEAYVLKDQESRYRQRHLDMILNVEVRQIFRTRAKIISYVRRFLDNKNFLEVETPMMNMIAGGAAARPFVTHHNDLDMRLYMRIAPELYLKQLIVGGLERVYEIGKQFRNEGIDLTHNPEFTTCEFYMAFADYNDLMEMTEVMLSGMVKELTGGYKIKYNANGYDKDPIEIDFTPPFRRIEMIGELEKVAKLNIPKDLASEEANKYLIDACARFDVKCPPPQTTARLLDKLVGEFLEPTCVNPTFIINQPEIMSPLAKWHRSKSGLTERFELFINKHELCNAYTELNDPVVQRQRFADQLKDRQSGDDEAMALDETFCNALEYGLAPTGGWGLGIDRLSMLLTDSLNIKEVLFFPAMRPPQEESAAAQAPLTEEKK

SEQ ID NO: 2589 - DNA, 1509 bp, Arabidopsis thaliana
acgattgagaagagacactcttcactgttcatataacgtccccattgttgaattcgagagtgccaattttaaaccgagactgatgattgagaagaaactgtcgaagatgaagatgagaaccaaatcgattccggttaggtcttcgcgcaaatccctcgattcgcttctggatgatgaagctaatgaaaacacacaatgtgatgaaagagatgtgccacacaagaagcgtcgttgtcttgggactagtgagactactgatagaggaggatctgtagagccgctgctggacttggatgcttgtattgtatgtgaagtttcagacgagcgggtatctcgttgttgcggggttgactgtcttctttcgtttcacggcgagtgtttgtatgctgatttgggtagtactagtagtagtagtagtagtagtagtgaggatgtttcgaatccattttgtccttattgctggctcaagattgttgcactgaaatccaaaacattgagagaaaagaccgttgaggcggaaaaggcggtctgcaagtatctagataaagagatgaaaagcagggatgagggtataaccttatctggtgatgaaattggaaaccaagagcagagtacagacattgtaagtgatcatgagttacaaggagagaaggatggctgttcatcaaaaccagatgcggatcaagggaaagtgggtactggtaaagtgattgacgaagttggagcatcagagaaggtagctacagaaaaatttcaagacgctgaagatgatgaaacagctaaagatcaaggtacaagaatcctgaatacaggtgcagggaaaaagagagaggtttcttcgtttttgtctatgcaagaatcgttttcagcaaaagaacaggaccaggtccagcagaatgagaagcgaagaaggagaggattgaaaattatcgatagtgacatctcatcaaagggatcaagtaacgaacgaaatggagaagatgtaactgagcaggtaacttcatcggttcaagtaacctccccgtcagggagaatgaggaaccagcaggcaacaaccaaagttgtggctaagtcaaagacagtgagggacatttctttctttaagatggatcaaagaaggaggctactttggacgtacgaagaagaagagatgctaaaggtgggagtggagaaatttgcagcagaagcaaacaagaacatgccatggaggaaaattctggaaatgggagagaaggtgttccacgaaacacgtactccagctgatctcaaggacaaatggaggagcatggtcaagattatgaacaaaaacgaacaaggcagcacactaacccctactgctatgtaatcaatagttagtgtgacttattttggagatgaagccagacttggtgaactaatgtgggagttgatctgtgtaatagacaaaagttcctcctttacaagaactgacttctactttttgtgtatcttcgacatctttagattttcagtatagataatatatggctc

SEQ ID NO: 2590 - protein, 447 aa, Arabidopsis thaliana
RLRRDTLHCSYNVPIVEFESANFKPRLMIEKKLSKMKMRTKSIPVRSSRKSLDSLLDDEANENTQCDERDVPHKKRRCLGTSETTDRGGSVEPLLDLDACIVCEVSDERVSRCCGVDCLLSFHGECLYADLGSTSSSSSSSSEDVSNPFCPYCWLKIVALKSKTLREKTVEAEKAVCKYLDKEMKSRDEGITLSGDEIGNQEQSTDIVSDHELQGEKDGCSSKPDADQGKVGTGKVIDEVGASEKVATEKFQDAEDDETAKDQGTRILNTGAGKKREVSSFLSMQESFSAKEQDQVQQNEKRRRRGLKIIDSDISSKGSSNERNGEDVTEQVTSSVQVTSPSGRMRNQQATTKVVAKSKTVRDISFFKMDQRRRLLWTYEEEEMLKVGVEKFAAEANKNMPWRKILEMGEKVFHETRTPADLKDKWRSMVKIMNKNEQGSTLTPTAM

SEQ ID NO: 2591 - protein, 420 aa, Arabidopsis thaliana
MIEKKLSKMKMRTKSIPVRSSRKSLDSLLDDEANENTQCDERDVPHKKRRCLGTSETTDRGGSVEPLLDLDACIVCEVSDERVSRCCGVDCLLSFHGECLYADLGSTSSSSSSSSEDVSNPFCPYCWLKIVALKSKTLREKTVEAEKAVCKYLDKEMKSRDEGITLSGDEIGNQEQSTDIVSDHELQGEKDGCSSKPDADQGKVGTGKVIDEVGASEKVATEKFQDAEDDETAKDQGTRILNTGAGKKREVSSFLSMQESFSAKEQDQVQQNEKRRRRGLKIIDSDISSKGSSNERNGEDVTEQVTSSVQVTSPSGRMRNQQATTKVVAKSKTVRDISFFKMDQRRRLLWTYEEEEMLKVGVEKFAAEANKNMPWRKILEMGEKVFHETRTPADLKDKWRSMVKIMNKNEQGSTLTPTAM

SEQ ID NO: 2592 - protein, 412 aa, Arabidopsis thaliana
MKMRTKSIPVRSSRKSLDSLLDDEANENTQCDERDVPHKKRRCLGTSETTDRGGSVEPLLDLDACIVCEVSDERVSRCCGVDCLLSFHGECLYADLGSTSSSSSSSSEDVSNPFCPYCWLKIVALKSKTLREKTVEAEKAVCKYLDKEMKSRDEGITLSGDEIGNQEQSTDIVSDHELQGEKDGCSSKPDADQGKVGTGKVIDEVGASEKVATEKFQDAEDDETAKDQGTRILNTGAGKKREVSSFLSMQESFSAKEQDQVQQNEKRRRRGLKIIDSDISSKGSSNERNGEDVTEQVTSSVQVTSPSGRMRNQQATTKVVAKSKTVRDISFFKMDQRRRLLWTYEEEEMLKVGVEKFAAEANKNMPWRKILEMGEKVFHETRTPADLKDKWRSMVKIMNKNEQGSTLTPTAM

SEQ ID NO: 2593 - DNA, 2144 bp, Arabidopsis thaliana
acgccactatagcattggaaaagaaagaaagagagagaacaaagcttcttcatcaatggagaagcaaggatgtgagatcgaagctttagatattgattacaacatctttgtaaggaagattaatgttaatccctttggaatctttaggcggaaaccgcggccggaagctgaccagccggtaaagacagaggaagagtcattgaagctagaggatgaaaccggtaacaaagtcaagcatgtactaaaaggagtgacttgcagagccaaaccatgggagattcttgctattgttggcccaagtggtgcagggaagtcgtctttgcttgaaattctagctgctagactcatccctcaaaccgggtcggtttatgtcaacaagagaccggtggatagagccaatttcaagaaaatctctggttatgtcactcagaaggatactctgtttcctttgcttacggtggaggaaacccttctgttcagtgctaagctgcgtttaaagctccctgcagatgaactgagatcacgggttaagtctttggtccatgagcttgggcttgaagctgttgccacggctcgtgttggcgatgatagtgtcagaggtatatcgggtggagagagacgtcgtgtctccataggagttgaagttattcacgaccccaaagttctgatccttgatgaaccaacctctgggcttgatagtacttcggctctgctgatcatagacatgctcaaacacatggctgaaacacgaggcaggaccataattctgactatccaccaaccgggatttcggatagtcaaacagttcaattctgttctcttgttggccaatggctcgaccttgaagcaggggtcggtggatcagcttggcgtttacttaaggtcaaatggtttgcaccctcctctccatgaaaacatcgttgaatttgccattgaatcaatcgaatccatcacaaaacagcaacggctacaggaaagcagaagagcagctcatgtcctaacaccacaaacaacattacaagagaagagatcagaagatagtcaaggggagagcaaaagtggcaaattcacactacaacagctgtttcaacaaacaagggtcgctgatgtaggaacgatgaacatagcaacagagttcacaagagattttgcaaattcaagattagaagaaactatgatactcacacataggttctccaagaacattttcagaaccaaggagctttttgcgtgcaggacggttcagatgttaggttcaggaattgtcctaggtctgatttttcataatctcaaagacgatttaaaaggtgcgcgagaaagagtcggcctctttgcattcatattgacctttctgctaacttcgacaatagaggcactccctatatttctgcaagaaagagagattctgatgaaggagacctctagtggaagctacagagtgtcttcatatgccgtcgctaatggactagtttacttgccatttctgctcatcctagctattctattctcaaccccagtgtactggctggtgggactgaaccccagtttcatggcgtttctacacttttcgctcctcatttggttgatcctctacacagcaaactcggtggttgtgtgctttagtgcactggttcctaatttcatagttggaaactcagtgatttccggtgtgatgggttccttctttctgttctccggctacttcatatcgaaccatgagatccctggttactggattttcatgcactacatctccttgttcaagtacccgttcgaaggatttctgattaacgagttctcaaaatcaaacaagtgtttggagtatggattcggaaaatgtttggtgactgaggaggatctactcaaagaagaaaggtacggagaggaaagtagatggagaaatgttgtgatcatgctatgttttgtcttgctctacaggttcatttcctatgtgattctgaggtgtagatgttcccaacgaagtttcaaaaccactctcgcttaataaatgtggtagcaataatgtcctttctgaaaaacattgggttacaggtttgttcatgtgtttaattatttacttcgtacagcaaccgaagatgtgaaagaaaatgttgtttctgcaaaatgaaatttccattgatttt

SEQ ID NO: 2594 - protein, 667 aa, Arabidopsis thaliana
RHYSIGKERKRENKASSSMEKQGCEIEALDIDYNIFVRKINVNPFGIFRRKPRPEADQPVKTEEESLKLEDETGNKVKHVLKGVTCRAKPWEILAIVGPSGAGKSSLLEILAARLIPQTGSVYVNKRPVDRANFKKISGYVTQKDTLFPLLTVEETLLFSAKLRLKLPADELRSRVKSLVHELGLEAVATARVGDDSVRGISGGERRRVSIGVEVIHDPKVLILDEPTSGLDSTSALLIIDMLKHMAETRGRTIILTIHQPGFRIVKQFNSVLLLANGSTLKQGSVDQLGVYLRSNGLHPPLHENIVEFAIESIESITKQQRLQESRRAAHVLTPQTTLQEKRSEDSQGESKSGKFTLQQLFQQTRVADVGTMNIATEFTRDFANSRLEETMILTHRFSKNIFRTKELFACRTVQMLGSGIVLGLIFHNLKDDLKGARERVGLFAFILTFLLTSTIEALPIFLQEREILMKETSSGSYRVSSYAVANGLVYLPFLLILAILFSTPVYWLVGLNPSFMAFLHFSLLIWLILYTANSVVVCFSALVPNFIVGNSVISGVMGSFFLFSGYFISNHEIPGYWIFMHYISLFKYPFEGFLINEFSKSNKCLEYGFGKCLVTEEDLLKEERYGEESRWRNVVIMLCFVLLYRFISYVILRCRCSQRSFKTTLA

SEQ ID NO: 2595 - protein, 649 aa, Arabidopsis thaliana
MEKQGCEIEALDIDYNIFVRKINVNPFGIFRRKPRPEADQPVKTEEESLKLEDETGNKVKHVLKGVTCRAKPWEILAIVGPSGAGKSSLLEILAARLIPQTGSVYVNKRPVDRANFKKISGYVTQKDTLFPLLTVEETLLFSAKLRLKLPADELRSRVKSLVHELGLEAVATARVGDDSVRGISGGERRRVSIGVEVIHDPKVLILDEPTSGLDSTSALLIIDMLKHMAETRGRTIILTIHQPGFRIVKQFNSVLLLANGSTLKQGSVDQLGVYLRSNGLHPPLHENIVEFAIESIESITKQQRLQESRRAAHVLTPQTTLQEKRSEDSQGESKSGKFTLQQLFQQTRVADVGTMNIATEFTRDFANSRLEETMILTHRFSKNIFRTKELFACRTVQMLGSGIVLGLIFHNLKDDLKGARERVGLFAFILTFLLTSTIEALPIFLQEREILMKETSSGSYRVSSYAVANGLVYLPFLLILAILFSTPVYWLVGLNPSFMAFLHFSLLIWLILYTANSVVVCFSALVPNFIVGNSVISGVMGSFFLFSGYFISNHEIPGYWIFMHYISLFKYPFEGFLINEFSKSNKCLEYGFGKCLVTEEDLLKEERYGEESRWRNVVIMLCFVLLYRFISYVILRCRCSQRSFKTTLA

SEQ ID NO: 2596 - protein, 426 aa, Arabidopsis thaliana
MLKHMAETRGRTIILTIHQPGFRIVKQFNSVLLLANGSTLKQGSVDQLGVYLRSNGLHPPLHENIVEFAIESIESITKQQRLQESRRAAHVLTPQTTLQEKRSEDSQGESKSGKFTLQQLFQQTRVADVGTMNIATEFTRDFANSRLEETMILTHRFSKNIFRTKELFACRTVQMLGSGIVLGLIFHNLKDDLKGARERVGLFAFILTFLLTSTIEALPIFLQEREILMKETSSGSYRVSSYAVANGLVYLPFLLILAILFSTPVYWLVGLNPSFMAFLHFSLLIWLILYTANSVVVCFSALVPNFIVGNSVISGVMGSFFLFSGYFISNHEIPGYWIFMHYISLFKYPFEGFLINEFSKSNKCLEYGFGKCLVTEEDLLKEERYGEESRWRNVVIMLCFVLLYRFISYVILRCRCSQRSFKTTLA

SEQ ID NO: 2597 - DNA, 1746 bp, Arabidopsis thaliana
acggttccttctcttctctctctctctttctccgtctgtcgctgtctctctcgtcctctcctctgtttcgtagcttctgcagcagatctctctttgtccttctctctccctcagatcactatggcacagcaggaagctagtccttcccctggtgctgaggttgttggtcgtgcctttgtggagcaatactatcatattcttcaccaatctcccggtttagttcatcggttttatcaagattcgagctttttaacccgacctgatgttaccggtgctgtgactactgtcacaactatgcaagcgatcaacgacaagattctgtcgttgaaatatgaagactacacggctgagatagaaactgctgatgctcaggagtctcatgagagaggtgttattgtgctggttacaggacgcttaaccgggaacgataatgttaggaagaagtttagtcaatcttttttcttggctccacaagacaaaggatactttgtcttaaacgacgtgtttcgattccttgaggagaaagaggtgactgcacaagcccgctctgtccccatcaatggaaccactagggatgttcaggctcctattgaaccagaacgtgttgttgttagtcacgagcccgaggtagaacccgagccagttgcttctatcgaggaagaagatcttgacaatgtggcggaagtgtatgatccttctgataaagatgaaggagttgttgttgacgttgagcctattgaacctcccactcaaataagtcataatgaaatcttatcagtgcctcaaggagatgctcctaagcattcttatgcttcaatcctcaagcagatgaaaagcagtccagcaccaacaacacacgttgctagaaacaagccaagaccagctccagtcaaccagaagctgaccgcgcctcctgctgagcctgcagcaagacccgaggcttcagctcatgagaatgttccgaatagtagccatgttgatgtggaagatgatggtcattcgatttatgttcgaaatttgccgtttgactccacaccaacacaacttgaagaggtgttcaagaactttggtgcaatcaagcatgaggggattcaagtcagaagcaacaagcagcaaggtttctgttttggttttgtggaatttgaaacatctagcggaaagcaaagtgccctcgaggcctcaccagttacaattggagatcgtcaagctgttgtagaggagaagaaaacaaatagtcgaggaggaggcaacaatggaggtagcaggggaaggtacttttccggaagaggaagtttccgaaatgaaagcttcaaaggaggacgcggtggtgggggaagaggaggctatggaagaggaggaggtgagttttctggtagaccaaagagctcaaacccacgaaatggaggagaaggttaccaaagggttcctcaaaacggaggaggtggaagaggaggccgcggagaaggaggtcgtggtggagctcgaggtggtggttcatcttgactttgcttttaacgctcctctacaagagagtagttttaatttttgttttgcgtctttctttttgcctactacttgagttgatgtggtattggcttttttgtcggtctagtttttcaatattcttgctttttttcctctcttttttgtttttcatctttcaatctttctttggggtaatgtactcttcataaacaaacattcaatttcataaggaatccattatagagttgtgttctttacgcc

SEQ ID NO: 2598 - protein, 500 aa, Arabidopsis thaliana
TVPSLLSLSFSVCRCLSRPLLCFVASAADLSLSFSLPQITMAQQEASPSPGAEVVGRAFVEQYYHILHQSPGLVHRFYQDSSFLTRPDVTGAVTTVTTMQAINDKILSLKYEDYTAEIETADAQESHERGVIVLVTGRLTGNDNVRKKFSQSFFLAPQDKGYFVLNDVFRFLEEKEVTAQARSVPINGTTRDVQAPIEPERVVVSHEPEVEPEPVASIEEEDLDNVAEVYDPSDKDEGVVVDVEPIEPPTQISHNEILSVPQGDAPKHSYASILKQMKSSPAPTTHVARNKPRPAPVNQKLTAPPAEPAARPEASAHENVPNSSHVDVEDDGHSIYVRNLPFDSTPTQLEEVFKNFGAIKHEGIQVRSNKQQGFCFGFVEFETSSGKQSALEASPVTIGDRQAVVEEKKTNSRGGGNNGGSRGRYFSGRGSFRNESFKGGRGGGGRGGYGRGGGEFSGRPKSSNPRNGGEGYQRVPQNGGGGRGGRGEGGRGGARGGGSS

SEQ ID NO: 2599 - protein, 460 aa, Arabidopsis thaliana
MAQQEASPSPGAEVVGRAFVEQYYHILHQSPGLVHRFYQDSSFLTRPDVTGAVTTVTTMQAINDKILSLKYEDYTAEIETADAQESHERGVIVLVTGRLTGNDNVRKKFSQSFFLAPQDKGYFVLNDVFRFLEEKEVTAQARSVPINGTTRDVQAPIEPERVVVSHEPEVEPEPVASIEEEDLDNVAEVYDPSDKDEGVVVDVEPIEPPTQISHNEILSVPQGDAPKHSYASILKQMKSSPAPTTHVARNKPRPAPVNQKLTAPPAEPAARPEASAHENVPNSSHVDVEDDGHSIYVRNLPFDSTPTQLEEVFKNFGAIKHEGIQVRSNKQQGFCFGFVEFETSSGKQSALEASPVTIGDRQAVVEEKKTNSRGGGNNGGSRGRYFSGRGSFRNESFKGGRGGGGRGGYGRGGGEFSGRPKSSNPRNGGEGYQRVPQNGGGGRGGRGEGGRGGARGGGSS

SEQ ID NO: 2600 - protein, 402 aa, Arabidopsis thaliana
MQAINDKILSLKYEDYTAEIETADAQESHERGVIVLVTGRLTGNDNVRKKFSQSFFLAPQDKGYFVLNDVFRFLEEKEVTAQARSVPINGTTRDVQAPIEPERVVVSHEPEVEPEPVASIEEEDLDNVAEVYDPSDKDEGVVVDVEPIEPPTQISHNEILSVPQGDAPKHSYASILKQMKSSPAPTTHVARNKPRPAPVNQKLTAPPAEPAARPEASAHENVPNSSHVDVEDDGHSIYVRNLPFDSTPTQLEEVFKNFGAIKHEGIQVRSNKQQGFCFGFVEFETSSGKQSALEASPVTIGDRQAVVEEKKTNSRGGGNNGGSRGRYFSGRGSFRNESFKGGRGGGGRGGYGRGGGEFSGRPKSSNPRNGGEGYQRVPQNGGGGRGGRGEGGRGGARGGGSS

SEQ ID NO: 2601 - DNA, 1424 bp, Arabidopsis thaliana
attcgtgtggatacgtgtgggaattttctgaaagcgtcagactcgctgagacctaactatggagaacacacggccaaacgaagaagaaggaagaataagtgaaccaaattggagcgaacgagtggaggatctcgtggtagccggcgacgtcacggcggcgatctcctttctcgagtctttggagaccaatcttcaatcgcggttaggttcttcctcctccggcgagagaacggagtttgggcttcaattatccgccgctcttacgcagttggcggatctctactcttctgagggactttcccttaaatccgatgagcttcgaactcgctcttccctcattaagcaacgagcgttggattgtgatcttgcctcttcaagaagttccggcaatgtagagaatcaatctgttgcttccagtggactcaagtctgacccaaatgtctcaagctttgatgctgatgggaaaacggaggattccaaagtatctagcagtaattcagctgctcatgattcttcagatgatgattgggaagctcttgcagatgttgaaccgagtaagttactccccgtagaagagttgcctgaaatatcaaagctttcggttgaagaacctaaagttcaaggacctaagagacgtggaaggggaacgtttacttataagagtgatgcaatgtacagtgatcgagatttctctgagtcgaggtttgatgatgattcagaagataacgatttatctcgtgagtcagagaagactgatgaatcactgaaatccaagtatggcacacgccatgtcctcgtacttgctggtttttctccaagtttgagaactactgaattggagaagctatttaaagacttcaaagatagtggatttatcattcgttgggtcaatgatacaacagcacttgcagtcttcaaaaccccttcagctgctctagaggcttgcaagcatgttcaatgttcattcacaatacgtgtactcgatgataacgattctcttttgggctcaatttctggaaaagatttggaaccgccgtctcaaagaccaaagacatcagcgaaaacagctcaacggttgattgctcacagcatgggattgaagctaccggcttctggattcgggtctaaagagcgagaccaagaagctgcccggaaaaaccggattgtctcgagacagaaacaacgggaagatgcttggggagatgactgacattaaccatacagtttggtttgctcaattttccagcttaccggagctatatttcgtgtgtctacttattggtatatacaacctcaatccacttgagtgatcccttataagcattgctacttgctagtggttgtttgtagtgtttttgtgtattaaatttaaacagtttaaaaatgctttaaccggaaatgaaatctggacccgttattataag

SEQ ID NO: 2602 - protein, 383 aa, Arabidopsis thaliana
MENTRPNEEEGRISEPNWSERVEDLVVAGDVTAAISFLESLETNLQSRLGSSSSGERTEFGLQLSAALTQLADLYSSEGLSLKSDELRTRSSLIKQRALDCDLASSRSSGNVENQSVASSGLKSDPNVSSFDADGKTEDSKVSSSNSAAHDSSDDDWEALADVEPSKLLPVEELPEISKLSVEEPKVQGPKRRGRGTFTYKSDAMYSDRDFSESRFDDDSEDNDLSRESEKTDESLKSKYGTRHVLVLAGFSPSLRTTELEKLFKDFKDSGFIIRWVNDTTALAVFKTPSAALEACKHVQCSFTIRVLDDNDSLLGSISGKDLEPPSQRPKTSAKTAQRLIAHSMGLKLPASGFGSKERDQEAARKNRIVSRQKQREDAWGDD

SEQ ID NO: 2603 - DNA, 1932 bp, Arabidopsis thaliana
gaaatctctctctctctctctcatatcaacatgtagaaggggaagaagatgttcttctcatcacgaaaagtcagcgtctctctcttcatcatcaacctttcttcttcttcttctcaatcttttctcaagaaaatcacaaatttcccaagaaaacactcacatatatgatgctatatatagaatgatagtctcatctaattctctctctccctcggattcgttagatgtgatcattttttcttgatttttgatcagattcttgcgtatagctgtatatatacaccaagatacactcatcatcgtcatatatagattatgtgcagcgtctctgagcttcttgacatggaaaacttccaaggagacttaaccgacgtcgtacgaggaatcggaggccacgtgttatcaccggagactcctccctcgaacatctggcctcttcctctgtcacatccaacaccatcaccgtcagatcttaacataaaccccttcggagatccctttgtgagcatggacgatccactcctccaagaactaaactccatcacaaactccggctatttctccaccgtaggagataacaacaacaacattcacaacaacaatggtttcttggttccaaaggtatttgaggaggatcatataaagagtcaatgtagtatcttcccaagaatccggatctcgcatagtaacatcatccacgattcttctccgtgtaattctccggccatgtcggctcacgttgtcgcagccgcagcagccgcctcgccgaggggcatcatcaacgtagacacaaacagtcctagaaactgtctattggttgatggtaccacgttctcctcgcagattcagatatcttcccctcggaatctaggccttaaaagaaggaagagtcaggcaaagaaggtggtgtgtattccggccccggcctgcaatgaacagccgatcaagcggagaagtggttccatcagatctatgggcttggcgtaaatacggtcaaaaacctatcaaaggctctccttttccaaggggttattatagatgcagcagctcaaaaggttgttcagcaagaaagcaagtcgaaagaagccgaaccgatccaaacatgttggtgattacatatacctccgaacataaccatccttggcccatccaacgcaaagctctcgccggctccacacgctcctccacctcctcctcatctaaccctaatccttccaaaccctcaaccgcaaacgtaaactcctcatccattggctcccaaaacaccatctacttgccttcctccaccactcctcctcctaccctctcatcctccgccatcaaagatgaacgaggggacgatatggagttggaaaacgtagatgatgatgatgataaccagattgctccatacagaccggagcttcatgatcatcagcaccaaccagatgatttctttgcagatcttgaagagctagaaggagattctctaagcatgttgctttctcatggctgtggcggcgacgggaaggataaaacgaccgcgtccgatgggatcagcaatttcttcgggtggtcgggagataataattataataattacgacgaccaagactcaaggtcgttatagtatagtgttaattacaggtaaacaaattatattaaattaagttgagcttgtgaaaatgaagatcatatggtctggtcaggttgggggtaatgactaatgagctggtacatgacagaccgtaaacagtatttatcgtcatttgttatacatttgtttttttttcggaagatccgtctgtagttaaaaaaaaaaacggcattttttctatgcgttgttataatttttattttgtgaagactattagattaatgttaaaagacaaaatatacatattacgaaagtagtgtatcactctattcaatttcaaatggagagtattcttt

SEQ ID NO: 2604 - protein, 225 aa, Arabidopsis thaliana
MNSRSSGEVVPSDLWAWRKYGQKPIKGSPFPRGYYRCSSSKGCSARKQVERSRTDPNMLVITYTSEHNHPWPIQRKALAGSTRSSTSSSSNPNPSKPSTANVNSSSIGSQNTIYLPSSTTPPPTLSSSAIKDERGDDMELENVDDDDDNQIAPYRPELHDHQHQPDDFFADLEELEGDSLSMLLSHGCGGDGKDKTTASDGISNFFGWSGDNNYNNYDDQDSRSL

SEQ ID NO: 2605 - protein, 223 aa, Arabidopsis thaliana
MCSVSELLDMENFQGDLTDVVRGIGGHVLSPETPPSNIWPLPLSHPTPSPSDLNINPFGDPFVSMDDPLLQELNSITNSGYFSTVGDNNNNIHNNNGFLVPKVFEEDHIKSQCSIFPRIRISHSNIIHDSSPCNSPAMSAHVVAAAAAASPRGIINVDTNSPRNCLLVDGTTFSSQIQISSPRNLGLKRRKSQAKKVVCIPAPACNEQPIKRRSGSIRSMGLA

SEQ ID NO: 2606 - protein, 214 aa, Arabidopsis thaliana
MENFQGDLTDVVRGIGGHVLSPETPPSNIWPLPLSHPTPSPSDLNINPFGDPFVSMDDPLLQELNSITNSGYFSTVGDNNNNIHNNNGFLVPKVFEEDHIKSQCSIFPRIRISHSNIIHDSSPCNSPAMSAHVVAAAAAASPRGIINVDTNSPRNCLLVDGTTFSSQIQISSPRNLGLKRRKSQAKKVVCIPAPACNEQPIKRRSGSIRSMGLA

SEQ ID NO: 2607 - DNA, 1390 bp, Arabidopsis thaliana
ctactactctttttgggtatatctgtttacttgaatctcttaccatgaaagttcttcaattatttccttacttaaatctaagttgctttatgttgcgtttgattaatgggatcgtacttttctaaagttctagccttttatacgaaaaagcaacttttcgtgattttcttcaattgaatagctaaaattaggaaattttccttttcagtgttgtttttctttttctattttctttcttttctcttcttcttcttcttcaagcgatgaaccagaaaagttttgattttgattttggtgaaccaggaaagtggtactcgatctgtggtttgttgattctgaattagtatattcctggaaaattctgttcagtttcataatttaaacaagatgcagctcaaagtccctgaacatcaggttgcaggacacattgctaaagacgggaagcctggtcctctcgtagatgacaagggtcggttcttcaagccacttcagggcgattctcgtggtgaaatcgaggtaaagttctacgaatctttctcctcaaacacagaggttccagaacacatccatagatatttcccggtgtatcacggcactcaagcagttgaaggttctgatggagcagccatgatggtgttggaaaatcttcttgcagaatacacaaaaccatcagtaatggatgttaagatgggttcgagaacatggtatcctgatgcatctgaagaatacatccaaaaatgtttgaagaaagacacgggtaccacaaccgtgtcatcgggtttcaggatctctggtttcgaagtgtatgatcacaaagaatcgagtttctggaagcccgagaggaagcttcttcgcgggctcgatgtagatggagcgagattgactctgaggaagtttgtatcatctaactcactttcggacactggctcgaaacctgactctgcttttgcctcgagtgtttacggcggttcccacgggatcttaacgcagttgctggaactcaagacctggttcgagaaccaaacgctctaccatttcaactcttgttcgattttaatggtctatgagaatgaatccatcttaaagggaaatgatgatgatgctagaccacaagtcaagctggtggattttgctcatgttcttgatggtaatggtgtcattgaccataacttcttgggtggtctttgctctttcataaacttcattcgtgagattcttcagagcccagatgagtctgcagattcttagatttaagttaatttgtttgttatggctttggctgattccaatttttggatataaacttatgtttccttcacatatgtacttgattacctaaagagcagaatacattcgtactcttttctcaaagagtattccatttctaggc

SEQ ID NO: 2608 - protein, 286 aa, Arabidopsis thaliana
MQLKVPEHQVAGHIAKDGKPGPLVDDKGRFFKPLQGDSRGEIEVKFYESFSSNTEVPEHIHRYFPVYHGTQAVEGSDGAAMMVLENLLAEYTKPSVMDVKMGSRTWYPDASEEYIQKCLKKDTGTTTVSSGFRISGFEVYDHKESSFWKPERKLLRGLDVDGARLTLRKFVSSNSLSDTGSKPDSAFASSVYGGSHGILTQLLELKTWFENQTLYHFNSCSILMVYENESILKGNDDDARPQVKLVDFAHVLDGNGVIDHNFLGGLCSFINFIREILQSPDESADS

SEQ ID NO: 2609 - protein, 206 aa, Arabidopsis thaliana
MMVLENLLAEYTKPSVMDVKMGSRTWYPDASEEYIQKCLKKDTGTTTVSSGFRISGFEVYDHKESSFWKPERKLLRGLDVDGARLTLRKFVSSNSLSDTGSKPDSAFASSVYGGSHGILTQLLELKTWFENQTLYHFNSCSILMVYENESILKGNDDDARPQVKLVDFAHVLDGNGVIDHNFLGGLCSFINFIREILQSPDESADS

SEQ ID NO: 2610 - protein, 205 aa, Arabidopsis thaliana
MVLENLLAEYTKPSVMDVKMGSRTWYPDASEEYIQKCLKKDTGTTTVSSGFRISGFEVYDHKESSFWKPERKLLRGLDVDGARLTLRKFVSSNSLSDTGSKPDSAFASSVYGGSHGILTQLLELKTWFENQTLYHFNSCSILMVYENESILKGNDDDARPQVKLVDFAHVLDGNGVIDHNFLGGLCSFINFIREILQSPDESADS

SEQ ID NO: 2611 - DNA, 1791 bp, Arabidopsis thaliana
agaatccagattcctttcttatcatcatctctctctctcacactgtttatctgattcgtcttctctgataatcaagagtagtagtgcggttctctggaaaatattcgatttttaaaagactctgatgatgacattaaactcactatctccagctgaatccaaagctatttctttcttggatacctccaggttcaatccaatccctaaactctcaggtgggtttagtttgaggaggaggaatcaagggagaggttttggaaaaggtgttaagtgttcagtgaaagtgcagcagcaacaacaacctcctccagcatggcctgggagagctgtccctgaggcgcctcgtcaatcttgggatggaccaaaacccatctctatcgttggatctactggttctattggcactcagacattggatattgtggctgagaatcctgacaaattcagagttgtggctctagctgctggttcgaatgttactctacttgctgatcaggtaaggagatttaagcctgcattggttgctgttagaaacgagtcactgattaatgagcttaaagaggctttagctgatttggactataaactcgagattattccaggagagcaaggagtgattgaggttgcccgacatcctgaagctgtaaccgttgttaccggaatagtaggttgtgcgggactaaagcctacggttgctgcaattgaagcaggaaaggacattgctcttgcaaacaaagagacattaatcgcaggtggtcctttcgtgcttccgcttgccaacaaacataatgtaaagattcttccggcagattcagaacattctgccatatttcagtgtattcaaggtttgcctgaaggcgctctgcgcaagataatcttgactgcatctggtggagcttttagggattggcctgtcgaaaagctaaaggaagttaaagtagcggatgcgttgaagcatccaaactggaacatgggaaagaaaatcactgtggactctgctacgcttttcaacaagggtcttgaggtcattgaagcgcattatttgtttggagctgagtatgacgatatagagattgtcattcatccgcaaagtatcatacattccatgattgaaacacaggattcatctgtgcttgctcaattgggttggcctgatatgcgtttaccgattctctacaccatgtcatggcccgatagagttccttgttctgaagtaacttggccaagacttgacctttgcaaactcggttcattgactttcaagaaaccagacaatgtgaaatacccatccatggatcttgcttatgctgctggacgagctggaggcacaatgactggagttctcagcgccgccaatgagaaagctgttgaaatgttcattgatgaaaagataagctatttggatatcttcaaggttgtggaattaacatgcgataaacatcgaaacgagttggtaacatcaccgtctcttgaagagattgttcactatgacttgtgggcacgtgaatatgccgcgaatgtgcagctttcttctggtgctaggccagttcatgcatgaagaattggttgttggaagaacataaggaagcttctgaggaaatgttgaaagaagattagtgtagagaatggggtactacttaatagcgtttttggcaaggattatggattgtgtagctaatttatctgtgatccgaacaagccaaactgataatttgaaaccatttttaccaataaaaccgagcttaattgtttcacattatatgattaattacattcatctaagggttcttg

SEQ ID NO: 2612 - protein, 477 aa, Arabidopsis thaliana
MMTLNSLSPAESKAISFLDTSRFNPIPKLSGGFSLRRRNQGRGFGKGVKCSVKVQQQQQPPPAWPGRAVPEAPRQSWDGPKPISIVGSTGSIGTQTLDIVAENPDKFRVVALAAGSNVTLLADQVRRFKPALVAVRNESLINELKEALADLDYKLEIIPGEQGVIEVARHPEAVTVVTGIVGCAGLKPTVAAIEAGKDIALANKETLIAGGPFVLPLANKHNVKILPADSEHSAIFQCIQGLPEGALRKIILTASGGAFRDWPVEKLKEVKVADALKHPNWNMGKKITVDSATLFNKGLEVIEAHYLFGAEYDDIEIVIHPQSIIHSMIETQDSSVLAQLGWPDMRLPILYTMSWPDRVPCSEVTWPRLDLCKLGSLTFKKPDNVKYPSMDLAYAAGRAGGTMTGVLSAANEKAVEMFIDEKISYLDIFKVVELTCDKHRNELVTSPSLEEIVHYDLWAREYAANVQLSSGARPVHA

SEQ ID NO: 2613 - protein, 476 aa, Arabidopsis thaliana
MTLNSLSPAESKAISFLDTSRFNPIPKLSGGFSLRRRNQGRGFGKGVKCSVKVQQQQQPPPAWPGRAVPEAPRQSWDGPKPISIVGSTGSIGTQTLDIVAENPDKFRVVALAAGSNVTLLADQVRRFKPALVAVRNESLINELKEALADLDYKLEIIPGEQGVIEVARHPEAVTVVTGIVGCAGLKPTVAAIEAGKDIALANKETLIAGGPFVLPLANKHNVKILPADSEHSAIFQCIQGLPEGALRKIILTASGGAFRDWPVEKLKEVKVADALKHPNWNMGKKITVDSATLFNKGLEVIEAHYLFGAEYDDIEIVIHPQSIIHSMIETQDSSVLAQLGWPDMRLPILYTMSWPDRVPCSEVTWPRLDLCKLGSLTFKKPDNVKYPSMDLAYAAGRAGGTMTGVLSAANEKAVEMFIDEKISYLDIFKVVELTCDKHRNELVTSPSLEEIVHYDLWAREYAANVQLSSGARPVHA

SEQ ID NO: 2614 - DNA, 1103 bp, Arabidopsis thaliana
aaagctctgaaaagatggccggagctgtttctgccgtcgatcaaccgttgaaaatcatcaccggagctgatgactttggagcgagcctcaaggacgcgatggtaacacacctccgctctctcggcatagacgtggaggataccggagtgtcctcttactactctgctggatctgaagtcggtcgccgcgtctccgcttcatcgtcttccgaagttcgcggcttagtctgctgcggcaccggcgtcggagttgcgatgttcgccaacaagttcccgggcgtctacgcagccacttgtctctccgtcgaagacgccgtcaacgctcgatcaataagcaattgcaatgtcctcgcattctccggcatcaaaacatccccggaaaccgccttggaaatcttcgacgcttggatcaaaactcctttcaaatctccttgtcctgcgtccggatccgaaccatggagctcagttatctcttccttcctcgacaattctctctccgagatgtctcagattggaaagtcaaccgccggcgattcaacaaccaagaagatcgatgaaacaaccgcgtcttgcgtaatttgctgcttggcgaagaacagagagttcactccagtggacatcatgccgggaggctcgatgaagatcgttagagagacgccgacgtcggcgattgtaagattcaaagcgggaagtgtggaaccggcgcatcaccacacattcggccatgaccttgtagtcataaagggaaagaaaagtgtgtggaatctgagcaagaaggagagagctgatctcgttgacggcgattacctattcactcccgccggtgatgttcaccgagtcaaatatcacgaagacactgagttcttcatcacttgggatggccattgggacatattccttgacgaagacctcgaaactgcaaagaaagccatcgaagaagaagcttgaaggtgtaaactttgtgtagtactctcttcttttgaatgttgtaagttctgagagtaaactttcttaaattgatgtactttgtaagaatctttgatttcaaaagatggtgtaatattacaaatactttctcttatgaacactatataaagggtttct

SEQ ID NO: 2615 - protein, 314 aa, Arabidopsis thaliana
SSEKMAGAVSAVDQPLKIITGADDFGASLKDAMVTHLRSLGIDVEDTGVSSYYSAGSEVGRRVSASSSSEVRGLVCCGTGVGVAMFANKFPGVYAATCLSVEDAVNARSISNCNVLAFSGIKTSPETALEIFDAWIKTPFKSPCPASGSEPWSSVISSFLDNSLSEMSQIGKSTAGDSTTKKIDETTASCVICCLAKNREFTPVDIMPGGSMKIVRETPTSAIVRFKAGSVEPAHHHTFGHDLVVIKGKKSVWNLSKKERADLVDGDYLFTPAGDVHRVKYHEDTEFFITWDGHWDIFLDEDLETAKKAIEEEA

SEQ ID NO: 2616 - protein, 310 aa, Arabidopsis thaliana
MAGAVSAVDQPLKIITGADDFGASLKDAMVTHLRSLGIDVEDTGVSSYYSAGSEVGRRVSASSSSEVRGLVCCGTGVGVAMFANKFPGVYAATCLSVEDAVNARSISNCNVLAFSGIKTSPETALEIFDAWIKTPFKSPCPASGSEPWSSVISSFLDNSLSEMSQIGKSTAGDSTTKKIDETTASCVICCLAKNREFTPVDIMPGGSMKIVRETPTSAIVRFKAGSVEPAHHHTFGHDLVVIKGKKSVWNLSKKERADLVDGDYLFTPAGDVHRVKYHEDTEFFITWDGHWDIFLDEDLETAKKAIEEEA

SEQ ID NO: 2617 - protein, 282 aa, Arabidopsis thaliana
MVTHLRSLGIDVEDTGVSSYYSAGSEVGRRVSASSSSEVRGLVCCGTGVGVAMFANKFPGVYAATCLSVEDAVNARSISNCNVLAFSGIKTSPETALEIFDAWIKTPFKSPCPASGSEPWSSVISSFLDNSLSEMSQIGKSTAGDSTTKKIDETTASCVICCLAKNREFTPVDIMPGGSMKIVRETPTSAIVRFKAGSVEPAHHHTFGHDLVVIKGKKSVWNLSKKERADLVDGDYLFTPAGDVHRVKYHEDTEFFITWDGHWDIFLDEDLETAKKAIEEEA

SEQ ID NO: 2618 - DNA, 1780 bp, Arabidopsis thaliana
aagtcgcaacgctccaacgacttcaattcaatttactttcgattttgtcctcttccaaaaacccttccgcttaaaccctaattcacttcgccggccatgtcgacactcgaggatggatttccggcggataagctcttcgctcaaggatactcttacacctacgacgacgtcatctttcttcctcacttcatcgatttctccacagacgctgtttctctatccacgcgccttagccggcgcgtgcctctctccataccttgcgtttcgtctccgatggatactgtttcggaatctcacatggctgctgctatggcttctcttggtgggattggaatcgtccactataactgtggcatcgccgctcaagcatcgattattcgccaagctaagtcgcttaaacatccgattgcttccgacgccggtgtgaagttcccggagtatgagattacttctttagatgcttttggtccttcttccttcgtttttgtcgagcaaacaggaacaatgacgactcctaaattgttaggctatgtaacgaaatcgcagtggaagagaatgaattacgaacaaagggagatgaagatatacgattacatgaagagctgtgatagcagtgactattgtgtaccatgggaaattgattttgaaaagttggagtttgttttagaagataagcaaaagggctttgtggttcttgagagggatggtgagactgtgaacgtggtgacgaaagatgatatacagagggttaaaggatatcccaagtctggaccagggactgtgggcccagacggtgagtggatggttggtgcagcgataggtacgagggagtctgataaggagaggcttgagcatttggttaatgttggggtcaatgctgtagtgttggatagttcgcaagggaactctatttaccagcttgagatgatcaagtatgtgaaaaagacttaccctgaattggatgtgattggtggcaatgttgtgacaatgtaccaggcacagaatttgatccaagcaggagttgatgggttgagagttggtatgggatctggttcgatatgtaccacacaagaggtttgtgcagttggtcgtggacaggctactgctgtgtacaaggtttgttcgatcgctgctcagagcgggattccagttatagcggatggtggtatctcaaattcagggcacattgtaaaggctctcgtccttggagcatcaactgttatgatgggtagctttttagctggaagtactgaggctcccgggggttacgagtatacgaacggtaagaggatcaagaagtaccgtggaatgggatcgctagaagcaatgactaaaggaagtgaccaaagatacttaggagatcaaacaaaactcaagattgctcaaggagtggttggagcagtcgcggataaaggctcagtgttgaagctgataccttacacaatgcacgccgtgaaacaaggtttccaagaccttggtgcttcttccttgcaatctgctcatggtctgttgagatcaaacatccttaggcttgaggctcgaactggtgctgcacaggtcgaaggaggagttcacgggctggtttcttatgaaaagaaatcgttttaagctttggcctaaaattgagtgctaagagtgtttcttatatcatgttccatgttatttttatagatattacttttcaatctagtaactttagtctttttatttattgacatgatttacattgtctcctaaaatcaattttcctctaatattgtcttatatctactaagttact

SEQ ID NO: 2619 - protein, 503 aa, Arabidopsis thaliana
MSTLEDGFPADKLFAQGYSYTYDDVIFLPHFIDFSTDAVSLSTRLSRRVPLSIPCVSSPMDTVSESHMAAAMASLGGIGIVHYNCGIAAQASIIRQAKSLKHPIASDAGVKFPEYEITSLDAFGPSSFVFVEQTGTMTTPKLLGYVTKSQWKRMNYEQREMKIYDYMKSCDSSDYCVPWEIDFEKLEFVLEDKQKGFVVLERDGETVNVVTKDDIQRVKGYPKSGPGTVGPDGEWMVGAAIGTRESDKERLEHLVNVGVNAVVLDSSQGNSIYQLEMIKYVKKTYPELDVIGGNVVTMYQAQNLIQAGVDGLRVGMGSGSICTTQEVCAVGRGQATAVYKVCSIAAQSGIPVIADGGISNSGHIVKALVLGASTVMMGSFLAGSTEAPGGYEYTNGKRIKKYRGMGSLEAMTKGSDQRYLGDQTKLKIAQGVVGAVADKGSVLKLIPYTMHAVKQGFQDLGASSLQSAHGLLRSNILRLEARTGAAQVEGGVHGLVSYEKKSF

SEQ ID NO: 2620 - protein, 444 aa, Arabidopsis thaliana
MDTVSESHMAAAMASLGGIGIVHYNCGIAAQASIIRQAKSLKHPIASDAGVKFPEYEITSLDAFGPSSFVFVEQTGTMTTPKLLGYVTKSQWKRMNYEQREMKIYDYMKSCDSSDYCVPWEIDFEKLEFVLEDKQKGFVVLERDGETVNVVTKDDIQRVKGYPKSGPGTVGPDGEWMVGAAIGTRESDKERLEHLVNVGVNAVVLDSSQGNSIYQLEMIKYVKKTYPELDVIGGNVVTMYQAQNLIQAGVDGLRVGMGSGSICTTQEVCAVGRGQATAVYKVCSIAAQSGIPVIADGGISNSGHIVKALVLGASTVMMGSFLAGSTEAPGGYEYTNGKRIKKYRGMGSLEAMTKGSDQRYLGDQTKLKIAQGVVGAVADKGSVLKLIPYTMHAVKQGFQDLGASSLQSAHGLLRSNILRLEARTGAAQVEGGVHGLVSYEKKSF

SEQ ID NO: 2621 - protein, 436 aa, Arabidopsis thaliana
MAAAMASLGGIGIVHYNCGIAAQASIIRQAKSLKHPIASDAGVKFPEYEITSLDAFGPSSFVFVEQTGTMTTPKLLGYVTKSQWKRMNYEQREMKIYDYMKSCDSSDYCVPWEIDFEKLEFVLEDKQKGFVVLERDGETVNVVTKDDIQRVKGYPKSGPGTVGPDGEWMVGAAIGTRESDKERLEHLVNVGVNAVVLDSSQGNSIYQLEMIKYVKKTYPELDVIGGNVVTMYQAQNLIQAGVDGLRVGMGSGSICTTQEVCAVGRGQATAVYKVCSIAAQSGIPVIADGGISNSGHIVKALVLGASTVMMGSFLAGSTEAPGGYEYTNGKRIKKYRGMGSLEAMTKGSDQRYLGDQTKLKIAQGVVGAVADKGSVLKLIPYTMHAVKQGFQDLGASSLQSAHGLLRSNILRLEARTGAAQVEGGVHGLVSYEKKSF

SEQ ID NO: 2622 - DNA, 2492 bp, Arabidopsis thaliana
acttattctcactaacaaactctgaacaaaccaaaaaaaactcttcttttttctatctttcacgcgttgaagattcttgattttctttcttctccttccttacacgaccactgatatgtgtcggtgactgaaaccatctgttctcttttgcctctgatttatcgatatgttttaaagaaaaacggtgtttgaaacttttgtaatttaaggttcatcaaatactcagatcttgtctgagaaattaagctgaaatctgataaatgggtttgtttaaattcatcttcttgttatctcttctatggagtttctacagtttaggctcatctcagctacaagcttcacaagcacaagttcttcttcagctgaaaaaacacttagaatatccacaacagctagaatcttggtatgatcacagaaccaatttctgctacttacaagcaacaccatcgatgaacatcacttgtttctctaattcagtctcagagctaaacatcttcggtgataagtcatcagaaaaagccaaaagctttgatggttttgctatctctaatgttactttatctgatggattctccattgaatcatttgtcactacactgtcaaggctaaaatctcttagggttcttactctggcttctctagggatttggggtcgtctccctgagaaacttcatcgtttatcttcacttgagtatttggatttgagcaataactttctgtttggttcagtaccacctaagttgtctacaatggtaaagcttgaaactttcagatttgatcataacttcttcaatggcacattacctagctggtttgattcgtattggtatctcaaagttcttagctttaaaagtaataagctatcaggagagctacattcttcattactctcgttgtcaacaatcgagtatatcgatttgagagcgaattctctgagtggttcacttccggatgatctgaaatgtggaagcaaactctggtttatcgacatttccgacaataagttaaccggaaaacttcctcgttgcttaagcagcaagcaagatattgcgttgagattcaatggaaactgtttatctctagagaaacagcaacatccagaatctttttgtgttaaagaagttcgcgctgcggctaaagctgaagcaaaagcagaagcagaggctgcaaatgaatcaggaaaaagaaaatggaagaaaggagctttaatcggcttaatcgttggtatatcaatgtcggtattggttttagtctgctgtgtatttatcttgctcagaagaaaaggagtaacaaagaagcatgtccaccataatactgtccaagataatcatccaactactggattttcttccgagatactctcaaacgcaaggtacatttctgaaacatccaagtttggttcagaggatttaccggtatgtagacagtttagcttagaagagatagttaaagctacaaagaacttcgataagactatgatactcggtgaaagctccttatatggcacgctttacaaaggaaatcttgagaatggaacaaaagtggcaataagatgcttaccttcatcgaagaaatactcgataaggaatcttaaactgcggttggatttgctcgcaaagcttagacacccgaatcttgtctgcttgttgggtcattgcatagattgtggaggaaaagatgattacagcgttgagaaagtctttttgatttatgagtacattccaaatggaaacttccaatcttgtctctcagataatagttcaggtaagggtatgaattggtcagagaggcttaatgttctcacaggtgttgcaaaagctgttcattttcttcacactggagttattcctggattcttcagcaatagactcaagactaacaacgttttgcttaaccaacatcggtttgcgaagctgagtgattatggtttgtccattgtctctgaagcaaccagacataacacagaaatcgcaaaatcatggcaaatgtcaaggctagaagacgatgtttacagctttggattgattcttctacaatcaatcgttggaccatctgtatccgcaagagaagaagcatttctacgagacgaactggcatcgttggagagcgaagaagggaggagaagaatggtgaatccgacagtacaagccacttgtcgaaacggatcactgataagagtgataactctgatgaacaaatgtgtttcacctgaatctttaagccgaccgtccttcgaagatatcttgtggaatttacagtatgcttctcagttgcaagctgcttctgatggtgaccagtgttaatatattcatagcttcttcttctcttagtaaaaaattcaaacgaactttttaatgctttaaagattcgtgtaatgtgtgtgtacgaaaatcccctgttatttatgtaacgattgggaaaaatggaaattaataacattaactcctttacttaatcccaaaaagtgagtggcaataaatgtaaattaatgc

SEQ ID NO: 2623 - protein, 680 aa, Arabidopsis thaliana
MGLFKFIFLLSLLWSFYSLGSSQLQASQAQVLLQLKKHLEYPQQLESWYDHRTNFCYLQATPSMNITCFSNSVSELNIFGDKSSEKAKSFDGFAISNVTLSDGFSIESFVTTLSRLKSLRVLTLASLGIWGRLPEKLHRLSSLEYLDLSNNFLFGSVPPKLSTMVKLETFRFDHNFFNGTLPSWFDSYWYLKVLSFKSNKLSGELHSSLLSLSTIEYIDLRANSLSGSLPDDLKCGSKLWFIDISDNKLTGKLPRCLSSKQDIALRFNGNCLSLEKQQHPESFCVKEVRAAAKAEAKAEAEAANESGKRKWKKGALIGLIVGISMSVLVLVCCVFILLRRKGVTKKHVHHNTVQDNHPTTGFSSEILSNARYISETSKFGSEDLPVCRQFSLEEIVKATKNFDKTMILGESSLYGTLYKGNLENGTKVAIRCLPSSKKYSIRNLKLRLDLLAKLRHPNLVCLLGHCIDCGGKDDYSVEKVFLIYEYIPNGNFQSCLSDNSSGKGMNWSERLNVLTGVAKAVHFLHTGVIPGFFSNRLKTNNVLLNQHRFAKLSDYGLSIVSEATRHNTEIAKSWQMSRLEDDVYSFGLILLQSIVGPSVSAREEAFLRDELASLESEEGRRRMVNPTVQATCRNGSLIRVITLMNKCVSPESLSRPSFEDILWNLQYASQLQAASDGDQC

SEQ ID NO: 2624 - protein, 617 aa, Arabidopsis thaliana
MNITCFSNSVSELNIFGDKSSEKAKSFDGFAISNVTLSDGFSIESFVTTLSRLKSLRVLTLASLGIWGRLPEKLHRLSSLEYLDLSNNFLFGSVPPKLSTMVKLETFRFDHNFFNGTLPSWFDSYWYLKVLSFKSNKLSGELHSSLLSLSTIEYIDLRANSLSGSLPDDLKCGSKLWFIDISDNKLTGKLPRCLSSKQDIALRFNGNCLSLEKQQHPESFCVKEVRAAAKAEAKAEAEAANESGKRKWKKGALIGLIVGISMSVLVLVCCVFILLRRKGVTKKHVHHNTVQDNHPTTGFSSEILSNARYISETSKFGSEDLPVCRQFSLEEIVKATKNFDKTMILGESSLYGTLYKGNLENGTKVAIRCLPSSKKYSIRNLKLRLDLLAKLRHPNLVCLLGHCIDCGGKDDYSVEKVFLIYEYIPNGNFQSCLSDNSSGKGMNWSERLNVLTGVAKAVHFLHTGVIPGFFSNRLKTNNVLLNQHRFAKLSDYGLSIVSEATRHNTEIAKSWQMSRLEDDVYSFGLILLQSIVGPSVSAREEAFLRDELASLESEEGRRRMVNPTVQATCRNGSLIRVITLMNKCVSPESLSRPSFEDILWNLQYASQLQAASDGDQC

SEQ ID NO: 2625 - protein, 517 aa, Arabidopsis thaliana
MVKLETFRFDHNFFNGTLPSWFDSYWYLKVLSFKSNKLSGELHSSLLSLSTIEYIDLRANSLSGSLPDDLKCGSKLWFIDISDNKLTGKLPRCLSSKQDIALRFNGNCLSLEKQQHPESFCVKEVRAAAKAEAKAEAEAANESGKRKWKKGALIGLIVGISMSVLVLVCCVFILLRRKGVTKKHVHHNTVQDNHPTTGFSSEILSNARYISETSKFGSEDLPVCRQFSLEEIVKATKNFDKTMILGESSLYGTLYKGNLENGTKVAIRCLPSSKKYSIRNLKLRLDLLAKLRHPNLVCLLGHCIDCGGKDDYSVEKVFLIYEYIPNGNFQSCLSDNSSGKGMNWSERLNVLTGVAKAVHFLHTGVIPGFFSNRLKTNNVLLNQHRFAKLSDYGLSIVSEATRHNTEIAKSWQMSRLEDDVYSFGLILLQSIVGPSVSAREEAFLRDELASLESEEGRRRMVNPTVQATCRNGSLIRVITLMNKCVSPESLSRPSFEDILWNLQYASQLQAASDGDQC

SEQ ID NO: 2626 - DNA, 1077 bp, Arabidopsis thaliana
aacatccttcgtcgccggaatttgacgactaatatcagacttcatcagcttacgtcgatctacgtacgacggctatgacgatgacgtcgatcatcagatccagtcctactctcgctttcatcgtcttacagatttgcttcatcttctttgcttccactttcccttgctcttctgggtctgaggatagttacaccattactggtagagtcaagattccaccaagcaacgtgattggtcacatagcaaagttctcaaatgtcaaagttatactcaatggtggacagaagattacgtttctcaggcctgatggatactttacttttcatgaagtgcctgctgggactcatttgattgaagtatcagcaatgggttacttcttttctccggtacgagtagatgttagtgctcggcatcgtggcaaggttcaagcaacactaacagaaaccaggaggagtcttactgagctggttttggagccattgaaggaagagcaatattatgagattcgagagcctttcaacattatgtcgatcgtgaaaagtccaatgggtctcatggtgggattcatggtcgttgttgtgttcctaatgcccaaattaatggaaaacatagatccagaggagatgaagcaagcacaagaggaaatgaggagacaaggcgtgccttcgctcacaagcttgttaccaggcgctggggctagccgctaagagttcctcggttaactcaatgtatcacaaaaggaatgaagagagatttctcagtgatctgagtgagtttggttgttcatctgcaagtgatgatttattaaagttctccttttgagtatctgatatgtatagtcaacttgtttctaaaaccagaaatggtcatcttattgtttgtcctcgacgtcaacttgtgcttatgatatgtaacattattttatttttttattttggctttgaaatattaaacttgggaacaaggagagctcgtttggtatctttctaatcgggtgtaacatcatgtttcatctatatagaaaaagttttatacattctcattgataacattttgatactattataaatattttgt

SEQ ID NO: 2627 - protein, 210 aa, Arabidopsis thaliana
MTMTSIIRSSPTLAFIVLQICFIFFASTFPCSSGSEDSYTITGRVKIPPSNVIGHIAKFSNVKVILNGGQKITFLRPDGYFTFHEVPAGTHLIEVSAMGYFFSPVRVDVSARHRGKVQATLTETRRSLTELVLEPLKEEQYYEIREPFNIMSIVKSPMGLMVGFMVVVVFLMPKLMENIDPEEMKQAQEEMRRQGVPSLTSLLPGAGASR

SEQ ID NO: 2628 - protein, 208 aa, Arabidopsis thaliana
MTSIIRSSPTLAFIVLQICFIFFASTFPCSSGSEDSYTITGRVKIPPSNVIGHIAKFSNVKVILNGGQKITFLRPDGYFTFHEVPAGTHLIEVSAMGYFFSPVRVDVSARHRGKVQATLTETRRSLTELVLEPLKEEQYYEIREPFNIMSIVKSPMGLMVGFMVVVVFLMPKLMENIDPEEMKQAQEEMRRQGVPSLTSLLPGAGASR

SEQ ID NO: 2629 - protein, 113 aa, Arabidopsis thaliana
MGYFFSPVRVDVSARHRGKVQATLTETRRSLTELVLEPLKEEQYYEIREPFNIMSIVKSPMGLMVGFMVVVVFLMPKLMENIDPEEMKQAQEEMRRQGVPSLTSLLPGAGASR

SEQ ID NO: 2630 - DNA, 2298 bp, Arabidopsis thaliana
aaaaaaaatcagaacccaaagccaaagcgtttttatcatttctgtcttcttctgtgtaaacagtaagaccccaaaggtcaaacctttaggctttgtttcttcctttaaggcttttttccgacgtttatatcagatttcttcttgtcaatttcttcatttggacaacctccataatccaagaccgacccttttcctctaatctctcctgttgcagctgaatggtggaacaaactgtggttagagaacatatcaaagcgagagtcatgtcattagtgaggtctgcagagccatcctcatataggaacccgaagctttacacgttgaatgagaatggtaataacaatggtgtcagttctgctcaaatctttgatccagataggtcaaagaatccttgtctgactgatgattcttacccaagccaaagttatgagaagtactttcttgattcgccaactgatgagtttgttcaacatcctattggctctggtgcctcggttagctcatttggctctttagactcatttccttatcagtcaagaccagttcttggatgttccatggaatttcagttaccgttggattcaacctctacttcatctacaaggcttttgggagattaccaagcggtttcttacagtccgagcatggatgtagtggaggagtttgatgatgagcaaatgagatcaaagattcaagagcttgaaagagcgcttctcggcgatgaagatgataaaatggttggaatagataacctcatggagattgacagcgaatggtcgtaccaaaacgaaagcgaacagcatcaagactcgcccaaagaatcatcgtctgcagattccaactctcatgtaagtagcaaagaagtggtgtctcaagccactccaaagcaaatcttgatatcttgtgctcgtgcgctatctgaaggaaaattagaagaagctttgtcaatggtaaatgagctgaggcagatagtttctatccaaggagacccttctcagagaatcgcagcttacatggtggaaggtctagctgcaagaatggccgcttcaggaaaattcatctacagagcattgaaatgcaaagagcctccttcggatgagaggcttgcagctatgcaagtcctgtttgaagtctgcccttgtttcaagttcgggtttttagcagctaatggtgcgatacttgaagcaatcaaaggtgaagaagaagttcacataatcgatttcgatataaaccaagggaaccaatacatgacactgatacgaagcattgctgagttgcctggtaaacgacctcgcctgaggttaacaggaattgatgaccctgaatcagtccaacgctccattggagggctaagaatcatcggtctaagactcgagcaactcgcagaggataatggagtatccttcaaattcaaagcaatgccttcaaagacttcgattgtctctccatcaacactcggttgcaaaccaggagaaaccttaatagtgaactttgcattccaacttcaccacatgcctgacgagagtgtcacaacagtaaaccagcgggacgagctacttcacatggtcaaaagcttaaacccaaagcttgtcacggtcgttgaacaagacgtgaacacaaacacttcaccgttctttcccagattcatagaggcttacgaatactactcagcagttttcgagtctctagacatgacacttccaagagaaagccaagagaggatgaatgtagaaagacagtgtctcgctagagacatagtcaacattgttgcttgcgaaggagaagaacggatagagagatacgaggctgcgggaaaatggagagcaaggatgatgatggctggattcaatccaaaaccaatgagtgctaaagtaaccaacaatatacaaaacctgataaagcaacaatattgcaataagtacaagcttaaagaagaaatgggtgagctccatttttgctgggaggagaaaagcttaatcgttgcttcagcttggaggtaagataagtgacaagagcatatagtctttatgtttcataaaacataattatgtttttactgtaatcttgggttattgtgtaactggttaaatcatctccatgtattattaccagaggttaggggtgatcacaggtactaaaagctaatctaacacttatggaagaatttttctttcttttttttccctattatataaaaataattagagttttggttctaaacctatttgctaagtgtgaatgagtctttacatgttcatatttcagttcaaatggttaaatttgttaaggttctcactt

SEQ ID NO: 2631 - protein, 593 aa, Arabidopsis thaliana
MVEQTVVREHIKARVMSLVRSAEPSSYRNPKLYTLNENGNNNGVSSAQIFDPDRSKNPCLTDDSYPSQSYEKYFLDSPTDEFVQHPIGSGASVSSFGSLDSFPYQSRPVLGCSMEFQLPLDSTSTSSTRLLGDYQAVSYSPSMDVVEEFDDEQMRSKIQELERALLGDEDDKMVGIDNLMEIDSEWSYQNESEQHQDSPKESSSADSNSHVSSKEVVSQATPKQILISCARALSEGKLEEALSMVNELRQIVSIQGDPSQRIAAYMVEGLAARMAASGKFIYRALKCKEPPSDERLAAMQVLFEVCPCFKFGFLAANGAILEAIKGEEEVHIIDFDINQGNQYMTLIRSIAELPGKRPRLRLTGIDDPESVQRSIGGLRIIGLRLEQLAEDNGVSFKFKAMPSKTSIVSPSTLGCKPGETLIVNFAFQLHHMPDESVTTVNQRDELLHMVKSLNPKLVTVVEQDVNTNTSPFFPRFIEAYEYYSAVFESLDMTLPRESQERMNVERQCLARDIVNIVACEGEERIERYEAAGKWRARMMMAGFNPKPMSAKVTNNIQNLIKQQYCNKYKLKEEMGELHFCWEEKSLIVASAWR

SEQ ID NO: 2632 - protein, 578 aa, Arabidopsis thaliana
MSLVRSAEPSSYRNPKLYTLNENGNNNGVSSAQIFDPDRSKNPCLTDDSYPSQSYEKYFLDSPTDEFVQHPIGSGASVSSFGSLDSFPYQSRPVLGCSMEFQLPLDSTSTSSTRLLGDYQAVSYSPSMDVVEEFDDEQMRSKIQELERALLGDEDDKMVGIDNLMEIDSEWSYQNESEQHQDSPKESSSADSNSHVSSKEVVSQATPKQILISCARALSEGKLEEALSMVNELRQIVSIQGDPSQRIAAYMVEGLAARMAASGKFIYRALKCKEPPSDERLAAMQVLFEVCPCFKFGFLAANGAILEAIKGEEEVHIIDFDINQGNQYMTLIRSIAELPGKRPRLRLTGIDDPESVQRSIGGLRIIGLRLEQLAEDNGVSFKFKAMPSKTSIVSPSTLGCKPGETLIVNFAFQLHHMPDESVTTVNQRDELLHMVKSLNPKLVTVVEQDVNTNTSPFFPRFIEAYEYYSAVFESLDMTLPRESQERMNVERQCLARDIVNIVACEGEERIERYEAAGKWRARMMMAGFNPKPMSAKVTNNIQNLIKQQYCNKYKLKEEMGELHFCWEEKSLIVASAWR

SEQ ID NO: 2633 - protein, 480 aa, Arabidopsis thaliana
MEFQLPLDSTSTSSTRLLGDYQAVSYSPSMDVVEEFDDEQMRSKIQELERALLGDEDDKMVGIDNLMEIDSEWSYQNESEQHQDSPKESSSADSNSHVSSKEVVSQATPKQILISCARALSEGKLEEALSMVNELRQIVSIQGDPSQRIAAYMVEGLAARMAASGKFIYRALKCKEPPSDERLAAMQVLFEVCPCFKFGFLAANGAILEAIKGEEEVHIIDFDINQGNQYMTLIRSIAELPGKRPRLRLTGIDDPESVQRSIGGLRIIGLRLEQLAEDNGVSFKFKAMPSKTSIVSPSTLGCKPGETLIVNFAFQLHHMPDESVTTVNQRDELLHMVKSLNPKLVTVVEQDVNTNTSPFFPRFIEAYEYYSAVFESLDMTLPRESQERMNVERQCLARDIVNIVACEGEERIERYEAAGKWRARMMMAGFNPKPMSAKVTNNIQNLIKQQYCNKYKLKEEMGELHFCWEEKSLIVASAWR

SEQ ID NO: 2634 - DNA, 1612 bp, Arabidopsis thaliana
aaacatttctctcttttttctctaatcaccaaacctgcgtcttctctctcacactactaacaacacttccttcttcttcttccgactatggataagaagcacggcttgttctccaagtctaattcccggcgaccacgatccaagagtccagtcagaagcgtctctccgatcatcatccgtcgccggaaaggccgttacgtcacacaaccggaccggcacatgtctgagatgcttgctccggttatagaaggtcctgatccagacgctgaagactccggaagcagtggtgattactctaggttcgagagacgttggtacaattggatgaaatgtcagcttccggtggctccgccgtcagtatcgtcctcttcggatttcaaacgaacggatctgaggcttctcctcggtgttcttggcgcacctttaggtcctgtgcacgttagcgctctggatctccttccacacctcagtatcaagaatacacctatggagacttcctctgctcagtacatacttcagcagtatacggctgcatcaggaggtcaaaagcttcatagttctgtgcaaaatggatatgttatgggaagaatcaggacgatggcttcagagtttgagacaggctcaaaaggttcaaagagcaagaataattcgtcaaaagctgttgagtctggaggatttgtgttgtggcatatgaatcctgatatgtggtacatggagcttgttcttggtgggagcaaggttcttgcaggttgtgacgggaagcttgtgtggagacacacaccatggcttggacctcatgctgcaaaaggaccggttagaccattacgacgtgctctgcagggacttgacccgaggaccacagcgtatatgtttgcaaatgcaaggtgcataggagaaaaaaagatcgatggagaagactgtttcattctcaagctatgtgcagacccggcaacactcaaagctagaagcgaaggggcatcagagaccataagacatacgttgttcggttacttcagccaaaaaaccggtctgcttgttcacttagaagactcccagctaacccgaatccaaaacaatggaggcgaagcggtttactgggagacgaccatcaactcatacctagaagactacaaacctgtcgaaggtatcatgatagctcactctggtagatccgtggctacgcttttaaggtttggagatatgtcatcaggacataacactaagaccacaatgcaagaagcatgggtcatcgatgaaatctcgttcaatgtccctggcttgtctatagattgcttcattccaccttcagaactcagatttgattcccacgttgaagacttatctcaaggccccaaaattaggacattgcacggccataaaaatggttgatgtgaagaagcaggagatcaatgtgtataactcattcaaaaacaaaccctagaccggttattttacttttgctattgtcgaagctaaaattcttgtaggaagtttcgttgaagttgtaaatagacagcaggagaagttcgttctttttgccgcataatgttaggaatgtgtagtcttagtaaggtcagtccaatttttagtttataatattgtttcatatact

SEQ ID NO: 2635 - protein, 433 aa, Arabidopsis thaliana
MDKKHGLFSKSNSRRPRSKSPVRSVSPIIIRRRKGRYVTQPDRHMSEMLAPVIEGPDPDAEDSGSSGDYSRFERRWYNWMKCQLPVAPPSVSSSSDFKRTDLRLLLGVLGAPLGPVHVSALDLLPHLSIKNTPMETSSAQYILQQYTAASGGQKLHSSVQNGYVMGRIRTMASEFETGSKGSKSKNNSSKAVESGGFVLWHMNPDMWYMELVLGGSKVLAGCDGKLVWRHTPWLGPHAAKGPVRPLRRALQGLDPRTTAYMFANARCIGEKKIDGEDCFILKLCADPATLKARSEGASETIRHTLFGYFSQKTGLLVHLEDSQLTRIQNNGGEAVYWETTINSYLEDYKPVEGIMIAHSGRSVATLLRFGDMSSGHNTKTTMQEAWVIDEISFNVPGLSIDCFIPPSELRFDSHVEDLSQGPKIRTLHGHKNG

SEQ ID NO: 2636 - protein, 389 aa, Arabidopsis thaliana
MSEMLAPVIEGPDPDAEDSGSSGDYSRFERRWYNWMKCQLPVAPPSVSSSSDFKRTDLRLLLGVLGAPLGPVHVSALDLLPHLSIKNTPMETSSAQYILQQYTAASGGQKLHSSVQNGYVMGRIRTMASEFETGSKGSKSKNNSSKAVESGGFVLWHMNPDMWYMELVLGGSKVLAGCDGKLVWRHTPWLGPHAAKGPVRPLRRALQGLDPRTTAYMFANARCIGEKKIDGEDCFILKLCADPATLKARSEGASETIRHTLFGYFSQKTGLLVHLEDSQLTRIQNNGGEAVYWETTINSYLEDYKPVEGIMIAHSGRSVATLLRFGDMSSGHNTKTTMQEAWVIDEISFNVPGLSIDCFIPPSELRFDSHVEDLSQGPKIRTLHGHKNG

SEQ ID NO: 2637 - protein, 386 aa, Arabidopsis thaliana
MLAPVIEGPDPDAEDSGSSGDYSRFERRWYNWMKCQLPVAPPSVSSSSDFKRTDLRLLLGVLGAPLGPVHVSALDLLPHLSIKNTPMETSSAQYILQQYTAASGGQKLHSSVQNGYVMGRIRTMASEFETGSKGSKSKNNSSKAVESGGFVLWHMNPDMWYMELVLGGSKVLAGCDGKLVWRHTPWLGPHAAKGPVRPLRRALQGLDPRTTAYMFANARCIGEKKIDGEDCFILKLCADPATLKARSEGASETIRHTLFGYFSQKTGLLVHLEDSQLTRIQNNGGEAVYWETTINSYLEDYKPVEGIMIAHSGRSVATLLRFGDMSSGHNTKTTMQEAWVIDEISFNVPGLSIDCFIPPSELRFDSHVEDLSQGPKIRTLHGHKNG

SEQ ID NO: 2638 - DNA, 2016 bp, Arabidopsis thaliana
tctttttttcctgagacttttccttgaatcctcttccctcctccttcttctctctctctcgtttctcaactaccgtctctctgcttcttctgttcccaaaaccggaaactttacttcgtggaattttcccttgtttctgaaatggaagacacaacatttaccaaagtgttcgttggaggattagcttgggaaacacacaaagtctctctcaggaattactttgaacagtttggtgacattgttgaagctgtcgttatcactgataaatctagtggtagatctaaaggctatggctttgttactttttgtgatccggaagcagctcagaaagcttgtgtagatccagctcctgttattgatggaagaagagctaattgtaatcttgctgcttttggtgttcagagatccaaaccttcttctcctattcatggacatgtaggaggaagaggcatgaaggtgactagccctttcaagacacactttgggaccgcggctactgctattccttccccacttccattctcccactacacacttccttacactaatccttttgggttctcttcatactcaatggattacaattaccccacgcagagctattacaatgtttatggaggggcaactgctcagcatccaatgtatggaagcggaccaatgactggtgtagcagcagcaccagcagcagggttctacccatatctccagtttgctgaaggaaatggacctgtcactggttatgctcccctccactaccccaaccacatgtttcactattctgctcccgggggaaactacccgcatcacaatggttcaccagtgtctcttgcaccttcaccagtcataccatcagtttgctttgcagttccacaggcttgaccatgaaggctcgtggttcatagttccatgatgctatgtaggggaccaattcatttaaatccttaaggcaaagctttgtttactactttcatccacatgcctctgaagtttcacaagacctgtggcctaaccatggttgcccttttccctttatgcttctaacccattagacaaagaagcccataatttggagtttgggcgtctttgcaagttctagttaagtctcacataggggtttaactaggaccatcttcatacacattactcatcttttcattttattcattgcattacctgctttctgaacgaaggtttcgttcaagatagcttgttcgagctgtagaagtaaacagttaccgtcttttgcacagtgcctcgcaaaggcaagcaattttgtagaaaaacttaaaaacttaggattggctgatcaacaagaaaggaaataaggatttcccgggaaaggcacaagaagtgaattgccaccacctggaagtgttgaagtagtgtgtgcaaaggtgtgcacactacttcacgctatatccattttaatgtgcagtcttaggattattagatctaggaccatgttgttacacattgtcttgtagtagaacgctagaacataaacttcctttgaggataaaggaattgctaacacatgtatattctcggtggctaagctttggagttatagccacacttgagctaacttagattaagatcatttttaagattcaaaatttagattgctcatcatatcttgaaccaaccccactaatggattgtggggttcttgcatttgcatgtatttttgcctcttgggagatattttggttccctttaggttcttctcataacaatcaaccaaaccagttgaccaaccatggttaggaatttcaggtgagaggtattcatcacctctttatctctcttttgtacttctttcctctatttcttcaagactaaaaactctctttttatgtaatttgttgttatatcttgtaagctgtgtgtttctgattctatgtaagaaaactaaaagctttcagtttccatcctcggtggttggaaaatgaaactgtgattgcaatattttactttgatctgatatataatcctcttgtatgaggttatgacaag

SEQ ID NO: 2639 - protein, 245 aa, Arabidopsis thaliana
MEDTTFTKVFVGGLAWETHKVSLRNYFEQFGDIVEAVVITDKSSGRSKGYGFVTFCDPEAAQKACVDPAPVIDGRRANCNLAAFGVQRSKPSSPIHGHVGGRGMKVTSPFKTHFGTAATAIPSPLPFSHYTLPYTNPFGFSSYSMDYNYPTQSYYNVYGGATAQHPMYGSGPMTGVAAAPAAGFYPYLQFAEGNGPVTGYAPLHYPNHMFHYSAPGGNYPHHNGSPVSLAPSPVIPSVCFAVPQA

SEQ ID NO: 2640 - protein, 142 aa, Arabidopsis thaliana
MKVTSPFKTHFGTAATAIPSPLPFSHYTLPYTNPFGFSSYSMDYNYPTQSYYNVYGGATAQHPMYGSGPMTGVAAAPAAGFYPYLQFAEGNGPVTGYAPLHYPNHMFHYSAPGGNYPHHNGSPVSLAPSPVIPSVCFAVPQA

SEQ ID NO: 2641 - DNA, 1930 bp, Arabidopsis thaliana
agctccgtcatcataacagcgttaacaaacggcgtcccctgtcgaaagtctctctctttctcgcttctctgaaaaaattgggatcattttgataggagcgactctgttccttcgccgccgatacgcactcttcttcatcggatttgttcctctggtgggattgtagctctccatgtgttgtactagtgcctcttaggacaatgttttggagcttatagtcaaattctgtgaaaactttgaggtgggaattgtgagatcctgtatgatgaagatatccttgaattgcatatatggctttgttgattgatgttctcatctcttgccacctaagggttttgattcggccactgtatctgctaggggttcgcttctggaagaaatatgggtgagactctcatcaccaccctgtctatggagaactatcacccgtcaacactgctatccatggattcaggtgcttttactcatgaagaatcagagagggatatgaatgggtctctcatacttactggaccgcctgatattaatctaccactctcttctgaagctaggccatctctgcttttgtggaacgaacactgtgacatcttagacgttggacttggacctcagctatatgagcctgaggctgttgttcatgtgcctaaggttgctaagaagtacaacaagcgtgttgatagtgcatggggtgcttggcttttcttcagtttctacttcaaacctgttttggatgagaagtctaaaagtaagttaacgagggacagcaatggcttgtctgggtatgataaatctgatttgcagctcgactcgttcttggttcagcatgacatggagaatatgtacatgtgggtgttcaaggaaaagcctgaaaatgcccttggcaagatgcagctgcggagctacatgaacggacactcacgcgagggtgagcgtcctttcccttttagtgtggacaaaggttttgtccgctctcataggatgcagaggaaacattaccgtggtctctctaacccacagtgcctccatggaatcgaagttgtttattcacccaacctttctgtactcagcgaggatgaaaagaagaagtggacagaactcacaggtcgagatgtgaactttgctattccagctgaagctagtgattacggttcatggaggaatctcccaaacaccgaatttgaggctgagagacctcttcctctggctaaagctaacgggcacacccacctgaaaaagctgaatggtacctgtctaaacctgtctacacattccccagaccatgcagttgatacagtggaagttcaactcgctggtagcaataaacgcaaaagggattgtcttgctctaggaaactgcgatgactcgagctcaagtgagaaatctctggacatgaaaatccatgcaacggagctgccttggtcaaatgattttagcggggtgatgaagaatgtgtacggtccagtcacagccgcaaaaacgatatatgaagacgacagagggttcttgatagttatgagcctgccatttgttgattccggaagggtgaaagtgacatggaggaatacaccagcacatggaatagtgaagatatcatgtgtaagtacagcatgtgagccattcatcaagagacatgatagaacatttaagctaacagatccaacaccagagcattgcccaccgggggaatttgtccgcgaagtctccctgccgaacaggattccagatgacgccaagcttgaagcttaccgggacgaaacaggaacaacactagaggttttagtgcctaaacaccgaatgggaccagaggagcatgaggttcgcgtctgtctccgtccgttcgtgctagagtgagattgtagcgcataacttcttaaaagaattttattgttcatgtatcattggattattcatatttaatcatatttactcc

SEQ ID NO: 2642 - protein, 489 aa, Arabidopsis thaliana
MGETLITTLSMENYHPSTLLSMDSGAFTHEESERDMNGSLILTGPPDINLPLSSEARPSLLLWNEHCDILDVGLGPQLYEPEAVVHVPKVAKKYNKRVDSAWGAWLFFSFYFKPVLDEKSKSKLTRDSNGLSGYDKSDLQLDSFLVQHDMENMYMWVFKEKPENALGKMQLRSYMNGHSREGERPFPFSVDKGFVRSHRMQRKHYRGLSNPQCLHGIEVVYSPNLSVLSEDEKKKWTELTGRDVNFAIPAEASDYGSWRNLPNTEFEAERPLPLAKANGHTHLKKLNGTCLNLSTHSPDHAVDTVEVQLAGSNKRKRDCLALGNCDDSSSSEKSLDMKIHATELPWSNDFSGVMKNVYGPVTAAKTIYEDDRGFLIVMSLPFVDSGRVKVTWRNTPAHGIVKISCVSTACEPFIKRHDRTFKLTDPTPEHCPPGEFVREVSLPNRIPDDAKLEAYRDETGTTLEVLVPKHRMGPEEHEVRVCLRPFVLE

SEQ ID NO: 2643 - protein, 479 aa, Arabidopsis thaliana
MENYHPSTLLSMDSGAFTHEESERDMNGSLILTGPPDINLPLSSEARPSLLLWNEHCDILDVGLGPQLYEPEAVVHVPKVAKKYNKRVDSAWGAWLFFSFYFKPVLDEKSKSKLTRDSNGLSGYDKSDLQLDSFLVQHDMENMYMWVFKEKPENALGKMQLRSYMNGHSREGERPFPFSVDKGFVRSHRMQRKHYRGLSNPQCLHGIEVVYSPNLSVLSEDEKKKWTELTGRDVNFAIPAEASDYGSWRNLPNTEFEAERPLPLAKANGHTHLKKLNGTCLNLSTHSPDHAVDTVEVQLAGSNKRKRDCLALGNCDDSSSSEKSLDMKIHATELPWSNDFSGVMKNVYGPVTAAKTIYEDDRGFLIVMSLPFVDSGRVKVTWRNTPAHGIVKISCVSTACEPFIKRHDRTFKLTDPTPEHCPPGEFVREVSLPNRIPDDAKLEAYRDETGTTLEVLVPKHRMGPEEHEVRVCLRPFVLE

SEQ ID NO: 2644 - protein, 468 aa, Arabidopsis thaliana
MDSGAFTHEESERDMNGSLILTGPPDINLPLSSEARPSLLLWNEHCDILDVGLGPQLYEPEAVVHVPKVAKKYNKRVDSAWGAWLFFSFYFKPVLDEKSKSKLTRDSNGLSGYDKSDLQLDSFLVQHDMENMYMWVFKEKPENALGKMQLRSYMNGHSREGERPFPFSVDKGFVRSHRMQRKHYRGLSNPQCLHGIEVVYSPNLSVLSEDEKKKWTELTGRDVNFAIPAEASDYGSWRNLPNTEFEAERPLPLAKANGHTHLKKLNGTCLNLSTHSPDHAVDTVEVQLAGSNKRKRDCLALGNCDDSSSSEKSLDMKIHATELPWSNDFSGVMKNVYGPVTAAKTIYEDDRGFLIVMSLPFVDSGRVKVTWRNTPAHGIVKISCVSTACEPFIKRHDRTFKLTDPTPEHCPPGEFVREVSLPNRIPDDAKLEAYRDETGTTLEVLVPKHRMGPEEHEVRVCLRPFVLE

SEQ ID NO: 2645 - DNA, 2123 bp, Arabidopsis thaliana
caaaatctctacaaagtgaaaacactgagctgaggatctcgctctctctcgattggtatctctcgctccgtccttcctcagatctgatcgtccgccggttttcacgatgccgtcttcctcctccgccgccgtcctcgtgttccttcttctcgtttcccttctcactcctacgttcgcatccgattcagatcacaagtatcaagccgaggagcaggtcaccctatgggtaaacaaagttggcccatataacaatccacaagaaacatacaactattacagtcttccattttgccgcccatctggaaacaatgttcacaaatggggtggtcttggtgaagttctaggtggaaatgagctgattgacagtgagattgcgataaaattcatgaagaatgtcgagagaagtgtcatctgtccgcttgaactcgatgaagctaaggtcaagcattttaaagatgccattgaatctagctactggttcgaattttttatggatgatctacctttgtggggctttgtgggtgagctgcatcctgacaaaaatagtgaaaacggcaagcatgttctttacacacataagaacattgttgtcaaatacaacaaagaccagatcattcatgttaatctcactcaagacaacccaaggccattggaagcagggaaaaaaatggacctgacgtattctgtgcaatggattccaacaaatgtcacatttgctcgccgctttgacgtatatctggattatccgttctttgaacaccagatccactggttctccatctttaactcgttcatgatggttattttcctcaccggtttggtctcaatgatattgatgaggactctcagaaatgattatgcgaagtatgctagagaagatgatgatcttgagagcttggaacgggatgtaagtgaagaatctggttggaaacttgtgcatggagatgtgttcaggccagcaagtagtctagttctgctctcagcggtagttggtacaggtgcacagttggcgttgctggttcttcttgtcatattaatggccatcgtgggaactctctacgttgggagaggagcaatcgtcacaactttcatagtgtgctatgctctgacttcttttgtctctggttatgtgagcggtggaatgtactcaagaagcgggggtaaacattggatcaagtgcatggtcctcacggcttctctcttcccctttttgtgcttcggaattggctttctcctaaacacaattgccatattctatggatctcttgcggctattccttttgggacaatggtggttgtgtttgtaatttgggggttcatttccttccccttagccctcctcggaacggttgttggaagaaattggagcggtgctcctaacaatccatgccgtgtgaagactattccacgtccaatccctgagaaaaaatggtacttgactccatcagtcgtctccctgatggggggtttgctaccctttggaagcatcttcattgagatgtactttgtcttcacatccttctggaattacaaggtctactatgtgtatggattcatgttactggtttttgtgattctcgtcatagtgacggtgtgtgtgacaatcgtgggtacatatttcctgctgaatgcagagaactatcactggcagtggacttcatttttctctgctgcttcgacggctgtctatgtgtacttatactccatctattactactacgtaaagaccaagatgtccggattcttccagacaagcttctactttggatacaccatgatgttctgtcttggccttggaatcctttgcggagctgttggctacctgggatcaaatctgtttgtaaggaggatctacagaaacatcaagtgcgactagaagaggtaaacggaaaaaaagagaaaacaaatccaattagaaggaagctcttacgaggttatatattatattgaaggaacataatatattcttcaatgggggctttttgtctcttcatcttcttcttttttttttttttttttttcttcccattttggtaagtgaattgttctctttagattagaatcgagtgggtgtactatactactactacctgtaatctttttccctatctttttttggtcgt

SEQ ID NO: 2646 - protein, 589 aa, Arabidopsis thaliana
MPSSSSAAVLVFLLLVSLLTPTFASDSDHKYQAEEQVTLWVNKVGPYNNPQETYNYYSLPFCRPSGNNVHKWGGLGEVLGGNELIDSEIAIKFMKNVERSVICPLELDEAKVKHFKDAIESSYWFEFFMDDLPLWGFVGELHPDKNSENGKHVLYTHKNIVVKYNKDQIIHVNLTQDNPRPLEAGKKMDLTYSVQWIPTNVTFARRFDVYLDYPFFEHQIHWFSIFNSFMMVIFLTGLVSMILMRTLRNDYAKYAREDDDLESLERDVSEESGWKLVHGDVFRPASSLVLLSAVVGTGAQLALLVLLVILMAIVGTLYVGRGAIVTTFIVCYALTSFVSGYVSGGMYSRSGGKHWIKCMVLTASLFPFLCFGIGFLLNTIAIFYGSLAAIPFGTMVVVFVIWGFISFPLALLGTVVGRNWSGAPNNPCRVKTIPRPIPEKKWYLTPSVVSLMGGLLPFGSIFIEMYFVFTSFWNYKVYYVYGFMLLVFVILVIVTVCVTIVGTYFLLNAENYHWQWTSFFSAASTAVYVYLYSIYYYYVKTKMSGFFQTSFYFGYTMMFCLGLGILCGAVGYLGSNLFVRRIYRNIKCD

SEQ ID NO: 2647 - protein, 496 aa, Arabidopsis thaliana
MKNVERSVICPLELDEAKVKHFKDAIESSYWFEFFMDDLPLWGFVGELHPDKNSENGKHVLYTHKNIVVKYNKDQIIHVNLTQDNPRPLEAGKKMDLTYSVQWIPTNVTFARRFDVYLDYPFFEHQIHWFSIFNSFMMVIFLTGLVSMILMRTLRNDYAKYAREDDDLESLERDVSEESGWKLVHGDVFRPASSLVLLSAVVGTGAQLALLVLLVILMAIVGTLYVGRGAIVTTFIVCYALTSFVSGYVSGGMYSRSGGKHWIKCMVLTASLFPFLCFGIGFLLNTIAIFYGSLAAIPFGTMVVVFVIWGFISFPLALLGTVVGRNWSGAPNNPCRVKTIPRPIPEKKWYLTPSVVSLMGGLLPFGSIFIEMYFVFTSFWNYKVYYVYGFMLLVFVILVIVTVCVTIVGTYFLLNAENYHWQWTSFFSAASTAVYVYLYSIYYYYVKTKMSGFFQTSFYFGYTMMFCLGLGILCGAVGYLGSNLFVRRIYRNIKCD

SEQ ID NO: 2648 - protein, 461 aa, Arabidopsis thaliana
MDDLPLWGFVGELHPDKNSENGKHVLYTHKNIVVKYNKDQIIHVNLTQDNPRPLEAGKKMDLTYSVQWIPTNVTFARRFDVYLDYPFFEHQIHWFSIFNSFMMVIFLTGLVSMILMRTLRNDYAKYAREDDDLESLERDVSEESGWKLVHGDVFRPASSLVLLSAVVGTGAQLALLVLLVILMAIVGTLYVGRGAIVTTFIVCYALTSFVSGYVSGGMYSRSGGKHWIKCMVLTASLFPFLCFGIGFLLNTIAIFYGSLAAIPFGTMVVVFVIWGFISFPLALLGTVVGRNWSGAPNNPCRVKTIPRPIPEKKWYLTPSVVSLMGGLLPFGSIFIEMYFVFTSFWNYKVYYVYGFMLLVFVILVIVTVCVTIVGTYFLLNAENYHWQWTSFFSAASTAVYVYLYSIYYYYVKTKMSGFFQTSFYFGYTMMFCLGLGILCGAVGYLGSNLFVRRIYRNIKCD

SEQ ID NO: 2649 - DNA, 1522 bp, Arabidopsis thaliana
ctctctcctccaacttggaacttcccgtcttcgatcttctcttctctctctcttcatcgcacgctgtgcccagccagctcaaaacactgcacttccgctttttatcaagatcaatctctaccaatacttagaaaagttctttcctttttgtcaaattctttcaatttctctcttcaattccctacgaattactcacttcggatccaatcagctctttatagcctctgcgtttgggagtcaatctttctctcttcgacaattaagggtttcgtataaagattgctgttttacgacaggattctgaataaggagaagaagggttggtttcatttggatggaaagtatatggtaggtctacacattaatatggaagcgcagattcatatacttgagcaggaagcttattctgctgtattaagagcttttcaagcacaggctgatgaattttcttgggataaagcaaccgtgatgacaaacctacgtaaagaattgaggatatctgatgatgaaaaccgacaactgttgaacaatgtccataatgatgatcttatcaaaagaataagagattcgagaccaagaggtggaaaccaggttgttagacatcagtccctcgatgttcatcctagtccgactttttcagcttctcggaagaaacagaagacgttccaatcctatccgtcgattggttctactagaagtaagtcattcaataaccgtgtagtatcagcaaatgaacctgcggaagctcttattggaagaaaagtgtggacaaaatggcctgaagacaacagcttttatgaagcagtagttacacaatacaatgcaaatgagggtcgacatgcgttggtatatgatataaacacagtgaatgagacatgggaatgggttgatcttaatgagattccaacgaaagatataagatgggatggagaggaagatggggtaactttgaatgtaggacatggcggtggaacaactcgtgggaatcgaaggaccttaagccatggtggtagagggagaggtccaagaactcagccaagaagagaacatttagcaacggaaaacggtggtgggaggaagtttttcggtgagattgaattgttcaacacagactcacttgtgaaagaggtcgagagagtttttgattcaaaccttcctgatccacatgagcttgataaggccaagaagctactcaaggaacatgaacaggcgcttattgctgccattgcaaggcttacggatgcttctgattacgaaagcgatggagaagaaccgtattcgcatgagcttccaatgctgctggggtgagtatgtatgacaccatcacccctaggaaaaatgactagcaatatttctttttcttctgttttgctttaagggatcccagaaaatgattttgttcatatatgatgaacaattagtagtattcttctaatttgtggtttcagaatgtatgaaaataatcgttaggaattttgtttgtaaaaacactatttttaaaaaaaaattctgaacttgtgtg

SEQ ID NO: 2650 - protein, 320 aa, Arabidopsis thaliana
MVGLHINMEAQIHILEQEAYSAVLRAFQAQADEFSWDKATVMTNLRKELRISDDENRQLLNNVHNDDLIKRIRDSRPRGGNQVVRHQSLDVHPSPTFSASRKKQKTFQSYPSIGSTRSKSFNNRVVSANEPAEALIGRKVWTKWPEDNSFYEAVVTQYNANEGRHALVYDINTVNETWEWVDLNEIPTKDIRWDGEEDGVTLNVGHGGGTTRGNRRTLSHGGRGRGPRTQPRREHLATENGGGRKFFGEIELFNTDSLVKEVERVFDSNLPDPHELDKAKKLLKEHEQALIAAIARLTDASDYESDGEEPYSHELPMLLG

SEQ ID NO: 2651 - protein, 313 aa, Arabidopsis thaliana
MEAQIHILEQEAYSAVLRAFQAQADEFSWDKATVMTNLRKELRISDDENRQLLNNVHNDDLIKRIRDSRPRGGNQVVRHQSLDVHPSPTFSASRKKQKTFQSYPSIGSTRSKSFNNRVVSANEPAEALIGRKVWTKWPEDNSFYEAVVTQYNANEGRHALVYDINTVNETWEWVDLNEIPTKDIRWDGEEDGVTLNVGHGGGTTRGNRRTLSHGGRGRGPRTQPRREHLATENGGGRKFFGEIELFNTDSLVKEVERVFDSNLPDPHELDKAKKLLKEHEQALIAAIARLTDASDYESDGEEPYSHELPMLLG

SEQ ID NO: 2652 - protein, 279 aa, Arabidopsis thaliana
MTNLRKELRISDDENRQLLNNVHNDDLIKRIRDSRPRGGNQVVRHQSLDVHPSPTFSASRKKQKTFQSYPSIGSTRSKSFNNRVVSANEPAEALIGRKVWTKWPEDNSFYEAVVTQYNANEGRHALVYDINTVNETWEWVDLNEIPTKDIRWDGEEDGVTLNVGHGGGTTRGNRRTLSHGGRGRGPRTQPRREHLATENGGGRKFFGEIELFNTDSLVKEVERVFDSNLPDPHELDKAKKLLKEHEQALIAAIARLTDASDYESDGEEPYSHELPMLLG

SEQ ID NO: 2653 - DNA, 1256 bp, Arabidopsis thaliana
actattggttcctctgctctggctcatggatgaaactaccagagagatgttctcacctcataatcttcctcttgaaatgatggaagagattctcttaagactacccgtaaagtcattgacgcgattcaaatgcgtttgcagctcctggagatctttgatctcagagactctgtttgctctgaaacacgctttgatcttggagacatcgaaggcaactacttccacgaagagtccttacggagtcataacaacgtctcggtaccatctcaagtcatgctgcatccattctctctacaacgcgtcaacggtctacgtctcagaacatgatggtgagcttttaggaagagattactatcaagtcgtggggacgtgccatggattggtttgtttccacgtagattacgacaaaagtctctacctgtggaatccaaccatcaagcttcaacaaagattgtctagttcggatcttgaaacgagcgatgatgagtgtgttgtaacgtatgggtttggttatgatgaatctgaagatgactataaagtggttgcgttgttgcaacaaagacaccaagtgaagatagagacaaagatctactcaacgagacaaaagctatggagaagcaacacaagtttcccatctggagttgttgttgctgacaaatcaagatccggaatctacatcaacgggacactaaactgggcagccacttcctcatcatcgtcatggacgatcatatcgtatgatatgtcacgcgatgagttcaaggagcttccagggccagtttgttgtggcagaggatgttttacaatgacgcttggagatttaagaggatgtctttcgatggtgtgttattgcaaaggagctaatgcagatgtttgggtgatgaaggagtttggagaagtatattcttggtctaaactcttgagcattcctggtttgaccgactttgttcgaccgctttggatctcagacggtttagtggttttattggagtttagatccggtttagctctctataactgttccaatggaaggtttcattacccagtttcaaacagcataagtggttgtcgtgacgccaaagtttatctcaagacaatggtttctccaaatgatctttgagatataaaaaattgttcctaatgtttctatccaagattttatttaaaaaattagctcgattcgatttaactaagattggtatcaattggtagaaaagaaacagtacttatatggatctttaaattcaagaattaat

SEQ ID NO: 2654 - protein, 372 aa, Arabidopsis thaliana
LLVPLLWLMDETTREMFSPHNLPLEMMEEILLRLPVKSLTRFKCVCSSWRSLISETLFALKHALILETSKATTSTKSPYGVITTSRYHLKSCCIHSLYNASTVYVSEHDGELLGRDYYQVVGTCHGLVCFHVDYDKSLYLWNPTIKLQQRLSSSDLETSDDECVVTYGFGYDESEDDYKVVALLQQRHQVKIETKIYSTRQKLWRSNTSFPSGVVVADKSRSGIYINGTLNWAATSSSSSWTIISYDMSRDEFKELPGPVCCGRGCFTMTLGDLRGCLSMVCYCKGANADVWVMKEFGEVYSWSKLLSIPGLTDFVRPLWISDGLVVLLEFRSGLALYNCSNGRFHYPVSNSISGCRDAKVYLKTMVSPNDL

SEQ ID NO: 2655 - protein, 364 aa, Arabidopsis thaliana
MDETTREMFSPHNLPLEMMEEILLRLPVKSLTRFKCVCSSWRSLISETLFALKHALILETSKATTSTKSPYGVITTSRYHLKSCCIHSLYNASTVYVSEHDGELLGRDYYQVVGTCHGLVCFHVDYDKSLYLWNPTIKLQQRLSSSDLETSDDECVVTYGFGYDESEDDYKVVALLQQRHQVKIETKIYSTRQKLWRSNTSFPSGVVVADKSRSGIYINGTLNWAATSSSSSWTIISYDMSRDEFKELPGPVCCGRGCFTMTLGDLRGCLSMVCYCKGANADVWVMKEFGEVYSWSKLLSIPGLTDFVRPLWISDGLVVLLEFRSGLALYNCSNGRFHYPVSNSISGCRDAKVYLKTMVSPNDL

SEQ ID NO: 2656 - protein, 357 aa, Arabidopsis thaliana
MFSPHNLPLEMMEEILLRLPVKSLTRFKCVCSSWRSLISETLFALKHALILETSKATTSTKSPYGVITTSRYHLKSCCIHSLYNASTVYVSEHDGELLGRDYYQVVGTCHGLVCFHVDYDKSLYLWNPTIKLQQRLSSSDLETSDDECVVTYGFGYDESEDDYKVVALLQQRHQVKIETKIYSTRQKLWRSNTSFPSGVVVADKSRSGIYINGTLNWAATSSSSSWTIISYDMSRDEFKELPGPVCCGRGCFTMTLGDLRGCLSMVCYCKGANADVWVMKEFGEVYSWSKLLSIPGLTDFVRPLWISDGLVVLLEFRSGLALYNCSNGRFHYPVSNSISGCRDAKVYLKTMVSPNDL

SEQ ID NO: 2657 - DNA, 1397 bp, Arabidopsis thaliana
aataaaaactttttcatggatctgagattttctccaaatctatatttgtgattgtttcgtgtagtttttctcttaaagttgtgttctttaagctctctcgtgctcaatcttacgtttccctttggtttgatttcgtgtttttgttattcgatttcacctttaacttttatctaatctcttgtttttgattttgtaaattgtaaaaagtttctggtgattctcttagcgaatttgggaaactttatctgtatttttctgtttcgccgtagatttaggatccttaattaatgaatttgtgggtttcaatattcctcgtctctgcaatagctggatcatgcttaccttctgggtttgcttacgttgacgtttgcaatcacgaattcgaggtgttccgatccgtgatcgagcaaaaatgtcctcgttctttgtatccaagccctcctatcgaggtagatggagacttgctagacaaactcatggatgcaaaccatggaaatgcctatatatccatactattttatacctcacggtgcccgttttcacgtgcagtacgcccaaagtttgatgttctgagttcaatgtttcctcacataacgcacctgattgttgagcaatctcaggctttaccatctgtgttttctaggtatggtatccatagcttgccttcaatcctgatggtgaatcaaacaatgaagatgcgataccatggtccaaaggatcttgcatccctgattcagttttacaaggaaacaacaggtcttaaacctgtccagtatatggatgaaggtgaaccaacaagcttggacactgatggaaacctgatcacatggctacacaacgggtcatctatcagagaaatagcagaaagagagccatatatggtacttgcactaatgtttctgtctttgaaactggcaattttgatcttccccatcatgggatcacggttgaaaacgttatgggcattgtatgttccgcatctgagcttgggaatacttggtgagactagccaactgtttggccgtgccctacacatgatcgatgtgaggagactatggataaaactgagactcaccaaaacaaggaacttccaagaaagagcaaagaacgcacttgcatcagtctcactaggaaaatcttcatcacaatcagcctaaaagggtgatttagaaatccttcactgtcaatgagcttagtttagattactttactttactgtctgtgagagatcctttgactgacatgtttctatacctttggagttccactgtctctgtatgtaaatcctgttttgcttcttttgtgaatattttttcttcttcttttgaatattcatgttcttggtccacttcgttgtgcttacgttttgtctatattgattatggatggtttggttt

SEQ ID NO: 2658 - protein, 289 aa, Arabidopsis thaliana
MNLWVSIFLVSAIAGSCLPSGFAYVDVCNHEFEVFRSVIEQKCPRSLYPSPPIEVDGDLLDKLMDANHGNAYISILFYTSRCPFSRAVRPKFDVLSSMFPHITHLIVEQSQALPSVFSRYGIHSLPSILMVNQTMKMRYHGPKDLASLIQFYKETTGLKPVQYMDEGEPTSLDTDGNLITWLHNGSSIREIAEREPYMVLALMFLSLKLAILIFPIMGSRLKTLWALYVPHLSLGILGETSQLFGRALHMIDVRRLWIKLRLTKTRNFQERAKNALASVSLGKSSSQSA

SEQ ID NO: 2659 - protein, 226 aa, Arabidopsis thaliana
MDANHGNAYISILFYTSRCPFSRAVRPKFDVLSSMFPHITHLIVEQSQALPSVFSRYGIHSLPSILMVNQTMKMRYHGPKDLASLIQFYKETTGLKPVQYMDEGEPTSLDTDGNLITWLHNGSSIREIAEREPYMVLALMFLSLKLAILIFPIMGSRLKTLWALYVPHLSLGILGETSQLFGRALHMIDVRRLWIKLRLTKTRNFQERAKNALASVSLGKSSSQSA

SEQ ID NO: 2660 - protein, 192 aa, Arabidopsis thaliana
MFPHITHLIVEQSQALPSVFSRYGIHSLPSILMVNQTMKMRYHGPKDLASLIQFYKETTGLKPVQYMDEGEPTSLDTDGNLITWLHNGSSIREIAEREPYMVLALMFLSLKLAILIFPIMGSRLKTLWALYVPHLSLGILGETSQLFGRALHMIDVRRLWIKLRLTKTRNFQERAKNALASVSLGKSSSQSA

SEQ ID NO: 2661 - DNA, 1168 bp, Arabidopsis thaliana
caacgcggaagggaaaaaaaaaaaaggcgcaattgaaagaaaaaaattgataatcggtagatttgatgtcccggcgtccggtcgttttgatcaccgtgagaaatggattcttcgaattgttgttctgagtaaaactcactcaccgtcaccggagaagaaagtgtaaatggattccgaagaaacgacgtcgtcggtaacgactacaaagaagcaaaagagggttttctcttcgttagctttgcgattccgtacagtgatagttttctcgatcattagcttcgtcgtcttgtcgtttctattaggaatcttagtgattttcatcggtgaattgtgggtttattcttcttcatctgcttctgcttctcttcattctcgctgcaaaattgtttccagctctgttgatcttaggtcttctaaagtgtgtggcattggactattgaacgtcaaagcacaacatgtgttttacccttttgagagagataaattcagatgtcgttatgattactactgggcttctgtcttcaaggtagagtataaagataacttaatgggtcaaacacggttagcgttttcagaagcaccaaatgaagctcttcctcctgagtgcagacctaactttggtgctgcattacttaccaaagataacttcaaggttaatgagacttacgattgctggtacacattagggattccaaagataaagctttatcgggatagctttttcggttgccaagcagatgatctttctttcactgacattgctaagcaatactctattgtaatctctaaacttttacagtcatggcttaatggagaatcaacaccaaagtactggaaatatgatgtgatcgctggcattgtctctggcttcgcaacttccataatcacagtcttcatcataaggatcttaagacatgcaaaatcttggttccctcaagcttgttgttcagttaagagccagttttctaaggtgaatatattggtacaagtgaaacgtgcatgtttgcttcttgtttacttctcggttctcggatggatggctacacaatacttaaaaattctttttccaaatgcttaggaaaaaacattacttgagagtcagtgagtatgtaatgattcgtagacagttgtgtgatgtaatcttaaatcatttacagaaaaagaaagc

SEQ ID NO: 2662 - protein, 303 aa, Arabidopsis thaliana
MDSEETTSSVTTTKKQKRVFSSLALRFRTVIVFSIISFVVLSFLLGILVIFIGELWVYSSSSASASLHSRCKIVSSSVDLRSSKVCGIGLLNVKAQHVFYPFERDKFRCRYDYYWASVFKVEYKDNLMGQTRLAFSEAPNEALPPECRPNFGAALLTKDNFKVNETYDCWYTLGIPKIKLYRDSFFGCQADDLSFTDIAKQYSIVISKLLQSWLNGESTPKYWKYDVIAGIVSGFATSIITVFIIRILRHAKSWFPQACCSVKSQFSKVNILVQVKRACLLLVYFSVLGWMATQYLKILFPNA

SEQ ID NO: 2663 - protein, 176 aa, Arabidopsis thaliana
MGQTRLAFSEAPNEALPPECRPNFGAALLTKDNFKVNETYDCWYTLGIPKIKLYRDSFFGCQADDLSFTDIAKQYSIVISKLLQSWLNGESTPKYWKYDVIAGIVSGFATSIITVFIIRILRHAKSWFPQACCSVKSQFSKVNILVQVKRACLLLVYFSVLGWMATQYLKILFPNA

SEQ ID NO: 2664 - DNA, 1680 bp, Arabidopsis thaliana
aaaaatataatttcacgcagctgcctctcttttcttcttccgatcctccttccgccgagtgaagccgcgactgtgaaatcatgagaggagtaaaacgcgccgccatctccgaatcgaatgactctccctttaagaatgcaaaaccagtggaaggaatcttttttggtactcagaagaatgtggtaccgatgcagcagagttcagtaacatcagcatcattggataaacagagggctgagttagctaggaagcatgtgagagctcttaataaccaatttgtaagttgggtgcagttacagctgaagaatcatcctgatgaactttgggaagatgggatgaatgactacattacgcatgcttcaaacattctggaaaagtttaaggatgtggtcagctggcttaaagaaaataagggaaagggggagaatttatcccctgaatctcgtggagcagaaaataaattagtggctgaagtcaagaataccaatgttaaatcattttcaaacaatattccttttgcttcaaacaatcaacctgggatcttctcaaacaatcaatcttccgatttttccagtagtcagtctggtttcttttcaagccaatctggagcattctccagcagtccttctggtttgatatccaatagccagactggatcttttagcagtggccagtttggtacgacaaaaagcagccaaccaagcctattttccggcagtcaagccggagcaatctctaatagccaacctggaactttctccagcagtcactctggtataacatctaatagccagacgggatcttttagtagtggccaatttggtcagacaaaaagcagccaaccaagcctactttccggcagtcaagcaggagcaatctctagtaaccaaccttcttttcaattttctaacagtcaatccccttttacatctgcagtacctccagtgtccataccggcaaagcaggatcactcagatgatgcggatggtggagacgaacaatctcaaccgagcagcccatctgtcaaaaagacggaagaaaagggtattactgtggttcatgaagtcaaatgcaaactttatgtcaagtcaagtgacccagcagataaagggtggaaagataaaggaactgggaatctctacataaaatgcaaagaaggagtcgacaaggggacaaaagaatcaaaacccacaattcttgtccgaaacgatgttggaaaactgcttctgaatgcactactgtacgctggaatgaagacaagcccacagaagaacgctcttgttgcaatatttcactcctcggatgattccaacgagaatgtaacaccgagaacctttctgataaggacaaagaacgcagaagctagagataatttagcaacggccatccaagaatacgccccttcttcatagattgcccaaagccaggttgagatcttcactgtaacttttaaaagccttatcgagtcgtcctctctctatattttttttcctgatttgtaatattaggaagggtcttaagagtaacgtaaagcttgataaagggcacaaaaatgttgtatgattgtgtgagagagagagagggccaaaggaggtatttcgtagcttattagagaatgttgtgccaatcttctttgtaacttaaaaaccagaaacaataaaatcacttctttttatagct

SEQ ID NO: 2665 - protein, 443 aa, Arabidopsis thaliana
MRGVKRAAISESNDSPFKNAKPVEGIFFGTQKNVVPMQQSSVTSASLDKQRAELARKHVRALNNQFVSWVQLQLKNHPDELWEDGMNDYITHASNILEKFKDVVSWLKENKGKGENLSPESRGAENKLVAEVKNTNVKSFSNNIPFASNNQPGIFSNNQSSDFSSSQSGFFSSQSGAFSSSPSGLISNSQTGSFSSGQFGTTKSSQPSLFSGSQAGAISNSQPGTFSSSHSGITSNSQTGSFSSGQFGQTKSSQPSLLSGSQAGAISSNQPSFQFSNSQSPFTSAVPPVSIPAKQDHSDDADGGDEQSQPSSPSVKKTEEKGITVVHEVKCKLYVKSSDPADKGWKDKGTGNLYIKCKEGVDKGTKESKPTILVRNDVGKLLLNALLYAGMKTSPQKNALVAIFHSSDDSNENVTPRTFLIRTKNAEARDNLATAIQEYAPSS

SEQ ID NO: 2666 - protein, 407 aa, Arabidopsis thaliana
MQQSSVTSASLDKQRAELARKHVRALNNQFVSWVQLQLKNHPDELWEDGMNDYITHASNILEKFKDVVSWLKENKGKGENLSPESRGAENKLVAEVKNTNVKSFSNNIPFASNNQPGIFSNNQSSDFSSSQSGFFSSQSGAFSSSPSGLISNSQTGSFSSGQFGTTKSSQPSLFSGSQAGAISNSQPGTFSSSHSGITSNSQTGSFSSGQFGQTKSSQPSLLSGSQAGAISSNQPSFQFSNSQSPFTSAVPPVSIPAKQDHSDDADGGDEQSQPSSPSVKKTEEKGITVVHEVKCKLYVKSSDPADKGWKDKGTGNLYIKCKEGVDKGTKESKPTILVRNDVGKLLLNALLYAGMKTSPQKNALVAIFHSSDDSNENVTPRTFLIRTKNAEARDNLATAIQEYAPSS

SEQ ID NO: 2667 - protein, 358 aa, Arabidopsis thaliana
MNDYITHASNILEKFKDVVSWLKENKGKGENLSPESRGAENKLVAEVKNTNVKSFSNNIPFASNNQPGIFSNNQSSDFSSSQSGFFSSQSGAFSSSPSGLISNSQTGSFSSGQFGTTKSSQPSLFSGSQAGAISNSQPGTFSSSHSGITSNSQTGSFSSGQFGQTKSSQPSLLSGSQAGAISSNQPSFQFSNSQSPFTSAVPPVSIPAKQDHSDDADGGDEQSQPSSPSVKKTEEKGITVVHEVKCKLYVKSSDPADKGWKDKGTGNLYIKCKEGVDKGTKESKPTILVRNDVGKLLLNALLYAGMKTSPQKNALVAIFHSSDDSNENVTPRTFLIRTKNAEARDNLATAIQEYAPSS

SEQ ID NO: 2668 - DNA, 1211 bp, Arabidopsis thaliana
aagaaaaaaaatggcggaactgttgttggtggaaactcgaatcccacagcaaaagcactacgaatccaaaccattcccggcggtgatatcaccgccgtctgcttcgattccaattcctgctctgtctctcccactattcactcaaactatcaaaactcagaaacactatctcgattctctcttgcacgaatccggagcagtgctattcagaggttttccggtgaattccgccgatgatttcaacgacgtcgttgaagctttcggtttcgatgagcttccttacgtcggaggcgctgctcctcgcactagcgtcgtcggtcgtgtcttcactgctaatgaatctcctcctgatcagaagattccttttcaccacgagatggctcaggtattgatcaaaatcagatttggatttatgtgaatttgattttttacatctaaagttttgagctttattgaatttgattgatggtgtttgttaggttcgtgagtttccatcaaagttgttcttttactgtgagattgagcctaagtgtggtggagagactccaattgtgttgagtcatgttgtgtatgagagaatgaaagataaacatccagagtttgttcagagattagaggaacatggtttgctttatgttagggttttaggtgaagatgatgatccttcatctcccattggacgtggttggaaatctacattcttaacccatgacaagaaccttgctgagcaaagggcggttgatttgggaatgaaactggaatggacagaggatggtggagccaagacggtaatgggtccgattccggctatcaaatatgacgagtcgagaaaccgcaaagtatggtttaacagcatggtagctgcttatacgggatgggaggataagcggaatgatccaagaaaggctgtgacttttggggatggaaagcctttacctgcggatatagtccatgattgtcttaggattcttgaagaggaatgtgttgctgttccgtggcagagaggagatgttttgcttatagataactgggcggttcttcattctcgaagaccgtttgatcctcctcgtcgagttcttgcatcactctgcaaatagattatgttgtctttcatgcataaatcaaagctttggatttcgaatttagaggcaacaacaacactgtacatattttggatacatatatgtgggtacatagtaacccatttcctc

SEQ ID NO: 2669 - protein, 172 aa, Arabidopsis thaliana
MKDKHPEFVQRLEEHGLLYVRVLGEDDDPSSPIGRGWKSTFLTHDKNLAEQRAVDLGMKLEWTEDGGAKTVMGPIPAIKYDESRNRKVWFNSMVAAYTGWEDKRNDPRKAVTFGDGKPLPADIVHDCLRILEEECVAVPWQRGDVLLIDNWAVLHSRRPFDPPRRVLASLCK

SEQ ID NO: 2670 - protein, 138 aa, Arabidopsis thaliana
RKKMAELLLVETRIPQQKHYESKPFPAVISPPSASIPIPALSLPLFTQTIKTQKHYLDSLLHESGAVLFRGFPVNSADDFNDVVEAFGFDELPYVGGAAPRTSVVGRVFTANESPPDQKIPFHHEMAQVLIKIRFGFM

SEQ ID NO: 2671 - protein, 135 aa, Arabidopsis thaliana
MAELLLVETRIPQQKHYESKPFPAVISPPSASIPIPALSLPLFTQTIKTQKHYLDSLLHESGAVLFRGFPVNSADDFNDVVEAFGFDELPYVGGAAPRTSVVGRVFTANESPPDQKIPFHHEMAQVLIKIRFGFM

SEQ ID NO: 2672 - DNA, 1545 bp, Arabidopsis thaliana
tgaggcgaacggagtttggagtcaaaatccagagcgcggggaaacgaaacgagccaacaaatccgccatggcagctcgtaagagagcttcatcgatctcaattcccaacaaaccggacccgtcggaacccaactcagcgccatcggagcagaagatgacccgaaagacggtttctgcttccggtgaggaatttcgtctcgcgccgccgaaattaggagtgatcttcgtgatctctactcttctctgttcgctctatctataccttctctgttttcactacaaggttgataatgagctcaagcgatcgattctaattaacgcggggcttagcttggttgggtttttcgtcactctcaaaatgattcctgttactgccagatacgttctgagacgtaacatgtttggttttgatatcaacaaaagaggcacgcctcaaggagatattaaagtgccagagtcattgggtattgttgttggtattgtctttttgatcgtggcgataatatttcagtattttaacttcactgaagattctaattggcttgtggagtataatgcagcactagcatctatttgcttcatgattttgcttggatttgtagatgatgtccttgatgtgccttggagagtaaagcttgtcctgccatcttttgctacccttccacttttgatggcttatgctggtcatacaactattgttataccaaaacctcttgttgcttatattggcttggaagtgcttaatctaggaaggatatataagttatatatggggctacttgctgtcttttgtacaaactctattaacatccacgctggtctgaatggccttgaaatcggtcaaacagttgttattgccgctgctatcctgatacacaacgttatgcaaatcggagcatctgttgatcccgagtatcaccaagctcatgccttctcgatatttcttactcaaccgctgatggccacatccttggcaatgcttgcttacaattggtatccttcttcagtttttgttggagacacttacacagtcttcgccggaatgactatggcagttgttggtattctgggtcacttcagtgaaaccctcctcatcttctttcttcctcaagttctgaactttctattatcgcttcctcagcttgctgggattgtgaaatgtccgcgccatcgtctcccaaggtatgatcctgctaccggattactgaccggcacaaaagatgggacactcgtcaatgtttacttgaggttgtttggtcctaaatcagaaaagtctctttgcatccatcttctcgttttccaggctctagcctgcgccttctgcttcatacttcgacactttcttgctggttggtataaatagtctgcaatcagagaagtcacaaatacagaacattactttagtaccttgtacaatcgtatatatcaacaatttttgttaacgtgttgaagtattctcaagtaaacaaagttcattcatttgctttttgttgaacgaaatggcaaaattttcaagacaatgtatcagcatcctgagtttctatg

SEQ ID NO: 2673 - protein, 453 aa, Arabidopsis thaliana
EANGVWSQNPERGETKRANKSAMAARKRASSISIPNKPDPSEPNSAPSEQKMTRKTVSASGEEFRLAPPKLGVIFVISTLLCSLYLYLLCFHYKVDNELKRSILINAGLSLVGFFVTLKMIPVTARYVLRRNMFGFDINKRGTPQGDIKVPESLGIVVGIVFLIVAIIFQYFNFTEDSNWLVEYNAALASICFMILLGFVDDVLDVPWRVKLVLPSFATLPLLMAYAGHTTIVIPKPLVAYIGLEVLNLGRIYKLYMGLLAVFCTNSINIHAGLNGLEIGQTVVIAAAILIHNVMQIGASVDPEYHQAHAFSIFLTQPLMATSLAMLAYNWYPSSVFVGDTYTVFAGMTMAVVGILGHFSETLLIFFLPQVLNFLLSLPQLAGIVKCPRHRLPRYDPATGLLTGTKDGTLVNVYLRLFGPKSEKSLCIHLLVFQALACAFCFILRHFLAGWYK

SEQ ID NO: 2674 - protein, 431 aa, Arabidopsis thaliana
MAARKRASSISIPNKPDPSEPNSAPSEQKMTRKTVSASGEEFRLAPPKLGVIFVISTLLCSLYLYLLCFHYKVDNELKRSILINAGLSLVGFFVTLKMIPVTARYVLRRNMFGFDINKRGTPQGDIKVPESLGIVVGIVFLIVAIIFQYFNFTEDSNWLVEYNAALASICFMILLGFVDDVLDVPWRVKLVLPSFATLPLLMAYAGHTTIVIPKPLVAYIGLEVLNLGRIYKLYMGLLAVFCTNSINIHAGLNGLEIGQTVVIAAAILIHNVMQIGASVDPEYHQAHAFSIFLTQPLMATSLAMLAYNWYPSSVFVGDTYTVFAGMTMAVVGILGHFSETLLIFFLPQVLNFLLSLPQLAGIVKCPRHRLPRYDPATGLLTGTKDGTLVNVYLRLFGPKSEKSLCIHLLVFQALACAFCFILRHFLAGWYK

SEQ ID NO: 2675 - protein, 402 aa, Arabidopsis thaliana
MTRKTVSASGEEFRLAPPKLGVIFVISTLLCSLYLYLLCFHYKVDNELKRSILINAGLSLVGFFVTLKMIPVTARYVLRRNMFGFDINKRGTPQGDIKVPESLGIVVGIVFLIVAIIFQYFNFTEDSNWLVEYNAALASICFMILLGFVDDVLDVPWRVKLVLPSFATLPLLMAYAGHTTIVIPKPLVAYIGLEVLNLGRIYKLYMGLLAVFCTNSINIHAGLNGLEIGQTVVIAAAILIHNVMQIGASVDPEYHQAHAFSIFLTQPLMATSLAMLAYNWYPSSVFVGDTYTVFAGMTMAVVGILGHFSETLLIFFLPQVLNFLLSLPQLAGIVKCPRHRLPRYDPATGLLTGTKDGTLVNVYLRLFGPKSEKSLCIHLLVFQALACAFCFILRHFLAGWYK

SEQ ID NO: 2676 - DNA, 1490 bp, Arabidopsis thaliana
tccacgttctcagagttagttacacagctttcaacgatgaatcagctcgcgctttcaagatccggttacaccgccgccgtgaggtttctccctatgctttccgcagctgttccgaagatcttatcatctctcgccgccgcatccaccgtccgcaacttcagctctaccggaagtcctctcaccagctaccaaatcaataaaccttcgccgtcaaaatccttcacttccaggcttctccaccaatcctcctccgccggtactcctccgcaacaacttttcggcgcccgtagcttctcatctcccagcagtgatttcaacagctaccacattaatccgccgtctaactggggaatccgaatcgtgccggagaggaaagcttgtgtgattgagcggtttggtaaattccacacgactttgccggcggggattcacttccttgttccgtttgtggatcgtatcgcttatgttcattctctaaaggaagaagcgattcctattggtaatcagactgcgattacaaaggataacgttagcatccacatcgatggtgttctctacgttaagattgtggatcctaagttggcttcttatggcgttgagaatccgatctatgctgttatgcagttggctcagactacaatgcgtagtgagctcggtaaaattactcttgacaagacttttgaggaacgggacactctcaatgagaagattgtggaagccatcaatgttgctgcaaaagattggggtcttcagtgccttcgttatgagatcagggatatcatgcctcctaatggagtgagagttgctatggaaatgcaagctgaagctgaacgtaaaaagagagcccagattcttgagtctgaaggagaacgtcaagcccatatcaatagagctgatggtaagaaaagttctgtaatcttggaatcagaagctgcaatgatggaccaagtcaatcgtgcacaaggtgaggctgaagcaatattagctagagcacaagcaacagccaagggactggccatggtatctcaatccctcaaggaagctggtggagaggaggctgcgagtttgagagttgcggagcaatacattcaagcttttggcaaaattgctaaggagggtacaacaatgctgcttccgagtaatgtcgacaatcctgctagcatgatcgctcaagctttaggaatgtacaaagggttgtcaacaaaggtcccaacagtggtttcagggaaacttctggagtagaatcctctactaacgtggttgttgccaaacttgaatagaagctataatgtagctgaacctagggaacaactattcttttgatttgtccaggctttttagccattttcagtttgtttatttcttcatatgagaaacagttatcttaccatataaccattttgcaaactagaaaacagatctaatctcaaatttctgacagagtttttgcaccagatttggtcttctaagtgttggctcttgttatcttt

SEQ ID NO: 2677 - protein, 413 aa, Arabidopsis thaliana
STFSELVTQLSTMNQLALSRSGYTAAVRFLPMLSAAVPKILSSLAAASTVRNFSSTGSPLTSYQINKPSPSKSFTSRLLHQSSSAGTPPQQLFGARSFSSPSSDFNSYHINPPSNWGIRIVPERKACVIERFGKFHTTLPAGIHFLVPFVDRIAYVHSLKEEAIPIGNQTAITKDNVSIHIDGVLYVKIVDPKLASYGVENPIYAVMQLAQTTMRSELGKITLDKTFEERDTLNEKIVEAINVAAKDWGLQCLRYEIRDIMPPNGVRVAMEMQAEAERKKRAQILESEGERQAHINRADGKKSSVILESEAAMMDQVNRAQGEAEAILARAQATAKGLAMVSQSLKEAGGEEAASLRVAEQYIQAFGKIAKEGTTMLLPSNVDNPASMIAQALGMYKGLSTKVPTVVSGKLLE

SEQ ID NO: 2678 - protein, 401 aa, Arabidopsis thaliana
MNQLALSRSGYTAAVRFLPMLSAAVPKILSSLAAASTVRNFSSTGSPLTSYQINKPSPSKSFTSRLLHQSSSAGTPPQQLFGARSFSSPSSDFNSYHINPPSNWGIRIVPERKACVIERFGKFHTTLPAGIHFLVPFVDRIAYVHSLKEEAIPIGNQTAITKDNVSIHIDGVLYVKIVDPKLASYGVENPIYAVMQLAQTTMRSELGKITLDKTFEERDTLNEKIVEAINVAAKDWGLQCLRYEIRDIMPPNGVRVAMEMQAEAERKKRAQILESEGERQAHINRADGKKSSVILESEAAMMDQVNRAQGEAEAILARAQATAKGLAMVSQSLKEAGGEEAASLRVAEQYIQAFGKIAKEGTTMLLPSNVDNPASMIAQALGMYKGLSTKVPTVVSGKLLE

SEQ ID NO: 2679 - protein, 382 aa, Arabidopsis thaliana
MLSAAVPKILSSLAAASTVRNFSSTGSPLTSYQINKPSPSKSFTSRLLHQSSSAGTPPQQLFGARSFSSPSSDFNSYHINPPSNWGIRIVPERKACVIERFGKFHTTLPAGIHFLVPFVDRIAYVHSLKEEAIPIGNQTAITKDNVSIHIDGVLYVKIVDPKLASYGVENPIYAVMQLAQTTMRSELGKITLDKTFEERDTLNEKIVEAINVAAKDWGLQCLRYEIRDIMPPNGVRVAMEMQAEAERKKRAQILESEGERQAHINRADGKKSSVILESEAAMMDQVNRAQGEAEAILARAQATAKGLAMVSQSLKEAGGEEAASLRVAEQYIQAFGKIAKEGTTMLLPSNVDNPASMIAQALGMYKGLSTKVPTVVSGKLLE

SEQ ID NO: 2680 - DNA, 1807 bp, Arabidopsis thaliana
gatatcatcaaaaaccacaaaactttcttttctttttctaactattttatttattattcctacaaaatgtcatgtttgaagtatttcttgatcttattgatgttgggactgtgtgtctcatcggaggagaattttcaatatgactacttgaaagttccggcaagcgagtttgtgagctccataaacacaattgtggtagtgataagacaagtgagttcaattttgtctcagttcgctgatttcagcggagatcgccggctgcagaatgcggtttccgattgccttgatctgcttgacttttcttcagaggagctcacttggtctgcttctgcttctgagaatccaaaaggtaagggcaacggaacaggggacgttggatcggacacaaggacatggttaagtgctgctctctccaaccaagccacttgtatggaaggcttcgatggtacctctggtctcgtaaaatcccttgtcgctggcagtctcgatcaactatattctatgcttagggaattgttaccacttgtgcaaccagagcagaaacccaaggctgtttctaaacctggccctattgctaaaggaccgaaggcaccacctggccgtaaactcagagacaccgacgaagacgaaagccttcaattcccagactgggtcagaccggacgatcgtaaactattagaatcaaacggtaggacttacgacgttagtgtagcattggatgggacaggcaacttcacaaagataatggacgccataaagaaagctcctgattatagctcgacacgtttcgtcatatacattaaaaaaggtttatatttggagaatgttgagatcaagaagaagaaatggaacattgtaatgttaggtgatggcattgacgtgactgttatttccggtaaccgcagcttcatcgatggttggaccactttccgatcagctacattcgcggtaagcggaagaggattcttagcaagagatataacgttccagaacacagcagggccagagaagcatcaggcggtagcactgagatcagactctgacctctctgtgttcttcagatgtgcgatgaggggttatcaagatacactctacacgcacaccatgcgtcagttctaccgtgagtgcaccatcacgggaacagtagattttatatttggggatgggactgttgtgtttcaaaactgtcaaattttggctaaaagaggactccctaaccaaaagaacaccatcactgcacaaggccggaaagatgtcaaccaaccctcaggattctcaattcaattcagcaatatctcggcggacgcagatttggtcccatacctaaacacgacaaggacgtatctaggaaggccatggaagctatattcgagaacggttttcattaggaacaatatgagcgacgttgtgagacccgaaggatggcttgagtggaacgctgattttgcgttggacacactcttctacggagagttcatgaactacgggcctggttcaggactcagcagccgagtcaaatggcctggttaccacgtctttaacaactcggatcaggctaacaacttcaccgtttctcagttcattaaaggaaatctttggctgccttctacgggagtaacgtttagtgatggcttgtatatctaaactggctcagtgtttctattgtgaatgttcctgttttttgttccttttcattttgttttgcgttttcttgtcatgttcttctaagttggtttgttgtggtatttcacggttttggaaaaatattgataaatggggaatttaagtcgatcggctgaagttgaac

SEQ ID NO: 2681 - protein, 547 aa, Arabidopsis thaliana
DIIKNHKTFFSFSNYFIYYSYKMSCLKYFLILLMLGLCVSSEENFQYDYLKVPASEFVSSINTIVVVIRQVSSILSQFADFSGDRRLQNAVSDCLDLLDFSSEELTWSASASENPKGKGNGTGDVGSDTRTWLSAALSNQATCMEGFDGTSGLVKSLVAGSLDQLYSMLRELLPLVQPEQKPKAVSKPGPIAKGPKAPPGRKLRDTDEDESLQFPDWVRPDDRKLLESNGRTYDVSVALDGTGNFTKIMDAIKKAPDYSSTRFVIYIKKGLYLENVEIKKKKWNIVMLGDGIDVTVISGNRSFIDGWTTFRSATFAVSGRGFLARDITFQNTAGPEKHQAVALRSDSDLSVFFRCAMRGYQDTLYTHTMRQFYRECTITGTVDFIFGDGTVVFQNCQILAKRGLPNQKNTITAQGRKDVNQPSGFSIQFSNISADADLVPYLNTTRTYLGRPWKLYSRTVFIRNNMSDVVRPEGWLEWNADFALDTLFYGEFMNYGPGSGLSSRVKWPGYHVFNNSDQANNFTVSQFIKGNLWLPSTGVTFSDGLYI

SEQ ID NO: 2682 - protein, 525 aa, Arabidopsis thaliana
MSCLKYFLILLMLGLCVSSEENFQYDYLKVPASEFVSSINTIVVVIRQVSSILSQFADFSGDRRLQNAVSDCLDLLDFSSEELTWSASASENPKGKGNGTGDVGSDTRTWLSAALSNQATCMEGFDGTSGLVKSLVAGSLDQLYSMLRELLPLVQPEQKPKAVSKPGPIAKGPKAPPGRKLRDTDEDESLQFPDWVRPDDRKLLESNGRTYDVSVALDGTGNFTKIMDAIKKAPDYSSTRFVIYIKKGLYLENVEIKKKKWNIVMLGDGIDVTVISGNRSFIDGWTTFRSATFAVSGRGFLARDITFQNTAGPEKHQAVALRSDSDLSVFFRCAMRGYQDTLYTHTMRQFYRECTITGTVDFIFGDGTVVFQNCQILAKRGLPNQKNTITAQGRKDVNQPSGFSIQFSNISADADLVPYLNTTRTYLGRPWKLYSRTVFIRNNMSDVVRPEGWLEWNADFALDTLFYGEFMNYGPGSGLSSRVKWPGYHVFNNSDQANNFTVSQFIKGNLWLPSTGVTFSDGLYI

SEQ ID NO: 2683 - protein, 514 aa, Arabidopsis thaliana
MLGLCVSSEENFQYDYLKVPASEFVSSINTIVVVIRQVSSILSQFADFSGDRRLQNAVSDCLDLLDFSSEELTWSASASENPKGKGNGTGDVGSDTRTWLSAALSNQATCMEGFDGTSGLVKSLVAGSLDQLYSMLRELLPLVQPEQKPKAVSKPGPIAKGPKAPPGRKLRDTDEDESLQFPDWVRPDDRKLLESNGRTYDVSVALDGTGNFTKIMDAIKKAPDYSSTRFVIYIKKGLYLENVEIKKKKWNIVMLGDGIDVTVISGNRSFIDGWTTFRSATFAVSGRGFLARDITFQNTAGPEKHQAVALRSDSDLSVFFRCAMRGYQDTLYTHTMRQFYRECTITGTVDFIFGDGTVVFQNCQILAKRGLPNQKNTITAQGRKDVNQPSGFSIQFSNISADADLVPYLNTTRTYLGRPWKLYSRTVFIRNNMSDVVRPEGWLEWNADFALDTLFYGEFMNYGPGSGLSSRVKWPGYHVFNNSDQANNFTVSQFIKGNLWLPSTGVTFSDGLYI

SEQ ID NO: 2684 - DNA, 1447 bp, Arabidopsis thaliana
cttaaaagaaaaaaaaaatcccaaacacagcaaaaaaaaaaaaaaaagcctagaggaatagaatcggtctctttctctataatctctctctctctctgacttgtttgtgttctctcaaatcctctgataagaatcaatggccaaggaattagcagagaaagctaaagaagcttttctagatgatgacttcgatgttgctgttgacttatactccaaagccattgacttggatcccaattgcgccgccttcttcgccgatcgtgctcaggccaacatcaaaatcgataacttcactgaagctgttgtagatgcgaacaaagccattgagttggagccaacgttggcaaaagcctatctcagaaagggcactgcttgtatgaagctagaagaatatagtactgctaaagcagccctggaaaagggagcttctgttgcaccgaatgaaccaaagtttaagaagatgatagatgaatgcgatcttcgtattgcagaagaagagaaagatttggttcagccgatgccaccgagtttgccttcaagctctacaacaccactagcaacggaagctgatgctcctcctgttccaattcctgcagcacctgccaaaccgatgttcaggcacgagttctaccagaaaccagaagaagcggtggtgacaattttcgccaaaaaagtacctaaggagaacgtaactgtcgagtttggtgagcagattctgagtgttgtcattgatgttgctggagaggaagcttatcatctccagccgagattgttcgggaagataataccagagaagtgcagatttgaagtattgtcgaccaaagttgagatccgtcttgcgaaagcagagataatcacctgggcctcccttgaatatggtaaagggcaaagtgttttgcccaaacccaatgtctcatcagcgctgtcgcagagaccagtgtacccatcttctaagccagcaaaagactgggacaagttggaagctgaagtgaagaaacaggagaaggatgagaagcttgatggagatgcagctatgaacaaatttttcagcgacatatactcgagtgcagatgaagacatgaggcgggcaatgaacaaatcatttgcagagtcgaatgggacggtactgtcgacaaactggaaagaagttgggactaagaaagtggagagcactccaccagatggcatggagctcaagaagtgggagtattgatcttcttaaaatccccttttctggtttttgttaaaaaaaagtctgacaaatcttttgaacttttaaggtgtttttcttttttggtttctgctcgaatttgtctctctccattcttgcgttgtggtctcaaagaacgttctgatactttgattttgtattagaaaactaaaactcgcaagtctgttgttttggaactttgttcttttatcgagaggcttatctaaatatttcttg

SEQ ID NO: 2685 - protein, 358 aa, Arabidopsis thaliana
MAKELAEKAKEAFLDDDFDVAVDLYSKAIDLDPNCAAFFADRAQANIKIDNFTEAVVDANKAIELEPTLAKAYLRKGTACMKLEEYSTAKAALEKGASVAPNEPKFKKMIDECDLRIAEEEKDLVQPMPPSLPSSSTTPLATEADAPPVPIPAAPAKPMFRHEFYQKPEEAVVTIFAKKVPKENVTVEFGEQILSVVIDVAGEEAYHLQPRLFGKIIPEKCRFEVLSTKVEIRLAKAEIITWASLEYGKGQSVLPKPNVSSALSQRPVYPSSKPAKDWDKLEAEVKKQEKDEKLDGDAAMNKFFSDIYSSADEDMRRAMNKSFAESNGTVLSTNWKEVGTKKVESTPPDGMELKKWEY

SEQ ID NO: 2686 - protein, 278 aa, Arabidopsis thaliana
MKLEEYSTAKAALEKGASVAPNEPKFKKMIDECDLRIAEEEKDLVQPMPPSLPSSSTTPLATEADAPPVPIPAAPAKPMFRHEFYQKPEEAVVTIFAKKVPKENVTVEFGEQILSVVIDVAGEEAYHLQPRLFGKIIPEKCRFEVLSTKVEIRLAKAEIITWASLEYGKGQSVLPKPNVSSALSQRPVYPSSKPAKDWDKLEAEVKKQEKDEKLDGDAAMNKFFSDIYSSADEDMRRAMNKSFAESNGTVLSTNWKEVGTKKVESTPPDGMELKKWEY

SEQ ID NO: 2687 - protein, 250 aa, Arabidopsis thaliana
MIDECDLRIAEEEKDLVQPMPPSLPSSSTTPLATEADAPPVPIPAAPAKPMFRHEFYQKPEEAVVTIFAKKVPKENVTVEFGEQILSVVIDVAGEEAYHLQPRLFGKIIPEKCRFEVLSTKVEIRLAKAEIITWASLEYGKGQSVLPKPNVSSALSQRPVYPSSKPAKDWDKLEAEVKKQEKDEKLDGDAAMNKFFSDIYSSADEDMRRAMNKSFAESNGTVLSTNWKEVGTKKVESTPPDGMELKKWEY

SEQ ID NO: 2688 - DNA, 1224 bp, Arabidopsis thaliana
atgtctcagccttcaaagctatcaaaatcaaaaaaattctatcaaacaaggaaatatatcaatggcggtattgtctaaaccggtagcaataccaaaatccgggttctctctaatcccggttatagatatgtctgacccagaatccaaacatgccctcgtgaaagcatgcgaagacttcggcttcttcaaggtgatcaaccatggcgtttccgcagagctagtctctgttttagaacacgagaccgtcgatttcttctcgttgcccaagtcagagaaaacccaagtcgcaggttatcccttcggatacgggaacagtaagattggtcggaatggtgacgtgggttgggttgagtacttgttgatgaacgctaatcatgattccggttcgggtccactatttccaagtcttctcaaaagcccgggaactttcagaaacgcattggaagagtacacaacatcagtgagaaaaatgacattcgatgttttggagaagatcacagatgggctagggatcaaaccgaggaacacacttagcaagcttgtgtctgaccaaaacacggactcgatattgagacttaatcactatccaccatgtcctcttagcaataagaaaaccaatggtggtaagaatgtgattggttttggtgaacacacagatcctcaaatcatctctgtcttaagatctaacaacacttctggtctccaaattaatctaaatgatggctcatggatctctgtccctcccgatcacacttccttcttcttcaacgttggtgactctctccaggtgatgacaaatgggaggttcaagagcgtgaggcatagggttttagctaactgtaaaaaatctagggtttctatgatttacttcgctggaccttcattgactcagagaatcgctccgttgacatgtttgatagacaatgaggacgagaggttgtacgaggagtttacttggtctgaatacaaaaactctacctacaactctagattgtctgataataggcttcaacaattcgaaaggaagactataaaaaatctcctaaattgattgatatatctatttaatctataagtgtgtgctacatacagacaatgcatctgtatattttgaagttaatgttatttgttaatccaataactgtaaaaacatgcaagagtgtgtttgtttgtttcgtaatatcaacatcgctcccatcttttatggataatatcaagttgttt

SEQ ID NO: 2689 - protein, 349 aa, Arabidopsis thaliana
CLSLQSYQNQKNSIKQGNISMAVLSKPVAIPKSGFSLIPVIDMSDPESKHALVKACEDFGFFKVINHGVSAELVSVLEHETVDFFSLPKSEKTQVAGYPFGYGNSKIGRNGDVGWVEYLLMNANHDSGSGPLFPSLLKSPGTFRNALEEYTTSVRKMTFDVLEKITDGLGIKPRNTLSKLVSDQNTDSILRLNHYPPCPLSNKKTNGGKNVIGFGEHTDPQIISVLRSNNTSGLQINLNDGSWISVPPDHTSFFFNVGDSLQVMTNGRFKSVRHRVLANCKKSRVSMIYFAGPSLTQRIAPLTCLIDNEDERLYEEFTWSEYKNSTYNSRLSDNRLQQFERKTIKNLLN

SEQ ID NO: 2690 - protein, 329 aa, Arabidopsis thaliana
MAVLSKPVAIPKSGFSLIPVIDMSDPESKHALVKACEDFGFFKVINHGVSAELVSVLEHETVDFFSLPKSEKTQVAGYPFGYGNSKIGRNGDVGWVEYLLMNANHDSGSGPLFPSLLKSPGTFRNALEEYTTSVRKMTFDVLEKITDGLGIKPRNTLSKLVSDQNTDSILRLNHYPPCPLSNKKTNGGKNVIGFGEHTDPQIISVLRSNNTSGLQINLNDGSWISVPPDHTSFFFNVGDSLQVMTNGRFKSVRHRVLANCKKSRVSMIYFAGPSLTQRIAPLTCLIDNEDERLYEEFTWSEYKNSTYNSRLSDNRLQQFERKTIKNLLN

SEQ ID NO: 2691 - protein, 307 aa, Arabidopsis thaliana
MSDPESKHALVKACEDFGFFKVINHGVSAELVSVLEHETVDFFSLPKSEKTQVAGYPFGYGNSKIGRNGDVGWVEYLLMNANHDSGSGPLFPSLLKSPGTFRNALEEYTTSVRKMTFDVLEKITDGLGIKPRNTLSKLVSDQNTDSILRLNHYPPCPLSNKKTNGGKNVIGFGEHTDPQIISVLRSNNTSGLQINLNDGSWISVPPDHTSFFFNVGDSLQVMTNGRFKSVRHRVLANCKKSRVSMIYFAGPSLTQRIAPLTCLIDNEDERLYEEFTWSEYKNSTYNSRLSDNRLQQFERKTIKNLLN

SEQ ID NO: 2692 - DNA, 1648 bp, Arabidopsis thaliana
aattctctgtctgtgataaaagaaaaattgaatttttttcttctatctatctacctctgttcttcctcgtcatttcttacccagaaaaatagaggataacaaaaatctgtttctttcgatgatcatcgtgacactttctctgtgatttttcctttcttctgttgttgttgatcatcgtgatcatcgtctttccttacatgcgaacccccatgtcagacactcagcatgtacagagctctttggtgtcgattcgatcttccgacaaaatcgaagatgcctttaggaagatgaaagtaaatgagaccggcgtggaggaactgaatccgtatccagatcgtcccggtgaaagagattgccaattctatttaagaactggtctctgtggctatggaagcagttgccgttacaatcatcctactcatcttccacaggatgttgcttattacaaggaggagctccctgagagaattggacagccggattgtgagtattttctgaagacaggagcttgtaagtacggcccaacttgtaaatatcatcatccaaaggacaggaacggtgcacaacctgtaatgttcaatgttatcggtttacctatgcgtctgggtgagaagccatgtccatattacctgcgaacgggaacttgcagattcggagttgcttgcaaattccaccatcctcaacctgataatggacattctactgcatatggaatgtctagctttcctgctgcagatttacgatatgctagtggtttaacaatgatgtctacatatggaactttgcctcgtccgcaagttccccagtcctatgtgccaatcctggtttcaccctctcaaggctttttacctcctcaaggctgggccccttacatggctgcatctaactccatgtacaatgtgaagaatcaaccttattactccggtagtagtgcatccatggccatggctgtggcattgaaccgtggtttgtcagaaagttctgaccaaccagaatgtcggttttttatgaacaccgggacatgtaaatacggagacgattgcaaatacagccatcccggagtaaggatttcacaaccaccaccaagtcttataaaccctttagttcttccagcgagacctggacaaccagcttgtggtaacttcaggtcttatggattctgcaagtttggaccaaactgcaaattcgaccaccctatgctgccatatccgggcctgaccatggctacttctctgcctactccttttgcttcacctgttacaacccatcagaggatctcaccaacaccaaaccgctctgattcaaagtctctttctaatggtaaacctgatgtgaagaaagaaagctcagagactgagaaaccagacaatggagaagtgcaggatttgtctgaggatgcgtcatcaccatgatcatgattcttaaaaaccccaatgatctctctctgcccttttttgtggaagaggaggggaggtgaaaagtgtttctcttttctttttttttcttttttttttggcttggagatggccatggctgaaaacaatataggatgaaaccagtgatgttgtcacaggtttctcttctgtttttgactctgttaataaattttaatcagacttatcagaggaaaaatagagtttgtgttgtg

SEQ ID NO: 2693 - protein, 404 aa, Arabidopsis thaliana
MRTPMSDTQHVQSSLVSIRSSDKIEDAFRKMKVNETGVEELNPYPDRPGERDCQFYLRTGLCGYGSSCRYNHPTHLPQDVAYYKEELPERIGQPDCEYFLKTGACKYGPTCKYHHPKDRNGAQPVMFNVIGLPMRLGEKPCPYYLRTGTCRFGVACKFHHPQPDNGHSTAYGMSSFPAADLRYASGLTMMSTYGTLPRPQVPQSYVPILVSPSQGFLPPQGWAPYMAASNSMYNVKNQPYYSGSSASMAMAVALNRGLSESSDQPECRFFMNTGTCKYGDDCKYSHPGVRISQPPPSLINPLVLPARPGQPACGNFRSYGFCKFGPNCKFDHPMLPYPGLTMATSLPTPFASPVTTHQRISPTPNRSDSKSLSNGKPDVKKESSETEKPDNGEVQDLSEDASSP

SEQ ID NO: 2694 - protein, 400 aa, Arabidopsis thaliana
MSDTQHVQSSLVSIRSSDKIEDAFRKMKVNETGVEELNPYPDRPGERDCQFYLRTGLCGYGSSCRYNHPTHLPQDVAYYKEELPERIGQPDCEYFLKTGACKYGPTCKYHHPKDRNGAQPVMFNVIGLPMRLGEKPCPYYLRTGTCRFGVACKFHHPQPDNGHSTAYGMSSFPAADLRYASGLTMMSTYGTLPRPQVPQSYVPILVSPSQGFLPPQGWAPYMAASNSMYNVKNQPYYSGSSASMAMAVALNRGLSESSDQPECRFFMNTGTCKYGDDCKYSHPGVRISQPPPSLINPLVLPARPGQPACGNFRSYGFCKFGPNCKFDHPMLPYPGLTMATSLPTPFASPVTTHQRISPTPNRSDSKSLSNGKPDVKKESSETEKPDNGEVQDLSEDASSP

SEQ ID NO: 2695 - protein, 374 aa, Arabidopsis thaliana
MKVNETGVEELNPYPDRPGERDCQFYLRTGLCGYGSSCRYNHPTHLPQDVAYYKEELPERIGQPDCEYFLKTGACKYGPTCKYHHPKDRNGAQPVMFNVIGLPMRLGEKPCPYYLRTGTCRFGVACKFHHPQPDNGHSTAYGMSSFPAADLRYASGLTMMSTYGTLPRPQVPQSYVPILVSPSQGFLPPQGWAPYMAASNSMYNVKNQPYYSGSSASMAMAVALNRGLSESSDQPECRFFMNTGTCKYGDDCKYSHPGVRISQPPPSLINPLVLPARPGQPACGNFRSYGFCKFGPNCKFDHPMLPYPGLTMATSLPTPFASPVTTHQRISPTPNRSDSKSLSNGKPDVKKESSETEKPDNGEVQDLSEDASSP

SEQ ID NO: 2696 - DNA, 1217 bp, Arabidopsis thaliana
aatgctcgtaagttcaagcaaaatcacaagagcgagagagatggtgacgaaaacagaggagaagcaattgaaccagctagagattcaagtcgataatggcggaggcggaacatgggagtatctttgcctcgttcgtaatctcaaagttcgccggtcggagaaagtgttaaaacacggttcctcgattttgaatgatcagaagaaacgatctgctcttggtccagatgaatggacactaaatgagcaggtggcaattgcagctatggactgtcaatgtctcggtgtcgcacagagttgcattaaggctttgcagacaaaatttcctgggagcaaaagagttgggaggcttgaggcattgcttcttgaagcgaagggattatggggagaggctgaggaagcatatgcgagtcttttggaggataatccactcgaccaagcgatacacaaacgaagagtggctatatccaaggcactaggcaaaccttccatagccattgagcttcttaacaaatatcttgaactattcatggctgatcatgatgcatggagagaactcgcagagctttacctttccttgcaaatgtataagcaagcagctttctgctatgaagagctcatactatctcagcctactgttccattgtaccacctcgcatatgctgaggttctctatacaatcggtggagtagaaaacattatctcagcaagaaaatactatgcagcgaccgtagatttaacaggcggcaaaaacactagagctcttctcggaatctgcttgtgtgcatcggccattgcacagctctcaaaaggcaggaacaaagaggacaaagacgctacggcagccccagagcttcattccctggctgcagctgcagtagagaaagaatacaagcaaaaagccccggacaaacttcaactcatctcttccgcgttaagaatcttgaagacttgatcgcaagtaaacgatgttctggcccacaagacgcaaacgatttagcagtagtagatagtcggaaaatatcgaactctaaattcaaataactttctttaaagtttaaaccaaagagaattttgattactgttagataccaaaaccaaataactgtatcactccttagcctttacggtttccatgcttgcgacgtgcagcttcttttgtatcattttcgatgcgctcaacgtacatcggtagaaggataatctctttgatctccttc

SEQ ID NO: 2697 - protein, 316 aa, Arabidopsis thaliana
MLVSSSKITRAREMVTKTEEKQLNQLEIQVDNGGGGTWEYLCLVRNLKVRRSEKVLKHGSSILNDQKKRSALGPDEWTLNEQVAIAAMDCQCLGVAQSCIKALQTKFPGSKRVGRLEALLLEAKGLWGEAEEAYASLLEDNPLDQAIHKRRVAISKALGKPSIAIELLNKYLELFMADHDAWRELAELYLSLQMYKQAAFCYEELILSQPTVPLYHLAYAEVLYTIGGVENIISARKYYAATVDLTGGKNTRALLGICLCASAIAQLSKGRNKEDKDATAAPELHSLAAAAVEKEYKQKAPDKLQLISSALRILKT

SEQ ID NO: 2698 - protein, 303 aa, Arabidopsis thaliana
MVTKTEEKQLNQLEIQVDNGGGGTWEYLCLVRNLKVRRSEKVLKHGSSILNDQKKRSALGPDEWTLNEQVAIAAMDCQCLGVAQSCIKALQTKFPGSKRVGRLEALLLEAKGLWGEAEEAYASLLEDNPLDQAIHKRRVAISKALGKPSIAIELLNKYLELFMADHDAWRELAELYLSLQMYKQAAFCYEELILSQPTVPLYHLAYAEVLYTIGGVENIISARKYYAATVDLTGGKNTRALLGICLCASAIAQLSKGRNKEDKDATAAPELHSLAAAAVEKEYKQKAPDKLQLISSALRILKT

SEQ ID NO: 2699 - protein, 229 aa, Arabidopsis thaliana
MDCQCLGVAQSCIKALQTKFPGSKRVGRLEALLLEAKGLWGEAEEAYASLLEDNPLDQAIHKRRVAISKALGKPSIAIELLNKYLELFMADHDAWRELAELYLSLQMYKQAAFCYEELILSQPTVPLYHLAYAEVLYTIGGVENIISARKYYAATVDLTGGKNTRALLGICLCASAIAQLSKGRNKEDKDATAAPELHSLAAAAVEKEYKQKAPDKLQLISSALRILKT

SEQ ID NO: 2700 - DNA, 1370 bp, Arabidopsis thaliana
cttcccctttccttccgaaattagggcttccgtgtttcgcagtgctctccttcaatccccagcttgacaatgcctcgctatgatgatcgctatgggaacactcgtctctacgttggccgattatcatcgagaactaggacccgagaccttgaacgtctttttagcagatacggaaggtctctgggattttgcctaacctggaggtgtttgatgagtgggtggacttggtggaaattctcgccaagtgtttaggggacagggcgccttggcgattctgtttgtagaattttttaatgtgttttgatggaaatggagactcagtctcaaaaatggtgtttagaagtaccttaaagtaatgatggccttacttttctgccaacaatttcttccgcagagtgcgatatgtggatatgaagcgagattatgctttcgttgaatttggtgatccccgtgatgctgatgatgcaagacattacctggacggacgagactttgatggaagtcgcatcactgtggagttttcacgaggggcacctcgtggttctcgggattttgatagcagaggcccaccacctggagctggtcgctgttttaactgtggtgtagatggtcattgggctcgtgactgcacagcaggggactggaagaacaagtgttaccgttgtggagagagaggacacattgagagaaactgcaaaaacagccccaagaagcttaggcgcagtggaagctactccaggtcacctgtaagatcccgttctcctcgtcgtagaagaagcccaagccggagtcttagccgtagccgaagctacagccgatcacgatccccggtgagaagaagagagaggagtgtggaggagagatcacgcagtccaaagcggatggatgactctctatcgccaagagccagagatcgtagtccggttcttgatgatgaaggcagcccaaagatcatagacgggagcccaccaccatcaccaaagcttcaaaaggaagtcggatctgaccgtgacggtggtagcccccaagacaatggcagaaactctgttgtcagtcctgttgtaggagccggtggtgacagttcgaaagaggaccggagccctgttgatgatgattacgagccaaaccgcacttcccctagaggaagtgagtctccttaactttgatggctcatggccacggcttgcaggcattgtagcatgtatactattggatcgactgttcctttctcttttaagtgtgtttgctttagaaccttttaagtttcatgttaccaagagttttttcatttgagacataatgttgttgcgtttcttttggacaagttttcgaagattgttataaggatttataaaagtttcaatctgagg

SEQ ID NO: 2701 - protein, 249 aa, Arabidopsis thaliana
MKRDYAFVEFGDPRDADDARHYLDGRDFDGSRITVEFSRGAPRGSRDFDSRGPPPGAGRCFNCGVDGHWARDCTAGDWKNKCYRCGERGHIERNCKNSPKKLRRSGSYSRSPVRSRSPRRRRSPSRSLSRSRSYSRSRSPVRRRERSVEERSRSPKRMDDSLSPRARDRSPVLDDEGSPKIIDGSPPPSPKLQKEVGSDRDGGSPQDNGRNSVVSPVVGAGGDSSKEDRSPVDDDYEPNRTSPRGSESP

SEQ ID NO: 2702 - DNA, 2079 bp, Arabidopsis thaliana
atcacattctctccttattcaacttaaatactacacggccaaaaacatttaacaaacgccactcagatcctgagtctttggatcaatggctatttcaaatgttatttctgtcttattattattgcttgtactaatcaatttaagcaatcaaaatatcaaaggaattgatgcatttcatcagatttacgaagaattgcaatctgaatcagtcgagtcagtgaatcatcttcacagacctagttttcactttcaacctccaaagcattggattaacgatccaaatggtccagtatactacaaaggtctctaccatctcttctaccaatataacaccaaaggtgcggtttggggtaatattatatgggcccattcggtttctaaagacttggttaactgggaggctcttgaaccggctcttagtccttcaaaatggttcgacatcggaggtacatggtccggttcaataacaatcgtaccgggaaaagtaccgattatcctctataccggtgttaaccagaacgaaactcagttgcaaaactatgcaatcccagaggaccgatcagacccatacctaaggaaatggattaaaccggacgataacccgattgcaatcccagactatacaatgaacggttcagcattccgtgacccgacaaccgcttggttctccaaagacgggcattggagaaccgtggtagggtcaaaaagaaagcgtagaggaattgcttacatctacagaagccgagatttcaagcattgggtcaaagctaagcacccggttcactctaaacagtcaaccggtatgtgggaatgtcctgatttcttcccggtttccttaaccgatttccgaaacggtttggacttggattacgtcggtccaaacaccaagcatgtgttgaaggttagcttggacattacccggtacgagtattacacgcttggtaaatacgatcttaagaaggaccggtacataccggacggtaatactcccgatggttgggagggtttaagattcgattacggtaatttctacgcttccaagacattctttgactacaaaaagaacagaagaatcttatggggttgggctaatgaatctgacaccgttgaagatgatattttgaagggttgggctggtcttcaggtgattccaagaacggtgctccttgattcaagcaagaagcaacttgtgttttggcctgttgaagagatagagtcattaagaggtaactacgtccgaatgaacaatcatgacatcaagatgggtcaacgcatagaagtcaaaggaatcactcctgctcaagccgatgtggaagtaacgttctatgttggaagtctagagaaagctgagatattcgatccgagtttcacgtggaaaccattggaattgtgtaacattaaaggctcgaatgtgagaggcggtgtaggaccttttggtctgatcacattagcgactcctgatttggaagagtacactcctgtcttctttagagtcttcaacgacactaaaactcataagcctaaagttctcatgtgctccgatgctagaccgtcgtcgttaaagcaagacacgggtttactcgcaaaagataggatgtataaaccatcgtttgctggttttgtggatgttgatatggctgatggaaggatctctctaaggagtttgattgatcattcagtagtagagagctttggagcattaggtaaaacggtgataacatcaagagtgtatccagtgaaagcagtaaaagagaatgcacatttgtatgtctttaacaatggaacacaaactgtgaccatagagagtctcaatgcttggaatatggatcgtcctctgcaaatgaatgatggagctctttaatttagctcttctctctatagtttagctataccgtcttctctctttctcactttttcttatattttcatcttcagtatagtaactgagagatactgtgaaattaggaagaaaaatgtgggagtttctgtgtttacgaacaatttggttgtgatgtccatactttatgtatcgactgttgtatctttctgtctttagtctctcaataaaaataagtttag

SEQ ID NO: 2703 - protein, 591 aa, Arabidopsis thaliana
MAISNVISVLLLLLVLINLSNQNIKGIDAFHQIYEELQSESVESVNHLHRPSFHFQPPKHWINDPNGPVYYKGLYHLFYQYNTKGAVWGNIIWAHSVSKDLVNWEALEPALSPSKWFDIGGTWSGSITIVPGKVPIILYTGVNQNETQLQNYAIPEDRSDPYLRKWIKPDDNPIAIPDYTMNGSAFRDPTTAWFSKDGHWRTVVGSKRKRRGIAYIYRSRDFKHWVKAKHPVHSKQSTGMWECPDFFPVSLTDFRNGLDLDYVGPNTKHVLKVSLDITRYEYYTLGKYDLKKDRYIPDGNTPDGWEGLRFDYGNFYASKTFFDYKKNRRILWGWANESDTVEDDILKGWAGLQVIPRTVLLDSSKKQLVFWPVEEIESLRGNYVRMNNHDIKMGQRIEVKGITPAQADVEVTFYVGSLEKAEIFDPSFTWKPLELCNIKGSNVRGGVGPFGLITLATPDLEEYTPVFFRVFNDTKTHKPKVLMCSDARPSSLKQDTGLLAKDRMYKPSFAGFVDVDMADGRISLRSLIDHSVVESFGALGKTVITSRVYPVKAVKENAHLYVFNNGTQTVTIESLNAWNMDRPLQMNDGAL

SEQ ID NO: 2704 - protein, 411 aa, Arabidopsis thaliana
MNGSAFRDPTTAWFSKDGHWRTVVGSKRKRRGIAYIYRSRDFKHWVKAKHPVHSKQSTGMWECPDFFPVSLTDFRNGLDLDYVGPNTKHVLKVSLDITRYEYYTLGKYDLKKDRYIPDGNTPDGWEGLRFDYGNFYASKTFFDYKKNRRILWGWANESDTVEDDILKGWAGLQVIPRTVLLDSSKKQLVFWPVEEIESLRGNYVRMNNHDIKMGQRIEVKGITPAQADVEVTFYVGSLEKAEIFDPSFTWKPLELCNIKGSNVRGGVGPFGLITLATPDLEEYTPVFFRVFNDTKTHKPKVLMCSDARPSSLKQDTGLLAKDRMYKPSFAGFVDVDMADGRISLRSLIDHSVVESFGALGKTVITSRVYPVKAVKENAHLYVFNNGTQTVTIESLNAWNMDRPLQMNDGAL

SEQ ID NO: 2705 - protein, 352 aa, Arabidopsis thaliana
MWECPDFFPVSLTDFRNGLDLDYVGPNTKHVLKVSLDITRYEYYTLGKYDLKKDRYIPDGNTPDGWEGLRFDYGNFYASKTFFDYKKNRRILWGWANESDTVEDDILKGWAGLQVIPRTVLLDSSKKQLVFWPVEEIESLRGNYVRMNNHDIKMGQRIEVKGITPAQADVEVTFYVGSLEKAEIFDPSFTWKPLELCNIKGSNVRGGVGPFGLITLATPDLEEYTPVFFRVFNDTKTHKPKVLMCSDARPSSLKQDTGLLAKDRMYKPSFAGFVDVDMADGRISLRSLIDHSVVESFGALGKTVITSRVYPVKAVKENAHLYVFNNGTQTVTIESLNAWNMDRPLQMNDGAL

SEQ ID NO: 2706 - DNA, 1906 bp, Arabidopsis thaliana
atcttcttcgcaaatctcaacaatggtgtttgaagcattcgaagtcggcacagtcccattcaattccgatggttggggaccaccagatgcttccgacacttcctccaccagcgtcgcggcggcgaatctcctcccaaacgtccccttcgcttccttctcacgatccgaaaaactcggacgcgttgctgattggactcgagctctctcaaatccatcagctcgtcctcacaccggatccaaatcagatccatcagcgatcttcgatttctcagcttttgcagtagatgaaggatttggtctaacaaactcaggtggaaacgccgacgaagacgccgctttccgattagtcgacggaaaaccaccgccgcgtcctaaattcggacctaaatggagattcaatcaataccataaccgaaatcagcttcctcaacgtcgtgatgaagaagttgaagctaagaaacgtgaagctgagaaagatcgagctcgtcgtgatcgtctctacaataacaatcgtaacaatattcatcagcaacgccgtgaagccgccgcgtttaaatcatcagttgatattcaaccggaatggaatatgcttgagcagattccgttttcgactttctctaagctttcgtttacagtttctgaacctgaagatcttcttctttgtggtggacttgagtcttatgatcggagttttgatcgtattactcctaaagctgatcgtagacttgagcgtttcaagaacagaagctttaaggttactacaagtgatgatcttgtgatcagacgtcttgctaaagaagataaagctactgtttttgctactgatgctattctagctgctcttatgtgtgctcctagatcggtttattcatgggatcttgtgattcaacgtgttgggaataagcttttctttgataagagagatgggtcaccgcttgatttgttatctgttcatgagacttctcaagagcctttgcctgagggtaaagatgatattaactctgctcattctctaggtctggaggctgcttatattaatcagaattttgctcagcaggttttggttaagaatgggaaaagggaaacttttgatgagccaattcctaatgttaatgaaggtgaagagaatgcttctattgcttataggtataggagatggaagcttgatgatagtatgtatctagttgctaggtgtgagttacagagcactgttgatttgaataaccagagatcgtttttaactttgaatgctcttaacgagtttgatcctaagtactctggtgttgattggagacagaagcttgagactcagagaggtgcggttttagctaatgagttgaagaacaatggtaataagttagctaaatggactgcgcaggctctcttggctaatgcggatatgatgaagattgggtttgtttcgagggttcatcctcgtgatcattttaaccatgttatattatcggttttggggtataagccgaaagatttcgctgggcagatcaatctgaacactaacaatatgtggggaattgtgaagtcgattgttgatctgtgtatgaagttaagtgaaggaaagtatgttctagtgaaggatccatcgaagcctcaagttaggatttacgaagttccggctgatgcatttgacaatgattatgtggaggagccactccctgaagatgaacaggttcagccacctgaggagaacactgatgcaggagcagagactaatggggtttcctctactaatgtagctgtagaggataagaaatccgaagttgaagcctgattttgatgatatgggtatatttcaagtcgtgttgttttgagttacttttaaaaaatgttcgaaagcttgttcactttttcatagactatttatgttccaaaatgttggttcatgcct

SEQ ID NO: 2707 - protein, 595 aa, Arabidopsis thaliana
SSSQISTMVFEAFEVGTVPFNSDGWGPPDASDTSSTSVAAANLLPNVPFASFSRSEKLGRVADWTRALSNPSARPHTGSKSDPSAIFDFSAFAVDEGFGLTNSGGNADEDAAFRLVDGKPPPRPKFGPKWRFNQYHNRNQLPQRRDEEVEAKKREAEKDRARRDRLYNNNRNNIHQQRREAAAFKSSVDIQPEWNMLEQIPFSTFSKLSFTVSEPEDLLLCGGLESYDRSFDRITPKADRRLERFKNRSFKVTTSDDLVIRRLAKEDKATVFATDAILAALMCAPRSVYSWDLVIQRVGNKLFFDKRDGSPLDLLSVHETSQEPLPEGKDDINSAHSLGLEAAYINQNFAQQVLVKNGKRETFDEPIPNVNEGEENASIAYRYRRWKLDDSMYLVARCELQSTVDLNNQRSFLTLNALNEFDPKYSGVDWRQKLETQRGAVLANELKNNGNKLAKWTAQALLANADMMKIGFVSRVHPRDHFNHVILSVLGYKPKDFAGQINLNTNNMWGIVKSIVDLCMKLSEGKYVLVKDPSKPQVRIYEVPADAFDNDYVEEPLPEDEQVQPPEENTDAGAETNGVSSTNVAVEDKKSEVEA

SEQ ID NO: 2708 - protein, 588 aa, Arabidopsis thaliana
MVFEAFEVGTVPFNSDGWGPPDASDTSSTSVAAANLLPNVPFASFSRSEKLGRVADWTRALSNPSARPHTGSKSDPSAIFDFSAFAVDEGFGLTNSGGNADEDAAFRLVDGKPPPRPKFGPKWRFNQYHNRNQLPQRRDEEVEAKKREAEKDRARRDRLYNNNRNNIHQQRREAAAFKSSVDIQPEWNMLEQIPFSTFSKLSFTVSEPEDLLLCGGLESYDRSFDRITPKADRRLERFKNRSFKVTTSDDLVIRRLAKEDKATVFATDAILAALMCAPRSVYSWDLVIQRVGNKLFFDKRDGSPLDLLSVHETSQEPLPEGKDDINSAHSLGLEAAYINQNFAQQVLVKNGKRETFDEPIPNVNEGEENASIAYRYRRWKLDDSMYLVARCELQSTVDLNNQRSFLTLNALNEFDPKYSGVDWRQKLETQRGAVLANELKNNGNKLAKWTAQALLANADMMKIGFVSRVHPRDHFNHVILSVLGYKPKDFAGQINLNTNNMWGIVKSIVDLCMKLSEGKYVLVKDPSKPQVRIYEVPADAFDNDYVEEPLPEDEQVQPPEENTDAGAETNGVSSTNVAVEDKKSEVEA

SEQ ID NO: 2709 - protein, 400 aa, Arabidopsis thaliana
MLEQIPFSTFSKLSFTVSEPEDLLLCGGLESYDRSFDRITPKADRRLERFKNRSFKVTTSDDLVIRRLAKEDKATVFATDAILAALMCAPRSVYSWDLVIQRVGNKLFFDKRDGSPLDLLSVHETSQEPLPEGKDDINSAHSLGLEAAYINQNFAQQVLVKNGKRETFDEPIPNVNEGEENASIAYRYRRWKLDDSMYLVARCELQSTVDLNNQRSFLTLNALNEFDPKYSGVDWRQKLETQRGAVLANELKNNGNKLAKWTAQALLANADMMKIGFVSRVHPRDHFNHVILSVLGYKPKDFAGQINLNTNNMWGIVKSIVDLCMKLSEGKYVLVKDPSKPQVRIYEVPADAFDNDYVEEPLPEDEQVQPPEENTDAGAETNGVSSTNVAVEDKKSEVEA

SEQ ID NO: 2710 - DNA, 1339 bp, Arabidopsis thaliana
gtctctttagcccccactggttcgtctctttcttcgatttctctttctatctggtttccattttcgtctcgttggtgttctggtgggtttggtttgtctctgttcttctatttgtggcgttatccatcggttcaattgtcatcttcatcgtttccgtcgtgttatttggtgtttctcgtttgggtctttcgaacatctttcattcttctctttttggtgttgctccccacgaacaggtagattgatgaaaagcaaccatggatgacctacatggaagcaatgctcgaatgcacattagagaagctcaagatccaatgcatgtgcaatttgaacatcatgctttgcatcacatccacaatggaagcggtatggttgatgaccaggctgatgatggcaatgctggtgggatgagtgagggtgtggaaacagacattccttctcaccctggaaatgtaactgacaatcgtggtgaagtggtcgaccgtggtagtgaacaaggagatcagttaacattgtcttttcagggccaagtctacgtttttgacagtgtcttgcctgagaaggttcaagctgtgcttctattattgggtggtcgtgaattacctcaggcagcccctcctggcctaggatcacctcatcagaacaacagagtatcgagtttacctggtactcctcaaaggtttagtattccgcagcgattagcttctttggtcagatttcgagagaaacggaaaggaaggaattttgataagaagattcggtatacagtccgcaaggaggtagctttgaggatgcaacgcaataaaggtcagttcacatctgccaagtcaaacaatgatgaagctgcatctgctggatctagctgggggtcgaatcaaacctgggccatagaaagtagtgaggctcagcatcaagagatctcatgtcggcactgtggaattggcgagaagtcaactccaatgatgcgacgtggacctgccgggccaagaacactttgcaatgcatgtggacttatgtgggcaaacaagggtgcttttagggacttatccaaagcctctcctcaaacagcccagaatcttcctttaaataagaatgaagatgcaaatcttgagactgatcatcaaataatgataacagtggccaatgacataagcaactcacagtgaggacatgttggctcttgccattacaagcaagagaaagatcccaacagagtttgaatcgcctcaggttctgtagctttatcattccctttgaaagaatctgactcgatttaggttatcaggatttgatctatgacaatgtaatctgagtgataatgatctgcaatgttttgctt

SEQ ID NO: 2711 - protein, 302 aa, Arabidopsis thaliana
MDDLHGSNARMHIREAQDPMHVQFEHHALHHIHNGSGMVDDQADDGNAGGMSEGVETDIPSHPGNVTDNRGEVVDRGSEQGDQLTLSFQGQVYVFDSVLPEKVQAVLLLLGGRELPQAAPPGLGSPHQNNRVSSLPGTPQRFSIPQRLASLVRFREKRKGRNFDKKIRYTVRKEVALRMQRNKGQFTSAKSNNDEAASAGSSWGSNQTWAIESSEAQHQEISCRHCGIGEKSTPMMRRGPAGPRTLCNACGLMWANKGAFRDLSKASPQTAQNLPLNKNEDANLETDHQIMITVANDISNSQ

SEQ ID NO: 2712 - protein, 292 aa, Arabidopsis thaliana
MHIREAQDPMHVQFEHHALHHIHNGSGMVDDQADDGNAGGMSEGVETDIPSHPGNVTDNRGEVVDRGSEQGDQLTLSFQGQVYVFDSVLPEKVQAVLLLLGGRELPQAAPPGLGSPHQNNRVSSLPGTPQRFSIPQRLASLVRFREKRKGRNFDKKIRYTVRKEVALRMQRNKGQFTSAKSNNDEAASAGSSWGSNQTWAIESSEAQHQEISCRHCGIGEKSTPMMRRGPAGPRTLCNACGLMWANKGAFRDLSKASPQTAQNLPLNKNEDANLETDHQIMITVANDISNSQ

SEQ ID NO: 2713 - protein, 283 aa, Arabidopsis thaliana
MHVQFEHHALHHIHNGSGMVDDQADDGNAGGMSEGVETDIPSHPGNVTDNRGEVVDRGSEQGDQLTLSFQGQVYVFDSVLPEKVQAVLLLLGGRELPQAAPPGLGSPHQNNRVSSLPGTPQRFSIPQRLASLVRFREKRKGRNFDKKIRYTVRKEVALRMQRNKGQFTSAKSNNDEAASAGSSWGSNQTWAIESSEAQHQEISCRHCGIGEKSTPMMRRGPAGPRTLCNACGLMWANKGAFRDLSKASPQTAQNLPLNKNEDANLETDHQIMITVANDISNSQ

SEQ ID NO: 2714 - DNA, 4028 bp, Arabidopsis thaliana
gtcggtgatttcctccacttccttttctggcagctagaagacgaaacctcactcaaattctgatctctttgtataattcgatcgagttattcgtatgattcgtatagatcggtgactcagatggcgaactacttggctcagttccagacgattaagaattcctgcgatcgtctcgtcgccgccgtggaagatgtgtgtgatctatggcctacagtgaaaggtttatttgaagaacatcagccattaaaaagagcattcttgactaacaagactcgaaatccggtttttgttgagaacttgccggttgaattcatattaactacagacgcgaggcttcgtagtcgattcccgcaggagcagtatttgttctggtttcgagaaccatacgcaactatagttcttgtcacatgtgaggatcttgatgagtttaaaaacattctcaaaccacgtctgaaattaattgttcagaatgatgagagggaatggtttattgtatttgtatctaaagctcatccaagtaatgatcaagcaactaaaaatgtcaagaaagtatatgcgaagcttgaagttgacttcagttcaaaaaagagagaaaggtgctgtaagctggatgtacatggccctgaaggaaatttttgggaggaccttgaattaaagattaccgagtgcatcaggaataccttggataggcgcgcacaattctacgaggatgagatacgcaagctcagtgagcagcggtttatgccaatatggaacttttgtaactttttcatcctgaaggaaagtttggctttcatatttgagatggctcatcttcatgaagatgcattacgtgaatatgatgaactagagctctgctatttggaaacagttaatatgcctgggaaacagagggattttggaggattcgacggtgaagatgaccaagctgtgctgctgaaaccaggaagcaaaccattgacacagattgtgcaagatgattcttttagagaattcgagtttagacagtatctctttgcctgtcaatctaggctgttgttcaagttgaatcgtccatttgaagttgcatctaggggatattcttttgttattagttttgcaaaggccttgacccttcatgagagtgtactgcccttctgtatgcgagaagtttgggtaattactgcatgtttagcgctgatcgaagcaactgcttctcatcaccatgatggcgttgttgcacctgatattgagaaggaatttttccgtcttcagggtgatctctattcactttcacgggttaagttcatgagacttggatatctgataggatatggaacagacatcgaaaagagtccactgaacagtgcttgtctcagtatgctgccttggccaaaaccggctgtctggccatctcttccacaagatgcttcctcggaggtgcttgaaaaagaaaagactattcttcaagcaacttcaaggaccaagcactttggtattcaacggaaagccttacctcttgaaccatctgtccttctacgtgtggctaacagaagaagggcttctctttcaaccggaaatattcctgaaatgtttgatgggcgcccaagttttactgaagggtttagaagcgtctccgagaacaccttcatcacttaaagtacaagcacctcccatgtcaagaacaaattcttcaccaggaaattttgagagtcccctagataggcctatgaggcttgctgaaatttttgttgcagctgagcacgctctacgacttaccatttcagatcatgatttgttgaagacattgtcatctattcaggatttcgagaataaatatcttaacctaaccaaaggtgctgccgaaaactatcaccgttcctggtggaagagacatggagtcgttctcgatggggaaattgcagctgtctgcttcaagcacggaaaatatgatttggctgcaaactcttatgaaaaagtttgtgccctttatgcgggtgaaggatggcaagatttactggcagaagtcttgcctaatttagcacagtgtcaaaagattcttgatgatcaagctgggtacatgtcatcttgtgttagactactttcgttggataaaggattattctcgtccaaggagcggcaagcttttcagtccgaggttgttactcttgcacacagtgaaatgaagaacccagttcccttagatgtgtcatcattgatcacattttctggaaatactggccctccacttcagttgtgtgatggagaccctgggaatctatctgttactgtgtggagtggctttcctgatgatatcacccttgattcgcttagtcttaccttggtagccaccaacaacactgacgaaggcggccaggctttaaagagttccgctgcaactgtgctaaaccccggaaggaatactatcacttttgctctgcctccacaaaaacccggttcctatgtcttgggagttgttactggccagattgggcgcttgagattcaggtctcatagcttttcgaagggtggtcctgcagatagtgacgacttcatgagttatgagaagccaaccagacctatcctgaaggtttccaaaccaagagctctggttgatcttgctgcagctgtatcttctgctctgctaataaatgaagcccagtggattggtatcatagtacgtcctattgcttactcacttaaaggcgcgatcttgcacattgatactggtccagggctaaagattgaagactcgtatggaattgagatggagagatacatggacgcagattgtgatactggtgcatcaaaagctgaggtttttgttgaagatagtcctgtctcttcaaaacgggattcagaggtgcttaatctttgcgatggtaaaatagtgttctcagattgggctagcaatgtgagttctattctttgggtccctgttcgtgccttgagtgagaagcttgctagagggtcatcatcagtcactccgctgaaacaagatattttagagggaatgagaactgtagctttgaaacttgaatttggggttcatcataaccagatatttgagagaaccatagctgcacattttaccgatccctttgatgtgaccacaagggtggcaaacaaatgcaatgatggcactttggtcttgcaggttatgttacactccctcgtcaaggcgaacttgatagttcttgatgtttggcttgatcttcaagatggatttattcatggacaaaatgatggaagaccgacttcaacgttctttccgcttgtcgtgtctccaggatctagagcagcagtcgtgttcagtatatgcctagacaagagtatgtcatcagaagggaaagatttgcagctaccagaaagcattctgaatatcaaatatggaatccatggggatagagcagctggagcacacaggccagtggatgcagatcactctgaaactgatactgaagggagagatttggtgttcaagagtgctattgttttgcagcgtccagtacttgatccttgcctcacagttggattcctcccacttccttctgatgggcttagggtcgggaaacttatcaccatgcagtggagagtggaaaggcttaaagaactcaaagaaagtgaagccgtggaacaacaacatgatgaggtgttatatgaagtcaatgcaaattcggagaattggatgatcgctggtaggaagagaggccatgtctctctctcagaggagcaaggttcaagagtagtaatctcgatactatgtgtcccgttagttgcgggttatgtccgtcctcctcaactcgggttgccaaacgtagaagaagcaaatgtaagcagcaatccatcgggtcctcacttagtatgtgtcttgcctccacttctcagttcttcctactgcttacctgtcaagtaatagaatctcactctatattttttccaagaaaacattttttctgtatttttattttgtttgcgatcaaagaaatatcagagtatgggatcatcaatgatgagagtgatttttcttttgtgacgattttatttcc

SEQ ID NO: 2715 - protein, 829 aa, Arabidopsis thaliana
MLPRRCLKKKRLFFKQLQGPSTLVFNGKPYLLNHLSFYVWLTEEGLLFQPEIFLKCLMGAQVLLKGLEASPRTPSSLKVQAPPMSRTNSSPGNFESPLDRPMRLAEIFVAAEHALRLTISDHDLLKTLSSIQDFENKYLNLTKGAAENYHRSWWKRHGVVLDGEIAAVCFKHGKYDLAANSYEKVCALYAGEGWQDLLAEVLPNLAQCQKILDDQAGYMSSCVRLLSLDKGLFSSKERQAFQSEVVTLAHSEMKNPVPLDVSSLITFSGNTGPPLQLCDGDPGNLSVTVWSGFPDDITLDSLSLTLVATNNTDEGGQALKSSAATVLNPGRNTITFALPPQKPGSYVLGVVTGQIGRLRFRSHSFSKGGPADSDDFMSYEKPTRPILKVSKPRALVDLAAAVSSALLINEAQWIGIIVRPIAYSLKGAILHIDTGPGLKIEDSYGIEMERYMDADCDTGASKAEVFVEDSPVSSKRDSEVLNLCDGKIVFSDWASNVSSILWVPVRALSEKLARGSSSVTPLKQDILEGMRTVALKLEFGVHHNQIFERTIAAHFTDPFDVTTRVANKCNDGTLVLQVMLHSLVKANLIVLDVWLDLQDGFIHGQNDGRPTSTFFPLVVSPGSRAAVVFSICLDKSMSSEGKDLQLPESILNIKYGIHGDRAAGAHRPVDADHSETDTEGRDLVFKSAIVLQRPVLDPCLTVGFLPLPSDGLRVGKLITMQWRVERLKELKESEAVEQQHDEVLYEVNANSENWMIAGRKRGHVSLSEEQGSRVVISILCVPLVAGYVRPPQLGLPNVEEANVSSNPSGPHLVCVLPPLLSSSYCLPVK

SEQ ID NO: 2716 - protein, 772 aa, Arabidopsis thaliana
MGAQVLLKGLEASPRTPSSLKVQAPPMSRTNSSPGNFESPLDRPMRLAEIFVAAEHALRLTISDHDLLKTLSSIQDFENKYLNLTKGAAENYHRSWWKRHGVVLDGEIAAVCFKHGKYDLAANSYEKVCALYAGEGWQDLLAEVLPNLAQCQKILDDQAGYMSSCVRLLSLDKGLFSSKERQAFQSEVVTLAHSEMKNPVPLDVSSLITFSGNTGPPLQLCDGDPGNLSVTVWSGFPDDITLDSLSLTLVATNNTDEGGQALKSSAATVLNPGRNTITFALPPQKPGSYVLGVVTGQIGRLRFRSHSFSKGGPADSDDFMSYEKPTRPILKVSKPRALVDLAAAVSSALLINEAQWIGIIVRPIAYSLKGAILHIDTGPGLKIEDSYGIEMERYMDADCDTGASKAEVFVEDSPVSSKRDSEVLNLCDGKIVFSDWASNVSSILWVPVRALSEKLARGSSSVTPLKQDILEGMRTVALKLEFGVHHNQIFERTIAAHFTDPFDVTTRVANKCNDGTLVLQVMLHSLVKANLIVLDVWLDLQDGFIHGQNDGRPTSTFFPLVVSPGSRAAVVFSICLDKSMSSEGKDLQLPESILNIKYGIHGDRAAGAHRPVDADHSETDTEGRDLVFKSAIVLQRPVLDPCLTVGFLPLPSDGLRVGKLITMQWRVERLKELKESEAVEQQHDEVLYEVNANSENWMIAGRKRGHVSLSEEQGSRVVISILCVPLVAGYVRPPQLGLPNVEEANVSSNPSGPHLVCVLPPLLSSSYCLPVK

SEQ ID NO: 2717 - protein, 746 aa, Arabidopsis thaliana
MSRTNSSPGNFESPLDRPMRLAEIFVAAEHALRLTISDHDLLKTLSSIQDFENKYLNLTKGAAENYHRSWWKRHGVVLDGEIAAVCFKHGKYDLAANSYEKVCALYAGEGWQDLLAEVLPNLAQCQKILDDQAGYMSSCVRLLSLDKGLFSSKERQAFQSEVVTLAHSEMKNPVPLDVSSLITFSGNTGPPLQLCDGDPGNLSVTVWSGFPDDITLDSLSLTLVATNNTDEGGQALKSSAATVLNPGRNTITFALPPQKPGSYVLGVVTGQIGRLRFRSHSFSKGGPADSDDFMSYEKPTRPILKVSKPRALVDLAAAVSSALLINEAQWIGIIVRPIAYSLKGAILHIDTGPGLKIEDSYGIEMERYMDADCDTGASKAEVFVEDSPVSSKRDSEVLNLCDGKIVFSDWASNVSSILWVPVRALSEKLARGSSSVTPLKQDILEGMRTVALKLEFGVHHNQIFERTIAAHFTDPFDVTTRVANKCNDGTLVLQVMLHSLVKANLIVLDVWLDLQDGFIHGQNDGRPTSTFFPLVVSPGSRAAVVFSICLDKSMSSEGKDLQLPESILNIKYGIHGDRAAGAHRPVDADHSETDTEGRDLVFKSAIVLQRPVLDPCLTVGFLPLPSDGLRVGKLITMQWRVERLKELKESEAVEQQHDEVLYEVNANSENWMIAGRKRGHVSLSEEQGSRVVISILCVPLVAGYVRPPQLGLPNVEEANVSSNPSGPHLVCVLPPLLSSSYCLPVK

SEQ ID NO: 2718 - DNA, 1854 bp, Arabidopsis thaliana
ggaggagccgtcaaattgatttcgccgatttgctcatctctgactctcagttgctttgctccttctcatggagaatccggcggagaaacccgacccgaatccatcaaaacccaaaatcgaatctgaagatgaaagagaagaactaggagatattaacggcgacgaagaagaagaggaagagtatgaggaagaagacgatgggaaacctcgaacgcgagaggatgcaatcgcggataggatcaaagctgagtctctgttccgtcgtatgcgagcaactccggtcgctgtgcgtgttcacgacgtgatcgtcaagggaaacgagaagactaaggatcatgtcatcgaggctgaggtggatgttgtgaggcaagccactacgttgcaggagcttctcaaagcctctaaggttgccaatttcaatctacaagcgcttgatatcttcgattcagtcaaaattacgcttgattctggtcctcctgagcttcctggtaccaccaatgttgttatcgatgttgttgagagcaaaagccctatcaccggtcaaatcggaaccttcactaaagcagaggctcggtcatcaagccttgaaggctctttgaagtacaagaacatatttgggtatggagatatctgggacgggtctcttgcttatggctgtgatcactctgcagaggtcggcttggggatgtatttgccaaggttcagagggcgtcctactccatttacgtcgcgggtttacctttctacccaagattggcttaagttttcgtcttataaagaacgagctcttggtctttccctcgggcttatcgctagcaagtatcatgagctggcctataatattgcatggcgtaacctgatagacccatcgcaaatggcatcaagatcaataaggagacagctgggtcataatttggtttctgctctgaagtacactttcaaatttgaccagagaaactcatctttgaggccaacacgaggttactctttcatctcgacttctcaaataggtggtcttgcacctgatagtcgaactctccgctttttgcgccaggaaatcgaccttcgatatgctgttccactcgggttttatcgtgctgctctgaactttggtatagctgggggaatcacatttccatggggaagcggatacaagagcagagcttcttgtgtacctgagaggttcttcttaggtggaaacatatcgcctgtgtgttctttgggaggaccatctgcattatggggattcaagactaggggattgggtcctaacgaaccaaggagggaagtacaggacgatgagagtggtgacacatatgaacgggattttgtgggaggagatgttgcggttactgcatttgcagacctttcttttgatttcccattgaaatggttcagagacagaggaatccacggacatgtgtttgcatgtgccgggaatatggcggaattatcagagaacaagtataggaacttcacagctccaaagttgttggagacattcagaagctcagttggtgcaggaatcgtggtaccaactagtctatttcgcatggagctcaactactgccacatactgaagaaacaagaacacgatcgagcaaaatctggatttttcatgacattttcaacatcatcttaatgctacttttgatgatatcttaattttggctttgcactcacagtgtcatggcggagtcttttgttttgtttccaggagctttcattgtttaggttgttgtttggaattgaaaactgtgcaaattttagagagagagattacctgatgtgcggattgttcttgggaaggagatagatcaagaaataaaaattaactaaagttgatttgttttg

SEQ ID NO: 2719 - protein, 524 aa, Arabidopsis thaliana
MENPAEKPDPNPSKPKIESEDEREELGDINGDEEEEEEYEEEDDGKPRTREDAIADRIKAESLFRRMRATPVAVRVHDVIVKGNEKTKDHVIEAEVDVVRQATTLQELLKASKVANFNLQALDIFDSVKITLDSGPPELPGTTNVVIDVVESKSPITGQIGTFTKAEARSSSLEGSLKYKNIFGYGDIWDGSLAYGCDHSAEVGLGMYLPRFRGRPTPFTSRVYLSTQDWLKFSSYKERALGLSLGLIASKYHELAYNIAWRNLIDPSQMASRSIRRQLGHNLVSALKYTFKFDQRNSSLRPTRGYSFISTSQIGGLAPDSRTLRFLRQEIDLRYAVPLGFYRAALNFGIAGGITFPWGSGYKSRASCVPERFFLGGNISPVCSLGGPSALWGFKTRGLGPNEPRREVQDDESGDTYERDFVGGDVAVTAFADLSFDFPLKWFRDRGIHGHVFACAGNMAELSENKYRNFTAPKLLETFRSSVGAGIVVPTSLFRMELNYCHILKKQEHDRAKSGFFMTFSTSS

SEQ ID NO: 2720 - protein, 458 aa, Arabidopsis thaliana
MRATPVAVRVHDVIVKGNEKTKDHVIEAEVDVVRQATTLQELLKASKVANFNLQALDIFDSVKITLDSGPPELPGTTNVVIDVVESKSPITGQIGTFTKAEARSSSLEGSLKYKNIFGYGDIWDGSLAYGCDHSAEVGLGMYLPRFRGRPTPFTSRVYLSTQDWLKFSSYKERALGLSLGLIASKYHELAYNIAWRNLIDPSQMASRSIRRQLGHNLVSALKYTFKFDQRNSSLRPTRGYSFISTSQIGGLAPDSRTLRFLRQEIDLRYAVPLGFYRAALNFGIAGGITFPWGSGYKSRASCVPERFFLGGNISPVCSLGGPSALWGFKTRGLGPNEPRREVQDDESGDTYERDFVGGDVAVTAFADLSFDFPLKWFRDRGIHGHVFACAGNMAELSENKYRNFTAPKLLETFRSSVGAGIVVPTSLFRMELNYCHILKKQEHDRAKSGFFMTFSTSS

SEQ ID NO: 2721 - protein, 318 aa, Arabidopsis thaliana
MYLPRFRGRPTPFTSRVYLSTQDWLKFSSYKERALGLSLGLIASKYHELAYNIAWRNLIDPSQMASRSIRRQLGHNLVSALKYTFKFDQRNSSLRPTRGYSFISTSQIGGLAPDSRTLRFLRQEIDLRYAVPLGFYRAALNFGIAGGITFPWGSGYKSRASCVPERFFLGGNISPVCSLGGPSALWGFKTRGLGPNEPRREVQDDESGDTYERDFVGGDVAVTAFADLSFDFPLKWFRDRGIHGHVFACAGNMAELSENKYRNFTAPKLLETFRSSVGAGIVVPTSLFRMELNYCHILKKQEHDRAKSGFFMTFSTSS

SEQ ID NO: 2722 - DNA, 1333 bp, Arabidopsis thaliana
ggttagtttagtttccactgagcttgctttcttccatggcgatgataaataattcttcttcttcctcacacacaatttcactttccgattttataaaattgattcttctcttcttcttaaacccatgaagagttcatgatttcttaagctcgcagcataatcgatggcgaatttgagtttgagcttgtatctaatcctccggatttacgctcttttgttgctgttcaatgtctccttcgctaaaacacttaaacgagacatgaaagctttgaatgagataaagaaattggtgggatggagattggtatactcttgggttggagatgatccttgtggcgatggagttttgcctccgtggtctggagttacttgctctaaagttggcgattatcgtgtcgtcgtcaagctagaagtgtattcaatgtcgatagttgggaatttcccaaaggctataacgaagctcttagatctcactgttttggatatgcataataacaaattaacaggtcctattcctccagaaattgggcggcttaagcggcttatcacactgaatttgaggtggaacaaacttcaacaggcactgcctcctgaaattggtggattgaagagtctaacttatctgtacctgagttttaacaatttcaaaggagaaatccccaaagaacttgcaaatctccatgagctccagtacttacatattcaggagaatcattttactgggcgaattccagcagagctgggaacattacaaaaacttcgccacttggatgctggcaacaataacttagtggggagtataagcgatctttttcgcattgaaggatgctttccagctcttagaaacctgtttttaaacaataattacttgactggaggactcccaaacaagcttgcaaatctaacaaacctggagatcttgtacttatctttcaacaaaatgactggagcaatacccgctgcacttgccagtataccaagactaactaacttgcacttggaccacaatctattcaatggaagtatacctgaagccttctacaagcatccaaacctaaaagatatgtacatagaagggaatgctttcaaatcagacgtgaaggcgattggtgcacataaggtcctcgaactttctgacacagacttccttgtttagttatgtatagcacaactttgtttcatttacagataggaatttggcagtgttaactggttatttaagattcattttctctgttaaagcgagattgtagttgatgtgttttctgaatgtaaaaggttccttatccatgtatgaaaattgaatataaagggaatctggtttgttctttcc

SEQ ID NO: 2723 - protein, 330 aa, Arabidopsis thaliana
MANLSLSLYLILRIYALLLLFNVSFAKTLKRDMKALNEIKKLVGWRLVYSWVGDDPCGDGVLPPWSGVTCSKVGDYRVVVKLEVYSMSIVGNFPKAITKLLDLTVLDMHNNKLTGPIPPEIGRLKRLITLNLRWNKLQQALPPEIGGLKSLTYLYLSFNNFKGEIPKELANLHELQYLHIQENHFTGRIPAELGTLQKLRHLDAGNNNLVGSISDLFRIEGCFPALRNLFLNNNYLTGGLPNKLANLTNLEILYLSFNKMTGAIPAALASIPRLTNLHLDHNLFNGSIPEAFYKHPNLKDMYIEGNAFKSDVKAIGAHKVLELSDTDFLV

SEQ ID NO: 2724 - protein, 298 aa, Arabidopsis thaliana
MKALNEIKKLVGWRLVYSWVGDDPCGDGVLPPWSGVTCSKVGDYRVVVKLEVYSMSIVGNFPKAITKLLDLTVLDMHNNKLTGPIPPEIGRLKRLITLNLRWNKLQQALPPEIGGLKSLTYLYLSFNNFKGEIPKELANLHELQYLHIQENHFTGRIPAELGTLQKLRHLDAGNNNLVGSISDLFRIEGCFPALRNLFLNNNYLTGGLPNKLANLTNLEILYLSFNKMTGAIPAALASIPRLTNLHLDHNLFNGSIPEAFYKHPNLKDMYIEGNAFKSDVKAIGAHKVLELSDTDFLV

SEQ ID NO: 2725 - protein, 244 aa, Arabidopsis thaliana
MSIVGNFPKAITKLLDLTVLDMHNNKLTGPIPPEIGRLKRLITLNLRWNKLQQALPPEIGGLKSLTYLYLSFNNFKGEIPKELANLHELQYLHIQENHFTGRIPAELGTLQKLRHLDAGNNNLVGSISDLFRIEGCFPALRNLFLNNNYLTGGLPNKLANLTNLEILYLSFNKMTGAIPAALASIPRLTNLHLDHNLFNGSIPEAFYKHPNLKDMYIEGNAFKSDVKAIGAHKVLELSDTDFLV

SEQ ID NO: 2726 - DNA, 1676 bp, Arabidopsis thaliana
aagaaaaacgaaatacagatgaaacaatgtccacaagtctgagaatctgatatttatctcagaaacatactcattttaatattctcatagatcggtcacagggaagaaaagaaattggaggaccaaattcggaaagcacgaggcagagcagttcttgtaaattttcgaaatggaggaaaagccggcgggcagaagagtagtgttggttgcagttccagctcaaggacatatctctccaataatgcaacttgcaaaaacacttcacttgaagggtttctcaatcacaatcgctcagacaaagttcaattactttagcccttcagatgacttcactgattttcagtttgtcaccattccagaaagcttaccagagtctgattttgaggatctcgggccaatagagtttctgcataagctcaacaaagagtgtcaggtgagcttcaaagactgtttgggtcagttgttgctgcaacaaggtaatgagatagcctgtgttgtctacgacgagttcatgtactttgctgaagctgcagccaaagagtttaagcttccaaacgtcattttcagcaccacaagtgccacggcttttgtttgccgctctgcattcgacaaactttatgcaaacagtatcctgactcccttgaaagaacccaaaggacaacaaaacgagctagtgccagagtttcatcccctgagatgcaaagactttccggtttcacattgggcatcattagaaagcatgatggagctgtataggaatacagttgacaaacggacagcttcctcggtgataatcaacacagcgagctgtctagagagctcatctctgtctcgtctgcagcaacagctacaaattccagtttatcctataggccctcttcacctggtggcatcagcttctacgagtcttcttgaagagaacaagagctgtattgaatggttgaacaaacaaaagaaaaactctgtgatattcgtaagcttgggaagcttagctttgatggaaatcaatgaggtgatagaaactgctttgggattggatagtagcaagcaacagttcttgtgggtcattcggccagggtcagtacgtggttcggaatggatagagaacttgcctaaggagtttagtaagataatttcgggtcgaggttacattgtgaaatgggctccacagaaggaagtactttctcatcctgcagtaggaggattttggagccattgcggatggaactcgacactagagagcatcggggaaggagttccaatgatttgcaagccgttttccagtgatcaaatggtgaatgcgagatacttggagtgtgtatggaaaattgggattcaagttgagggtgatctagacagaggagcggtcgagagagctgtgaggaggttaatggtggaggaagaaggggaggggatgaggaagagagctatcagtttgaaagagcaacttagagcctctgttataagtggaggttcttcacacaactcgctagaggagtttgtacactacatgaggactctatgaagacttttgtctttactaaaacaccaaaacttcaagattcctctttcaactattccaagttgtttttagagaaagtatcatatcctaaaatatctaagtgatgccaagatgtatttggataaatgaatgaacaaagccatttcattgtgtt

SEQ ID NO: 2727 - protein, 451 aa, Arabidopsis thaliana
MEEKPAGRRVVLVAVPAQGHISPIMQLAKTLHLKGFSITIAQTKFNYFSPSDDFTDFQFVTIPESLPESDFEDLGPIEFLHKLNKECQVSFKDCLGQLLLQQGNEIACVVYDEFMYFAEAAAKEFKLPNVIFSTTSATAFVCRSAFDKLYANSILTPLKEPKGQQNELVPEFHPLRCKDFPVSHWASLESMMELYRNTVDKRTASSVIINTASCLESSSLSRLQQQLQIPVYPIGPLHLVASASTSLLEENKSCIEWLNKQKKNSVIFVSLGSLALMEINEVIETALGLDSSKQQFLWVIRPGSVRGSEWIENLPKEFSKIISGRGYIVKWAPQKEVLSHPAVGGFWSHCGWNSTLESIGEGVPMICKPFSSDQMVNARYLECVWKIGIQVEGDLDRGAVERAVRRLMVEEEGEGMRKRAISLKEQLRASVISGGSSHNSLEEFVHYMRTL

SEQ ID NO: 2728 - protein, 427 aa, Arabidopsis thaliana
MQLAKTLHLKGFSITIAQTKFNYFSPSDDFTDFQFVTIPESLPESDFEDLGPIEFLHKLNKECQVSFKDCLGQLLLQQGNEIACVVYDEFMYFAEAAAKEFKLPNVIFSTTSATAFVCRSAFDKLYANSILTPLKEPKGQQNELVPEFHPLRCKDFPVSHWASLESMMELYRNTVDKRTASSVIINTASCLESSSLSRLQQQLQIPVYPIGPLHLVASASTSLLEENKSCIEWLNKQKKNSVIFVSLGSLALMEINEVIETALGLDSSKQQFLWVIRPGSVRGSEWIENLPKEFSKIISGRGYIVKWAPQKEVLSHPAVGGFWSHCGWNSTLESIGEGVPMICKPFSSDQMVNARYLECVWKIGIQVEGDLDRGAVERAVRRLMVEEEGEGMRKRAISLKEQLRASVISGGSSHNSLEEFVHYMRTL

SEQ ID NO: 2729 - protein, 337 aa, Arabidopsis thaliana
MYFAEAAAKEFKLPNVIFSTTSATAFVCRSAFDKLYANSILTPLKEPKGQQNELVPEFHPLRCKDFPVSHWASLESMMELYRNTVDKRTASSVIINTASCLESSSLSRLQQQLQIPVYPIGPLHLVASASTSLLEENKSCIEWLNKQKKNSVIFVSLGSLALMEINEVIETALGLDSSKQQFLWVIRPGSVRGSEWIENLPKEFSKIISGRGYIVKWAPQKEVLSHPAVGGFWSHCGWNSTLESIGEGVPMICKPFSSDQMVNARYLECVWKIGIQVEGDLDRGAVERAVRRLMVEEEGEGMRKRAISLKEQLRASVISGGSSHNSLEEFVHYMRTL

SEQ ID NO: 2730 - DNA, 1646 bp, Arabidopsis thaliana
agaattagacgtgttaccaagcagcaccttatttggtcatcttcctcattcgaaggttactcgcacttcctctgcacacttcttcctctccatctaacctcagtactcctacaatcctctaagaatccatagatcaactgctgggaaaagcttcgcgacaatgtcttggcctacggattctgagttaaattccataaaggaggcagtggctcagatgagtggaagagataaaggagaagttcgagtggtggtcgctccttatcgtatatgtcctttaggagctcacattgatcaccagggtggaactgtatcagctatgacgattaataaagggatccttcttggttttgttccatcgggtgatactcaggtccagttgcgctctgcacaatttgaaggagaagtatgtttcagagtagatgaaatccagcacccaataggcctagcaaacaagaatggtgcaagcacgccatctccatcgaaggaaaaaagtatctggggtacttatgccagaggagcagtttatgcgttacagagcagcaaaaagaatctcaaacagggcattattggttacctcagtggctcaaatggactagatagctccgggcttagctcatcagctgctgttggtgtggcatacctgctagctctagagaatgcaaacgaattgactgtatccccaacagaaaatatcgaatatgacaggcttattgagaatgggtatctgggtctgcggaatggaattttggatcaatcagctattttgctttcgaattatgggtgtctaacatacatggactgcaagactttggaccacgagcttgtacaggctcctgaactggagaaaccgttcaggatattgttagcattctcaggcttgaggcaggcgttgaccaccaacccaggatataatctgcgagtttctgagtgtcaagaggcagcaaaagttcttttgactgcatctgggaacagtgagctggaacctacgttgtgcaatgttgagcatgcggtctatgaagctcacaagcatgagctgaaaccggttttagctaaaagagcagagcattatttctcggagaacatgcgagttatcaaaggacgggaagcctgggcttcagggaatcttgaagaatttggaaagctaatttcagcatccggcttgagttccattgagaattacgaatgcggtgcggagccactgatccagctatacaagattcttctgaaggctcctggtgtatatggagctagattcagcggtgcaggtttcaggggatgttgtctagcctttgtagatgcagaaaaagctgaggcagctgcttcatatgtgaaggatgaatatgaaaaggcccaacccgagtttgctaacaatctaaatggaggaaaacctgttctcatctgtgaagcaggtgacgctgctcgtgttcttctctgatcaatcctggagtttttggtttcttccccacttaaactcgatttttttgtcccttatatctctcacgcttattgattctttgcttgtttatctctttttgatcctgtctgagaaattctctggtctctttggtcggagtttcatcattgcttgatacattttttttgctacaaatacataatgtaaatcattctctaccgttttcgagttg

SEQ ID NO: 2731 - protein, 424 aa, Arabidopsis thaliana
MSWPTDSELNSIKEAVAQMSGRDKGEVRVVVAPYRICPLGAHIDHQGGTVSAMTINKGILLGFVPSGDTQVQLRSAQFEGEVCFRVDEIQHPIGLANKNGASTPSPSKEKSIWGTYARGAVYALQSSKKNLKQGIIGYLSGSNGLDSSGLSSSAAVGVAYLLALENANELTVSPTENIEYDRLIENGYLGLRNGILDQSAILLSNYGCLTYMDCKTLDHELVQAPELEKPFRILLAFSGLRQALTTNPGYNLRVSECQEAAKVLLTASGNSELEPTLCNVEHAVYEAHKHELKPVLAKRAEHYFSENMRVIKGREAWASGNLEEFGKLISASGLSSIENYECGAEPLIQLYKILLKAPGVYGARFSGAGFRGCCLAFVDAEKAEAAASYVKDEYEKAQPEFANNLNGGKPVLICEAGDAARVLL

SEQ ID NO: 2732 - protein, 406 aa, Arabidopsis thaliana
MSGRDKGEVRVVVAPYRICPLGAHIDHQGGTVSAMTINKGILLGFVPSGDTQVQLRSAQFEGEVCFRVDEIQHPIGLANKNGASTPSPSKEKSIWGTYARGAVYALQSSKKNLKQGIIGYLSGSNGLDSSGLSSSAAVGVAYLLALENANELTVSPTENIEYDRLIENGYLGLRNGILDQSAILLSNYGCLTYMDCKTLDHELVQAPELEKPFRILLAFSGLRQALTTNPGYNLRVSECQEAAKVLLTASGNSELEPTLCNVEHAVYEAHKHELKPVLAKRAEHYFSENMRVIKGREAWASGNLEEFGKLISASGLSSIENYECGAEPLIQLYKILLKAPGVYGARFSGAGFRGCCLAFVDAEKAEAAASYVKDEYEKAQPEFANNLNGGKPVLICEAGDAARVLL

SEQ ID NO: 2733 - protein, 372 aa, Arabidopsis thaliana
MTINKGILLGFVPSGDTQVQLRSAQFEGEVCFRVDEIQHPIGLANKNGASTPSPSKEKSIWGTYARGAVYALQSSKKNLKQGIIGYLSGSNGLDSSGLSSSAAVGVAYLLALENANELTVSPTENIEYDRLIENGYLGLRNGILDQSAILLSNYGCLTYMDCKTLDHELVQAPELEKPFRILLAFSGLRQALTTNPGYNLRVSECQEAAKVLLTASGNSELEPTLCNVEHAVYEAHKHELKPVLAKRAEHYFSENMRVIKGREAWASGNLEEFGKLISASGLSSIENYECGAEPLIQLYKILLKAPGVYGARFSGAGFRGCCLAFVDAEKAEAAASYVKDEYEKAQPEFANNLNGGKPVLICEAGDAARVLL

SEQ ID NO: 2734 - DNA, 1316 bp, Arabidopsis thaliana
aattaaggcccattctactcatcccttacgatttattaaactcaccggagattccgccaacgttttccggtagtcaatttttattcttttttagttcacttttcagttttcactaggaatttgaaaatttccggggattctttccggagattccgattttaatttcccagttcgagaaattggcggaggacattcagtatattggttaaccatggcagtgtcgacgttttcgagccccacgcctgtcttcggcatcgctgaaccaccagcatcattctcctccactgcaattggctggaagcaaccgttgagatttcggaggacgaagaagcctcgagtaatctcttgcgattattcttgcatcgaggttagagatgtctgctaccgtcctcctggaacacagttgaatatcttgaatggagttaatttttccctgcgcgagaaaagctttggcttgatctttgggaagagtgggagtggtaaaactacccttttgcagcttcttgctgggctaaacaaaccaacatcaggttccatttgtatccaaggatatggggatgatggccagccgaaggcggatcctgacttgcttcccactgaaaaggtgggcattgttttccagtttccagaaagattctttgttgcagataatgtgcttgatgagattacttttggttggccaaggcaaaaaggtagtttgcagcttaaggagcaactgacttcgaatctccagagagcatttaattgggttggattagacagcatcccacttgataaagatccccagttactaagtggaggctacaaacgtcggcttgcactagctatccaattggtgcaaactccagatttactgatactggatgagccccttgctggtcttgactggaaagcacgtgcagatgttgcaaagctcttgaagcaccttaagaaggaactgactttacttgttgtaagtcatgatctaagagagttagcagccttggttgaccaatcatggaggatggaaacaggtggtgttcttgttgcagaacgtccaccactttagttcaatgttcactattacggaaggtccataccaggtttggctcggatgttattgatttttgtttagctaaaaagtgatacaggcttttaccctggcttaggttttttattgcatgaaatataagatagccgctcatactttatggtggattttctatgtaagttcttttgtgtaggagataatgataaattatggcttattagctaagagaggcataaacattatgcctctctcttctgagattaaaacagataattgaatttgaacc

SEQ ID NO: 2735 - protein, 278 aa, Arabidopsis thaliana
MAVSTFSSPTPVFGIAEPPASFSSTAIGWKQPLRFRRTKKPRVISCDYSCIEVRDVCYRPPGTQLNILNGVNFSLREKSFGLIFGKSGSGKTTLLQLLAGLNKPTSGSICIQGYGDDGQPKADPDLLPTEKVGIVFQFPERFFVADNVLDEITFGWPRQKGSLQLKEQLTSNLQRAFNWVGLDSIPLDKDPQLLSGGYKRRLALAIQLVQTPDLLILDEPLAGLDWKARADVAKLLKHLKKELTLLVVSHDLRELAALVDQSWRMETGGVLVAERPPL

SEQ ID NO: 2736 - DNA, 1667 bp, Arabidopsis thaliana
tggagcatcactggcagcaatgaccaccactgagtttcaaagctgcttcatcttcctcctcttatgtctcttctcactcgtctgttactctctctttttcaggaaaccaagctcaagacgggacgcccatggctgtgatctgcctccgagccctccttctttgccagtcatcggccatcttcaccttatcctctcttcccttgtccacaagtcttttcaaaagatctcctccaactacggacctctcctccatctccgcatcttcaacgttcccatagtcctcgtctcctctgcgtcagtggcctacgatatcttcagggtgcatgacttgaacgtctcttctcgcggctcccctccgtttgaggagtcactgttgttcggatctaccggcttcattagtgctccctatggagattatttcaagttcatgaagaaacacctggtcacaaagctccttggaccacaggcactcgagcgctcacgcctcatccggacaaatgaactagaacggttttacataaacctgcttgataaggcgacgaagaaggagagcgttgaaattggtaaggaagcgatgaagctcagtaacaacagcatctgcaagatgatcatggggaggagttgtttagaggaaaagggtgaggcagagagagtcaggggtttgattatcgagtcgttttacttgacgaagaaatttttcttggcattcactttgcgcgggctgctcgagaagcttggaatctcgctgttcaaaaaagaaataatgggagtttcccgcagatttgatgatttgctcgaaaggtatcttagggaacatgaagagaaaccagataatgagcatcaagatacggacatgattgatgcactattggcagcttatcgagacgaaaaggccgagtataagatcactaggaaccagatcaaggcgtttttagtggatattttcattgcgggcactgacatctcggcgctaacaacgcagggaacaatggctgagatcattaacaaccctaacatatttgtgagaattagagaagaaatcgattctgttgtagggaaatcaaggctgattcaagaaacggatctaccaaagctcccttacttgcaagcggtagtcaaagaagggcttagattgcacccgcctacgcctctcatggtaagggagttccaagaagggtgtaaggtcaaaggtttctacataccagcgagcacaacccttgttgttaatggttatgctgtgatgagagatccaaatgtctgggaagaccctgaggagttcaagccggagaggtttttagcttcttcaagattaatgcaagaggacgagataagagagcaagccctcaagtacatcgctttcggtagtggaaggagaggctgcccaggagcaaatgtagcttatatctttgtaggaaccgcgattggaatgatggtgcaatgctttgactggagaatcaatggagaaaaggttgacatgaaagaggccattggaggactgaacctgaccttggctcatccccttaagtgcactcctgttgctcgattcccaaaacctttttaagttcaaattattaaaaccgatgttccatgtttgatgttggtgactggactagtgttgtaagatggttgaagtaaaataataaggaagcttgctttctgttgttctg

SEQ ID NO: 2737 - protein, 519 aa, Arabidopsis thaliana
GASLAAMTTTEFQSCFIFLLLCLFSLVCYSLFFRKPSSRRDAHGCDLPPSPPSLPVIGHLHLILSSLVHKSFQKISSNYGPLLHLRIFNVPIVLVSSASVAYDIFRVHDLNVSSRGSPPFEESLLFGSTGFISAPYGDYFKFMKKHLVTKLLGPQALERSRLIRTNELERFYINLLDKATKKESVEIGKEAMKLSNNSICKMIMGRSCLEEKGEAERVRGLIIESFYLTKKFFLAFTLRGLLEKLGISLFKKEIMGVSRRFDDLLERYLREHEEKPDNEHQDTDMIDALLAAYRDEKAEYKITRNQIKAFLVDIFIAGTDISALTTQGTMAEIINNPNIFVRIREEIDSVVGKSRLIQETDLPKLPYLQAVVKEGLRLHPPTPLMVREFQEGCKVKGFYIPASTTLVVNGYAVMRDPNVWEDPEEFKPERFLASSRLMQEDEIREQALKYIAFGSGRRGCPGANVAYIFVGTAIGMMVQCFDWRINGEKVDMKEAIGGLNLTLAHPLKCTPVARFPKPF

SEQ ID NO: 2738 - protein, 513 aa, Arabidopsis thaliana
MTTTEFQSCFIFLLLCLFSLVCYSLFFRKPSSRRDAHGCDLPPSPPSLPVIGHLHLILSSLVHKSFQKISSNYGPLLHLRIFNVPIVLVSSASVAYDIFRVHDLNVSSRGSPPFEESLLFGSTGFISAPYGDYFKFMKKHLVTKLLGPQALERSRLIRTNELERFYINLLDKATKKESVEIGKEAMKLSNNSICKMIMGRSCLEEKGEAERVRGLIIESFYLTKKFFLAFTLRGLLEKLGISLFKKEIMGVSRRFDDLLERYLREHEEKPDNEHQDTDMIDALLAAYRDEKAEYKITRNQIKAFLVDIFIAGTDISALTTQGTMAEIINNPNIFVRIREEIDSVVGKSRLIQETDLPKLPYLQAVVKEGLRLHPPTPLMVREFQEGCKVKGFYIPASTTLVVNGYAVMRDPNVWEDPEEFKPERFLASSRLMQEDEIREQALKYIAFGSGRRGCPGANVAYIFVGTAIGMMVQCFDWRINGEKVDMKEAIGGLNLTLAHPLKCTPVARFPKPF

SEQ ID NO: 2739 - protein, 377 aa, Arabidopsis thaliana
MKKHLVTKLLGPQALERSRLIRTNELERFYINLLDKATKKESVEIGKEAMKLSNNSICKMIMGRSCLEEKGEAERVRGLIIESFYLTKKFFLAFTLRGLLEKLGISLFKKEIMGVSRRFDDLLERYLREHEEKPDNEHQDTDMIDALLAAYRDEKAEYKITRNQIKAFLVDIFIAGTDISALTTQGTMAEIINNPNIFVRIREEIDSVVGKSRLIQETDLPKLPYLQAVVKEGLRLHPPTPLMVREFQEGCKVKGFYIPASTTLVVNGYAVMRDPNVWEDPEEFKPERFLASSRLMQEDEIREQALKYIAFGSGRRGCPGANVAYIFVGTAIGMMVQCFDWRINGEKVDMKEAIGGLNLTLAHPLKCTPVARFPKPF

SEQ ID NO: 2740 - DNA, 1084 bp, Arabidopsis thaliana
aaatcgtgagtttagaagcaaaaatggttgattttcttcgagaaatttgacagaactttccccagatggtgcattattgtgtgaccaagattgcttaaggaaatgggtttggtgggttgtgttggtaagtcttctcttgtatctatggagttgaggtgggcaaggaggagaaaatctgataatgctgcatcggcattgcctcgatcgatacctatatatatctctacgttgaagaaagacataaatctagaggaattgaggaatttgtattcactttgtaaccattcttgcaaccgtttgtctgagaaagacagcaacgttgaaaagattgttgacatgaaaaagctgcgtagagctatctctcgcagtgatgttattgtatctgtgttttgcaaaccacaacacgtggatgttgatgatgcggttttgtattcagaagaagaaagtttatcttcttctttgtatacttcagaatttgggagacaaaataaggatgatagttttctgggagacttgtttcagaatgcggtgcctctcactccttccaatggacagcttgttggattcggtcgtgcttattctgattatggcttgaccgcttctatccatgatctaatggttttaccttcactacaaaggatggggattggtaaactgatagtaaacagaattgtcaggctactcacaagcagagacatttacgacatagcagctctctgcttcgaggatgaaaggccattcttcaaagcatgtgggtttggagatgacaggatgggttccacaacaatgatgttcacaaagagcttggaggcataaaagcaaagcgagaatgctgatggatcttcagaaactgcaggtcaaagcaagttatattgatctctaaatgatgaccaacgagaaaggccaaagattcagagtctttcttgcatttggaattgatatctagtggtttactctcttttttccttcttatctctttccatgtaagggaaatctacttagtcccatgtttgacttttattcactagtcactctcttattcccccgtttatttatcttttgaggaaatttgcagaattgttcc

SEQ ID NO: 2741 - protein, 237 aa, Arabidopsis thaliana
MGLVGCVGKSSLVSMELRWARRRKSDNAASALPRSIPIYISTLKKDINLEELRNLYSLCNHSCNRLSEKDSNVEKIVDMKKLRRAISRSDVIVSVFCKPQHVDVDDAVLYSEEESLSSSLYTSEFGRQNKDDSFLGDLFQNAVPLTPSNGQLVGFGRAYSDYGLTASIHDLMVLPSLQRMGIGKLIVNRIVRLLTSRDIYDIAALCFEDERPFFKACGFGDDRMGSTTMMFTKSLEA

SEQ ID NO: 2742 - protein, 223 aa, Arabidopsis thaliana
MELRWARRRKSDNAASALPRSIPIYISTLKKDINLEELRNLYSLCNHSCNRLSEKDSNVEKIVDMKKLRRAISRSDVIVSVFCKPQHVDVDDAVLYSEEESLSSSLYTSEFGRQNKDDSFLGDLFQNAVPLTPSNGQLVGFGRAYSDYGLTASIHDLMVLPSLQRMGIGKLIVNRIVRLLTSRDIYDIAALCFEDERPFFKACGFGDDRMGSTTMMFTKSLEA

SEQ ID NO: 2743 - protein, 159 aa, Arabidopsis thaliana
MKKLRRAISRSDVIVSVFCKPQHVDVDDAVLYSEEESLSSSLYTSEFGRQNKDDSFLGDLFQNAVPLTPSNGQLVGFGRAYSDYGLTASIHDLMVLPSLQRMGIGKLIVNRIVRLLTSRDIYDIAALCFEDERPFFKACGFGDDRMGSTTMMFTKSLEA

SEQ ID NO: 2744 - DNA, 1334 bp, Arabidopsis thaliana
aacgaaaaagaaagaaaaatctgtgaggacgaaaactctccgtcgttccggcgagtttctccagtgatcggcaaagtctttccggcatctattgaatttctctaaaccaattagaatattatcggtcttgataaaagaaaatggttcaaagtcagtcgttaagcacattaacaatctgtggaagtgtaaaagtttcaagcttgttgatgaatcgtttaaattcagtgaaagcttcaagcttgatcggtgatcgatgtgtttcgtgtcagtttttgcgtaaatcaccgtcctttagaagccattggaagtcattaaagcaaagaaatttgttgagggttgaagctagatggccatttcaaggaggtggtgaaggtttagacccgagctctgagagaagcgagagtgctaatgaagatatattgatctttttctttcagctggatttggctactcgtgtacagtatgcaatgaatctggagcagtacgacattgcgcaacaactaagagaaaagctaactgaggtggaagaggagtcgataaggctgcaggaagggaaaagagggtcatcagctaaaagtgaagctcaagacaagggtattagcattataaggctacgtgcagatctccagaatgccattgacagtgaggattacggtttggcagctaagttacgagatgaaatctcaaagcttgaggcagaatcattagctgtatctgcgaaagccttggcttttgagaaagcagagtatgcatttcgtttgggacagaaacttagacacaaaacttttggttaccgggctgtagtgtgtggtatggatccaatttgctgtgaatcaagctcttggatggaagctgcagaggttgaaaagttacctcgtggatccaatcagccattttatcaggttctagttgatgttcggacgcacccagatctactagtggcatatgttgcagaagacaatctgttctctcctgaaaaacccgataaggaaaggtttgatcatccatacatttcttttctctactatggagctgacacagctggagatttcatccctgtcaaacaattgcgtgagaagtacaacagacctcggcatgaagttccttttgattcacaagacgaagattaagatgaaaacctgagagttcacaacgcagactcgagcacaaaccacacaaaaaaaacagaactctagcatagctcaaagcatctagcatccaacttagagatgttctgttggttttatacccatgtagatgtagttagcacttagcacgactgttcttgctatatacactgaaacaagtcaactttattcaagaatgctttgttg

SEQ ID NO: 2745 - protein, 329 aa, Arabidopsis thaliana
MVQSQSLSTLTICGSVKVSSLLMNRLNSVKASSLIGDRCVSCQFLRKSPSFRSHWKSLKQRNLLRVEARWPFQGGGEGLDPSSERSESANEDILIFFFQLDLATRVQYAMNLEQYDIAQQLREKLTEVEEESIRLQEGKRGSSAKSEAQDKGISIIRLRADLQNAIDSEDYGLAAKLRDEISKLEAESLAVSAKALAFEKAEYAFRLGQKLRHKTFGYRAVVCGMDPICCESSSWMEAAEVEKLPRGSNQPFYQVLVDVRTHPDLLVAYVAEDNLFSPEKPDKERFDHPYISFLYYGADTAGDFIPVKQLREKYNRPRHEVPFDSQDED

SEQ ID NO: 2746 - protein, 307 aa, Arabidopsis thaliana
MNRLNSVKASSLIGDRCVSCQFLRKSPSFRSHWKSLKQRNLLRVEARWPFQGGGEGLDPSSERSESANEDILIFFFQLDLATRVQYAMNLEQYDIAQQLREKLTEVEEESIRLQEGKRGSSAKSEAQDKGISIIRLRADLQNAIDSEDYGLAAKLRDEISKLEAESLAVSAKALAFEKAEYAFRLGQKLRHKTFGYRAVVCGMDPICCESSSWMEAAEVEKLPRGSNQPFYQVLVDVRTHPDLLVAYVAEDNLFSPEKPDKERFDHPYISFLYYGADTAGDFIPVKQLREKYNRPRHEVPFDSQDED

SEQ ID NO: 2747 - protein, 220 aa, Arabidopsis thaliana
MNLEQYDIAQQLREKLTEVEEESIRLQEGKRGSSAKSEAQDKGISIIRLRADLQNAIDSEDYGLAAKLRDEISKLEAESLAVSAKALAFEKAEYAFRLGQKLRHKTFGYRAVVCGMDPICCESSSWMEAAEVEKLPRGSNQPFYQVLVDVRTHPDLLVAYVAEDNLFSPEKPDKERFDHPYISFLYYGADTAGDFIPVKQLREKYNRPRHEVPFDSQDED

SEQ ID NO: 2748 - DNA, 766 bp, Arabidopsis thaliana
ctctgaaacttttgccttgcttgcttgcccagaaagtcgccgagaaagttaaaagtagaacggcggaggaaaaaaaaacgaagaggaagaggagagatggagtcgcagaagaagatagctcatgagatcggaggtatgaagaacgatgctcttcgctttggtcttcacggcgttaagagcgatatccttagatctcatcctctcgaaacggcttacgaatctgggaagcaatcacaagaagaaatgaagaggagagtgatcacgcatacttatggagctgctcttcctttgaagatggatcttgatagacaaatcctttctcggtttcagagacctcctggaccaattccttcatcaatgcttggccttgaagtctacacaggagctctagataattttggttttgaggattacttgaatgatcctcgcgaatccgagacgctgaaaccagtagactttcaccacgggatggaagttcggcttggtctctccaaaggcccagcttccccaagtttcatgtagtcaccaccatcaaagtatttccttcgtcaggtctcatatgctttttaatctgagtaagatcatgttatgaatttccaccagccctaaaagaatctacttgttgtttgatctcttctctatactgtgtctcctttgctctgaacatgataaaacatatgaactgtgtttcagttcttatctctctcagttcacaatttgttggacttgcttagttatttaaataagattatgctcctatttcatt

SEQ ID NO: 2749 - protein, 141 aa, Arabidopsis thaliana
MESQKKIAHEIGGMKNDALRFGLHGVKSDILRSHPLETAYESGKQSQEEMKRRVITHTYGAALPLKMDLDRQILSRFQRPPGPIPSSMLGLEVYTGALDNFGFEDYLNDPRESETLKPVDFHHGMEVRLGLSKGPASPSFM

SEQ ID NO: 2750 - protein, 128 aa, Arabidopsis thaliana
MKNDALRFGLHGVKSDILRSHPLETAYESGKQSQEEMKRRVITHTYGAALPLKMDLDRQILSRFQRPPGPIPSSMLGLEVYTGALDNFGFEDYLNDPRESETLKPVDFHHGMEVRLGLSKGPASPSFM

SEQ ID NO: 2751 - protein, 92 aa, Arabidopsis thaliana
MKRRVITHTYGAALPLKMDLDRQILSRFQRPPGPIPSSMLGLEVYTGALDNFGFEDYLNDPRESETLKPVDFHHGMEVRLGLSKGPASPSFM

SEQ ID NO: 2752 - DNA, 1583 bp, Arabidopsis thaliana
tccgaagttaacaatggtggaatagcgattcttcgacgacgatgatggcgaggtttgtttctgtgtcgtcttgtcagtttcatttcggcttccgtgaggtttctcctccgtcggtaacttcttatcctagacgattcgaggtctctgatcggagatttcctgcgattccgattaaatgttcttcatctgagccggaaaacggtgaggattcggcaccgtcgctgtcttcctcctcctcatcgtctacaagtgaagtatctactagtaacagttcgacatacaactggtacaccggaatcggcggtattgggatgttagacactgcgtatttgacttacctcaaggtcactggctccgatgcgttttgccctattggtggtggcacttgcggtgatgtcctcaacagcgattatgccgtcgttttcggtgttcctcttccagtgattggatttgttatgtatggcgtagtaaccgctctaagtgcagagcttggggaagggaatctaccttttggaatcagtaagagcaatgggcgtttcgcgttatttgggatcacgactgcaatggcatctgctagtgcatatttcctgtatatccttagcacaaaactctcaggatcatcatgcctgtattgtctggtgtctgctttcttatcatttagtctatttttcctctctgtaaaggatgtgaagttgcaagaaatacagcaagttgtaggattgcagatatgcttagcaatcatagtagttgcctccttgactgcttcttacagtactgctcaaccaatcccttcacgctctggtgacattgaactgccatattttagaacagagatcagttcatcatcgagcccttatgctattgctttagcaaaacatctaaactccattggagctaaaatgtatggggcattctggtgttctcactgcttagagcaaaaagagatgtttggaagagaagcggcaaaagaactgaactacgtggaatgttttccggatggatataagaaaggaactaagatactcaaggcatgtgcagatgctgcgatcgaaggattcccaacatggataataaatgataaggtcttaagcggagaaatagaactcgctgaactagcggagatgactggattcagccttgatcaggcaaatgagaccaatcaacttcagtaaattttgtattggtgcagaaaatattaaggtgaatccgtaaatgttgtttacttgatcctcctgatagctatagggtgttctatacaaattcaagtaatgaaagtgcttattgttgccataggaggttacaacttcatctgtatcacttagcctacaccagagcatcactattttataattgaaagattcataggttcttccaaagaatgttagggtactattaattcgagaatctacagccatctagtactggctttatgtaagtataatgtctaaaagtatggtctatataagagagtcacacatgtattttgtatatatatgcgtgtagagtagtagcagatatatgatgtatgggaaacttagagaattacgtttacaatatttggtgccctattgaataccttcctt

SEQ ID NO: 2753 - protein, 376 aa, Arabidopsis thaliana
MMARFVSVSSCQFHFGFREVSPPSVTSYPRRFEVSDRRFPAIPIKCSSSEPENGEDSAPSLSSSSSSSTSEVSTSNSSTYNWYTGIGGIGMLDTAYLTYLKVTGSDAFCPIGGGTCGDVLNSDYAVVFGVPLPVIGFVMYGVVTALSAELGEGNLPFGISKSNGRFALFGITTAMASASAYFLYILSTKLSGSSCLYCLVSAFLSFSLFFLSVKDVKLQEIQQVVGLQICLAIIVVASLTASYSTAQPIPSRSGDIELPYFRTEISSSSSPYAIALAKHLNSIGAKMYGAFWCSHCLEQKEMFGREAAKELNYVECFPDGYKKGTKILKACADAAIEGFPTWIINDKVLSGEIELAELAEMTGFSLDQANETNQLQ

SEQ ID NO: 2754 - protein, 375 aa, Arabidopsis thaliana
MARFVSVSSCQFHFGFREVSPPSVTSYPRRFEVSDRRFPAIPIKCSSSEPENGEDSAPSLSSSSSSSTSEVSTSNSSTYNWYTGIGGIGMLDTAYLTYLKVTGSDAFCPIGGGTCGDVLNSDYAVVFGVPLPVIGFVMYGVVTALSAELGEGNLPFGISKSNGRFALFGITTAMASASAYFLYILSTKLSGSSCLYCLVSAFLSFSLFFLSVKDVKLQEIQQVVGLQICLAIIVVASLTASYSTAQPIPSRSGDIELPYFRTEISSSSSPYAIALAKHLNSIGAKMYGAFWCSHCLEQKEMFGREAAKELNYVECFPDGYKKGTKILKACADAAIEGFPTWIINDKVLSGEIELAELAEMTGFSLDQANETNQLQ

SEQ ID NO: 2755 - protein, 286 aa, Arabidopsis thaliana
MLDTAYLTYLKVTGSDAFCPIGGGTCGDVLNSDYAVVFGVPLPVIGFVMYGVVTALSAELGEGNLPFGISKSNGRFALFGITTAMASASAYFLYILSTKLSGSSCLYCLVSAFLSFSLFFLSVKDVKLQEIQQVVGLQICLAIIVVASLTASYSTAQPIPSRSGDIELPYFRTEISSSSSPYAIALAKHLNSIGAKMYGAFWCSHCLEQKEMFGREAAKELNYVECFPDGYKKGTKILKACADAAIEGFPTWIINDKVLSGEIELAELAEMTGFSLDQANETNQLQ

SEQ ID NO: 2756 - DNA, 746 bp, Arabidopsis thaliana
gattccttcttttgttttaaacttctttttgattctttctatatatacaaatacaaaatctcctcttcttcttgaaaaagctctttacgtttctctctctctctctaattgcctgctatgatgcaagaattaggcttacaacgtttctcaaacgacgtcgttcgcttagacctcactcctccttctcaaacctcatctacttctctttccatcgacgaagaggaatcaacggaagccaagatccgacggctgatatcggagcatcctgtgatcatcttcagtagatcttcatgttgcatgtgccacgtcatgaagagactcttagcaacgatcggcgtaatccccaccgtcatcgagctcgatgatcacgaggtttcctctcttcccacggctctacaagatgaatattccggtggcgtctccgtcgttggtcctccgccggcggttttcattggccgtgagtgcgtcggaggtcttgagtcccttgtcgctcttcacttaagtggtcaacttgttcctaagcttgtccaagttggagctctttgggtatgattgtaattttcatcgtcttcttacttgtgttaaaatcaataggcttttgcagtatcaaaagaaaacaaaaattagggtttcacttcaattggtcatgaaagccaaattctgattatcatcagatgatcataattaaacacccatgtagaaaatgaattatgaataattaaagatgtgtaattagtaaattttat

SEQ ID NO: 2757 - protein, 144 aa, Arabidopsis thaliana
MMQELGLQRFSNDVVRLDLTPPSQTSSTSLSIDEEESTEAKIRRLISEHPVIIFSRSSCCMCHVMKRLLATIGVIPTVIELDDHEVSSLPTALQDEYSGGVSVVGPPPAVFIGRECVGGLESLVALHLSGQLVPKLVQVGALWV

SEQ ID NO: 2758 - protein, 143 aa, Arabidopsis thaliana
MQELGLQRFSNDVVRLDLTPPSQTSSTSLSIDEEESTEAKIRRLISEHPVIIFSRSSCCMCHVMKRLLATIGVIPTVIELDDHEVSSLPTALQDEYSGGVSVVGPPPAVFIGRECVGGLESLVALHLSGQLVPKLVQVGALWV

SEQ ID NO: 2759 - protein, 84 aa, Arabidopsis thaliana
MCHVMKRLLATIGVIPTVIELDDHEVSSLPTALQDEYSGGVSVVGPPPAVFIGRECVGGLESLVALHLSGQLVPKLVQVGALWV

SEQ ID NO: 2760 - DNA, 1361 bp, Arabidopsis thaliana
gaacttctgaagcgaaaaaaagagagaattaaagtcattcattatttggggaatggagaagaagctcctttcctacagacgccatcattaacaacatcctcttaagcttctgcgattctctccgtttgtcggaagatttcacgacgattcttcaatccttatccgaaccggagaaatcatgtcggacgctttgatcaatggattggctggagctggtggtgggatcattgctcagcttctcacttatcctcttcaaactgtaaatacgcgccaacagacggagcgggatctgaagagggagaagaggaaacttggaactatcgaacacatgtgtcaggttgtcaaacaagaaggatgggagaggttatatggtggattggcgccgtctcttgctggaacggctgcatcacagggtgtgtactactacttctaccaagtgtttcggaatcgagctgaagccacagctcttgcacggaagaagaaaggtttgggtgacggatcagttgggatgtttgcttcacttttagtggctgcctttgccggatcggttaatgttcttatgacgaatccgatttgggtgattgttacgcgtatgcagacccacagaaaaatgacaaaagatcaaacagcggcccccgagtcaccttcttctaatgcagaagctctggttgctgttgagccgcgtccatatgggacctttaatacgattcgagaggtttacgatgaagctggaataactggcttctggaaaggtgtaattccaacattgatcatggtaagtaatccgtcaatgcaatttatgttgtacgagacaatgctaaccaagctgaagaaaaagcgtgccttgaagggtagcaacaacgttaccgctttggagacatttcttctcggagctgtggcgaaactcggagctactgtcacaacttaccctctcttggttgtaaagtcgcgacttcaagccaaacaggtcacaacaggggacaaaagacaacaatacaaaggaacattggacgcgattctgaaaatgattcgatatgaagggctttacgggttttataaagggatgagcacaaagattgtgcagagcgttttagctgctgcggttctgttcatgatcaaggaagagcttgtcaagggagctaagctgttgctctcaaacgctacctctagctaagtcaagtccaagccttcttgaatgaacgctagtagttagaaataaataaaaatagattaaatttccaatagttttcttgattaattattacactattgggattgttgttcatttcctgatgattgcaattgattattgtaatttctgcaagattctttagtaatgaaatctgaataaagtttggcag

SEQ ID NO: 2761 - protein, 331 aa, Arabidopsis thaliana
MSDALINGLAGAGGGIIAQLLTYPLQTVNTRQQTERDLKREKRKLGTIEHMCQVVKQEGWERLYGGLAPSLAGTAASQGVYYYFYQVFRNRAEATALARKKKGLGDGSVGMFASLLVAAFAGSVNVLMTNPIWVIVTRMQTHRKMTKDQTAAPESPSSNAEALVAVEPRPYGTFNTIREVYDEAGITGFWKGVIPTLIMVSNPSMQFMLYETMLTKLKKKRALKGSNNVTALETFLLGAVAKLGATVTTYPLLVVKSRLQAKQVTTGDKRQQYKGTLDAILKMIRYEGLYGFYKGMSTKIVQSVLAAAVLFMIKEELVKGAKLLLSNATSS

SEQ ID NO: 2762 - protein, 281 aa, Arabidopsis thaliana
MCQVVKQEGWERLYGGLAPSLAGTAASQGVYYYFYQVFRNRAEATALARKKKGLGDGSVGMFASLLVAAFAGSVNVLMTNPIWVIVTRMQTHRKMTKDQTAAPESPSSNAEALVAVEPRPYGTFNTIREVYDEAGITGFWKGVIPTLIMVSNPSMQFMLYETMLTKLKKKRALKGSNNVTALETFLLGAVAKLGATVTTYPLLVVKSRLQAKQVTTGDKRQQYKGTLDAILKMIRYEGLYGFYKGMSTKIVQSVLAAAVLFMIKEELVKGAKLLLSNATSS

SEQ ID NO: 2763 - protein, 221 aa, Arabidopsis thaliana
MFASLLVAAFAGSVNVLMTNPIWVIVTRMQTHRKMTKDQTAAPESPSSNAEALVAVEPRPYGTFNTIREVYDEAGITGFWKGVIPTLIMVSNPSMQFMLYETMLTKLKKKRALKGSNNVTALETFLLGAVAKLGATVTTYPLLVVKSRLQAKQVTTGDKRQQYKGTLDAILKMIRYEGLYGFYKGMSTKIVQSVLAAAVLFMIKEELVKGAKLLLSNATSS

SEQ ID NO: 2764 - DNA, 1454 bp, Arabidopsis thaliana
aaaaaaaaaaaaaataaatttttagggaaaaactttttagggaaaaactttttaggtccaaagatcgagagagaagagaagattttgaattttttttgttttataaagtttcgtcttaagcgatcgattttttgtgcgaaagattgaaactttttggtaagataattgtgttgtgtggttggatcgtggaggtgggtcttctttcgaatggcgcaacaagggcagggaagcatggaccctgccgctctcgatgatatcattcgtcgtttgttggattacagaaaccctaagcctggtaccaaacaggctatgctcaacgagtctgagatccgtcagctttgcatcgtctctagagagatttttcttcaacagcctaaccttcttgagctcgaagctcctatcaagatctgcggtgatattcatggacaatactcagatctattgaggctgtttgagtatggaggcttcccacctacagctaactatttattcttaggagattacgtagacaggggcaagcagagtttggagactatttgtcttctgcttgcttacaaaatcaaataccctgagaacttttttcttctaagaggaaaccacgaatgtgcttctattaacagaatctatggattctatgatgaatgtaaacgtcgattcagtgtgagactctggaaagtgtttacagattcttttaactgtctccctgttgctgctgttatagacgataagatattatgtatgcacggtggcctttctcccgatttgaccaacgtggaacagattaagaacattaagcgacctactgatgttcctgactctggtttgctctgtgatctgctttggtctgatccaagcaaagatgtcaaaggttgggggatgaatgaccgtggagtctcttacacgtttggccctgacaaagtcgcggagtttctaataaagaatgatatggatctcatctgccgtgcccaccaggttgtagaggatggatatgagtttttcgccgatagacagcttgttacgatattttctgctcccaactactgtggtgaatttgacaatgctggtgctatgatgagtgttgatgaaagtttaatgtgctctttccaaattcttaagcctgctgatcgaaagccccggttcttatgaagtaaagagttgaaacctcgcgggaaagaagaggaaaaaggcgatacgaaagcgggagagacatttgaagctccctgagactttgtccggaggccttgcaaaggcaaaaaaacataatttacatgttatattatcttatttgaactcttgccatttcttttctcaaaacactttatgttcttatgatcttctcctctgactctatatagacagtaaaaaaagtctgcaaattttcattctttttcaacaaccaatttcctcagtgtacatactaaattgttctgtatccatacacacatatacttggg

SEQ ID NO: 2765 - protein, 312 aa, Arabidopsis thaliana
MAQQGQGSMDPAALDDIIRRLLDYRNPKPGTKQAMLNESEIRQLCIVSREIFLQQPNLLELEAPIKICGDIHGQYSDLLRLFEYGGFPPTANYLFLGDYVDRGKQSLETICLLLAYKIKYPENFFLLRGNHECASINRIYGFYDECKRRFSVRLWKVFTDSFNCLPVAAVIDDKILCMHGGLSPDLTNVEQIKNIKRPTDVPDSGLLCDLLWSDPSKDVKGWGMNDRGVSYTFGPDKVAEFLIKNDMDLICRAHQVVEDGYEFFADRQLVTIFSAPNYCGEFDNAGAMMSVDESLMCSFQILKPADRKPRFL

SEQ ID NO: 2766 - protein, 304 aa, Arabidopsis thaliana
MDPAALDDIIRRLLDYRNPKPGTKQAMLNESEIRQLCIVSREIFLQQPNLLELEAPIKICGDIHGQYSDLLRLFEYGGFPPTANYLFLGDYVDRGKQSLETICLLLAYKIKYPENFFLLRGNHECASINRIYGFYDECKRRFSVRLWKVFTDSFNCLPVAAVIDDKILCMHGGLSPDLTNVEQIKNIKRPTDVPDSGLLCDLLWSDPSKDVKGWGMNDRGVSYTFGPDKVAEFLIKNDMDLICRAHQVVEDGYEFFADRQLVTIFSAPNYCGEFDNAGAMMSVDESLMCSFQILKPADRKPRFL

SEQ ID NO: 2767 - protein, 278 aa, Arabidopsis thaliana
MLNESEIRQLCIVSREIFLQQPNLLELEAPIKICGDIHGQYSDLLRLFEYGGFPPTANYLFLGDYVDRGKQSLETICLLLAYKIKYPENFFLLRGNHECASINRIYGFYDECKRRFSVRLWKVFTDSFNCLPVAAVIDDKILCMHGGLSPDLTNVEQIKNIKRPTDVPDSGLLCDLLWSDPSKDVKGWGMNDRGVSYTFGPDKVAEFLIKNDMDLICRAHQVVEDGYEFFADRQLVTIFSAPNYCGEFDNAGAMMSVDESLMCSFQILKPADRKPRFL

SEQ ID NO: 2768 - DNA, 488 bp, Arabidopsis thaliana
gccatctacacctcaacttcttcttcttctcctctcaagaaacaataactagcaatggcggttaagagatcttcaaagctaacacaaaccgcaatgctgaagcaaatcctcaagagatgctcgagcttggccaagaatcaatgctatgatgaggatggtctgcctgtagacgtaccaaagggtcatttcccggtctatgtaggcgaaaagaggagccggtacatcgtacccatatccttcttgactcatcctaagttcaagagcttgcttcaacaggcagaagaagagttcgggttcaatcatgacatgggactcactattccttgtgaagaagttgttttccgctctttaacatccatgatcggatgagggagtgggagagaaagagaaagagagagagagagagagcttataaacatctatatatatttatatcaaatttttttgttacctttggatgaatattgaatccaaattttttttttctg

SEQ ID NO: 2769 - protein, 104 aa, Arabidopsis thaliana
MAVKRSSKLTQTAMLKQILKRCSSLAKNQCYDEDGLPVDVPKGHFPVYVGEKRSRYIVPISFLTHPKFKSLLQQAEEEFGFNHDMGLTIPCEEVVFRSLTSMIG

SEQ ID NO: 2770 - protein, 91 aa, Arabidopsis thaliana
MLKQILKRCSSLAKNQCYDEDGLPVDVPKGHFPVYVGEKRSRYIVPISFLTHPKFKSLLQQAEEEFGFNHDMGLTIPCEEVVFRSLTSMIG

SEQ ID NO: 2771 - DNA, 1342 bp, Arabidopsis thaliana
acacggcggatcaacgagagagagaaaaagagagaggctttattcttctcttccccgtttcgatctcctctttaatgcatctgcgtatctgattttgaaagatttaacggttctttaaaatgatgggtattggtcaaagaagctcttttcaatctgggaaggttactgggtaaatgttggtacattggctcaggttttataaagtttggtgatcattctcagtttcaagtttgatcaaaatgtggggctttgcgtcgaatgtcattggaagtatggggttaaagaagtcccctaaagattcagctcaagcatcctctcaatgctcagatgatgaggtttcaaatattagcagggatgaagagggattagaatgtcccatatgttgggaatctttcaacattgttgagaatgttccttatgtgttatggtgtggtcatactctttgccagaattgtgtctttggtctccaatctgctgtcttgagactctcaagccaagatattcggattccgtttttcgtctcgtgcccgtggtgtcagttgctttcgttcaggattgtttacaagggtaatctaaagttccctcggaagaatttcttccttctctggatggttgagagtctgaatggtgacaggacaagtcatggtgacaggacaagtcatggttccttggtcactgataaccagcaatcggctccgactccgaggtgtagcatgtctctgggaaaccacagcagcaacaacaatctggttgcgaggcctttattgcgtaaccagtctacagaccttttgccacatcatgaccacagtaaccaaccaagcagacaactcttctcctttcacaaatctcttgattttttcatctctttcacctccaagtttccgtttgtgatcatcttccttctgatcgtattctttgctatacctggtagcctcataattcttgccctttacttcctcctcacaatacttttcgcagttccagctggtcttgtactatattttgcttatcctattctagaaaggttggtaaatgaaataacatcatcatgagactggtgctgaactcataactcctattattggttgctcggcccattctgggtgattgtagttcactatggaacccttttttagcactttggagcctttgatggtcagaactcagaagaagtttttatgatttttggtagttctgcacatttcttataatattgtttattgcaagattgagcattgtatttgtgattttgaactcttggttttagtattgttgtgcaactgtctaaagttttggttttcagatttgtgccataatggatcacatgtgtgttatctctctt

SEQ ID NO: 2772 - protein, 270 aa, Arabidopsis thaliana
MWGFASNVIGSMGLKKSPKDSAQASSQCSDDEVSNISRDEEGLECPICWESFNIVENVPYVLWCGHTLCQNCVFGLQSAVLRLSSQDIRIPFFVSCPWCQLLSFRIVYKGNLKFPRKNFFLLWMVESLNGDRTSHGDRTSHGSLVTDNQQSAPTPRCSMSLGNHSSNNNLVARPLLRNQSTDLLPHHDHSNQPSRQLFSFHKSLDFFISFTSKFPFVIIFLLIVFFAIPGSLIILALYFLLTILFAVPAGLVLYFAYPILERLVNEITSS

SEQ ID NO: 2773 - protein, 259 aa, Arabidopsis thaliana
MGLKKSPKDSAQASSQCSDDEVSNISRDEEGLECPICWESFNIVENVPYVLWCGHTLCQNCVFGLQSAVLRLSSQDIRIPFFVSCPWCQLLSFRIVYKGNLKFPRKNFFLLWMVESLNGDRTSHGDRTSHGSLVTDNQQSAPTPRCSMSLGNHSSNNNLVARPLLRNQSTDLLPHHDHSNQPSRQLFSFHKSLDFFISFTSKFPFVIIFLLIVFFAIPGSLIILALYFLLTILFAVPAGLVLYFAYPILERLVNEITSS

SEQ ID NO: 2774 - protein, 147 aa, Arabidopsis thaliana
MVESLNGDRTSHGDRTSHGSLVTDNQQSAPTPRCSMSLGNHSSNNNLVARPLLRNQSTDLLPHHDHSNQPSRQLFSFHKSLDFFISFTSKFPFVIIFLLIVFFAIPGSLIILALYFLLTILFAVPAGLVLYFAYPILERLVNEITSS

SEQ ID NO: 2775 - DNA, 904 bp, Arabidopsis thaliana
accaaaaacaagctcaatattctcttctttcatttcactcgatcaagtttgagcttagcttttaaaaaaagagagaaacaaatcatgaggacaatggttgatttaggaaagcaaagagatcataactatcaccacatgcaaatcataaccactcctacctccgtggattgttctcgcgaattccgtcaccgacgaacacttcgttcactcatcgaatgcatgattccatactgttgcacttaccaacaacaaccataccaaaacgacaccctttcagtctcttccacttcatcctcgtcttcatcctcagaccactcttcctcctcccagagtagcagtaccgtaagtggaactttcttcggacaccgtcgtggccgagtcagcttctgccttcaagacgccgccgtgggatcttcaccgctgctcctcctcgagctagctgttcctacggcagctttagccaaagaaatggacgaggaaggtgttctacgcatagccctcgagtgtgaccgtcgtagaagcagcaatagtcgttcgtcttcgatctttgatgttcctgtttggtctatgttttgtaacggaaggaaaatgggatttgccgtgaggagaaaggtgacggagaacgacgccgttttcttgaggatgatgcagtctgtgtcagtcggagccggagtggtgccgtcggaagaggaggatcagatgttgtatttgagggctaggtttgagcgagttactggttcgagtgactcggaatcgtttcacatgatgaatccgggtggtagttatggacaagagcttagtatatttcttttgcgatcgtgaaattaagtacggtatactatgtcatgttcgtttttatttttataaatgtaaatcttaaagtaatatatgtgcaatttttacc

SEQ ID NO: 2776 - protein, 273 aa, Arabidopsis thaliana
TKNKLNILFFHFTRSSLSLAFKKREKQIMRTMVDLGKQRDHNYHHMQIITTPTSVDCSREFRHRRTLRSLIECMIPYCCTYQQQPYQNDTLSVSSTSSSSSSSDHSSSSQSSSTVSGTFFGHRRGRVSFCLQDAAVGSSPLLLLELAVPTAALAKEMDEEGVLRIALECDRRRSSNSRSSSIFDVPVWSMFCNGRKMGFAVRRKVTENDAVFLRMMQSVSVGAGVVPSEEEDQMLYLRARFERVTGSSDSESFHMMNPGGSYGQELSIFLLRS

SEQ ID NO: 2777 - protein, 245 aa, Arabidopsis thaliana
MRTMVDLGKQRDHNYHHMQIITTPTSVDCSREFRHRRTLRSLIECMIPYCCTYQQQPYQNDTLSVSSTSSSSSSSDHSSSSQSSSTVSGTFFGHRRGRVSFCLQDAAVGSSPLLLLELAVPTAALAKEMDEEGVLRIALECDRRRSSNSRSSSIFDVPVWSMFCNGRKMGFAVRRKVTENDAVFLRMMQSVSVGAGVVPSEEEDQMLYLRARFERVTGSSDSESFHMMNPGGSYGQELSIFLLRS

SEQ ID NO: 2778 - protein, 242 aa, Arabidopsis thaliana
MVDLGKQRDHNYHHMQIITTPTSVDCSREFRHRRTLRSLIECMIPYCCTYQQQPYQNDTLSVSSTSSSSSSSDHSSSSQSSSTVSGTFFGHRRGRVSFCLQDAAVGSSPLLLLELAVPTAALAKEMDEEGVLRIALECDRRRSSNSRSSSIFDVPVWSMFCNGRKMGFAVRRKVTENDAVFLRMMQSVSVGAGVVPSEEEDQMLYLRARFERVTGSSDSESFHMMNPGGSYGQELSIFLLRS

SEQ ID NO: 2779 - DNA, 1427 bp, Arabidopsis thaliana
acagtagtaggcacacacacattctcttctattttggcgaatttcgccttttgtgcattctctctctctctctcccggagtctcaggctttctcttaacttctcattctctccttggttgatgaaactggatcgatttgatagaacccagatcaaatctgttgacatttttccagatttcgatgcttttttgagattgggtttctctttcttttgatgaaacttatcactttcagcgttgcccagttttggccacaaggtgtttgttgaaattccggagagagagagaagctcgaaattgggaattctgtaaggaaaaaaaaatgagagattttccttcttgctctggtgaaaatggtgttcagattgcggactcttcgtcttcctcgagcgctggaagaaatgctcagaatttggtaatatgcatctaccgttgccgcatccgaggtaggacttgcttgatcacagtcacatggactaagaatctgatgggtcagtgtgttaccgtgggggttgatgattcttgcaaccgaagtctgtgtaaagtcgagattaagccgtggctcttcactaaacgaaaagggtccaagactctagaggcgtatgcctgtaatatcgatgttttctgggatctctcgtctgctaaatttggatccagccctgaacctttaggagggttctatgttggagttgttgttgacaaagagatggttcttcttcttggtgatatgaagaaagaagcttttaaaaagacgaatgctgcaccttcttcatctttaggtgctgtgttcattgctaagaaagagcatgtctttggcaagagaacgtttgcaactaaagctcagttttcaggtgatggcaaaactcatgatcttgtgatcgagtgtgacactagtctcagtgatccttgtctcattgttcgtgtcgatggaaagatcttgatgcaagtgcagcggcttcattggaagttccgtggcaacgataccataattgtcaatagaatctctgtggaagttctctgggatgtccacagttggttctttgggttgccatcatcaccaggaaatgcagtgtttatgttcaggacttgtcaatctgttgaaaagacctggtctttcacacaggtccccacgagctcaaaatctcaaagttttgggttttcattgattctgtatgcttggaagaacgagtagagaagaagagttttgagagttcttttgtttctcttgagtgctaactaaaggttaaaaaggaactgttgattcttgtcaatttattttatcatatgatcaattggtttcaattatagttttctcgtaaaatgttcgaaccggatcattgaagtatatatcagtttcatatgtcaaaagtttttacttgagacttgtaaagacttttgttcaaagccgattactttagccctgtatc

SEQ ID NO: 2780 - protein, 289 aa, Arabidopsis thaliana
MRDFPSCSGENGVQIADSSSSSSAGRNAQNLVICIYRCRIRGRTCLITVTWTKNLMGQCVTVGVDDSCNRSLCKVEIKPWLFTKRKGSKTLEAYACNIDVFWDLSSAKFGSSPEPLGGFYVGVVVDKEMVLLLGDMKKEAFKKTNAAPSSSLGAVFIAKKEHVFGKRTFATKAQFSGDGKTHDLVIECDTSLSDPCLIVRVDGKILMQVQRLHWKFRGNDTIIVNRISVEVLWDVHSWFFGLPSSPGNAVFMFRTCQSVEKTWSFTQVPTSSKSQSFGFSLILYAWKNE

SEQ ID NO: 2781 - protein, 234 aa, Arabidopsis thaliana
MGQCVTVGVDDSCNRSLCKVEIKPWLFTKRKGSKTLEAYACNIDVFWDLSSAKFGSSPEPLGGFYVGVVVDKEMVLLLGDMKKEAFKKTNAAPSSSLGAVFIAKKEHVFGKRTFATKAQFSGDGKTHDLVIECDTSLSDPCLIVRVDGKILMQVQRLHWKFRGNDTIIVNRISVEVLWDVHSWFFGLPSSPGNAVFMFRTCQSVEKTWSFTQVPTSSKSQSFGFSLILYAWKNE

SEQ ID NO: 2782 - protein, 161 aa, Arabidopsis thaliana
MVLLLGDMKKEAFKKTNAAPSSSLGAVFIAKKEHVFGKRTFATKAQFSGDGKTHDLVIECDTSLSDPCLIVRVDGKILMQVQRLHWKFRGNDTIIVNRISVEVLWDVHSWFFGLPSSPGNAVFMFRTCQSVEKTWSFTQVPTSSKSQSFGFSLILYAWKNE

SEQ ID NO: 2783 - DNA, 1818 bp, Arabidopsis thaliana
aagacattcaccttccttctccaatcaccaccactcccaatttctccatctcctcctcaattctctctttcctcttctcctttatcaaaaacgcagcgattcatcactccaagccagggctctcgtctacggactttgtgtaccaaagtcatcataccaaacatgcaagattcaggatcaccaccactctcttatcttactcagcgagaagccgctgagattgatgagaccttgatgggtcctcttggtttctccattgatcagctcatggaattggctggtcttagtgtggcagcttcaattgctgaggtttataaaccggaagaatatagccgggttctagctatctgtggtcctgggaacaatggtggtgatggtttggtggcggcgaggcatttgcaccactttggatataaaccgtttatttgttatcccaaacgtacagccaagccactttatactggactggtcactcagttggattcactctcagtcccttttgtttccgttgaggatctgccggatgacttgtcaaaggactttgatgttattgtagatgcaatgtttgggttttcattccatggagctcccaggcctccttttgatgacctcatccggcgattagtatcgttacagaactatgagcagactcttcaaaaacacccagtcattgtctctgtggatattccctctggttggcacgttgaagaaggagaccatgaagatggaggaattaagcctgatatgttggtatctttgactgccccaaaattatgtgcaaagagattccgtggccctcatcactttttaggtgggagatttgtaccaccttctgttgcagaaaagtataagctggagctccctagttacccagggacatctatgtgtgttagaattggtaaacctcccaaagttgacatatctgctatgagagtgaactatgtctctccagaattgcttgaggagcaggttgaaactgatcctacggtacagtttcgtaaatggtttgatgaggcagttgctgctggattgagagaaacaaatgctatggctttgtctacagcgaacaaggacaaaaaaccctcatcaagaatggttttactaaaaggatttgatgagaatggatttgtctggttcaccaactacgaaagtaaaaagggttctgatttatcagaaaatcctagtgcagcacttcttttttactgggaaattttgaaccgtcaggtaagaattgaaggaccagtggaaagaatacctgagtcagaatccgagaattactttcatagtcgtcctagaggaagtcagattggagctattgttagcaagcagagttctgttgtacctggcaggcatgttctatacgacgaatatgaagaactgacaaaacaatattcggatggaagtgtgataccaaagccgaaaaactggggaggattcagacttaaaccaaaccttttcgagttttggcagggacagccatctcgtttacatgacaggctgcagtattctctgcaagacgtaaacgggaatcctgcgtggaaaattcatagattggccccatgacttctactcactacctcttccctgtgaagaacatggctctttgtgattcatatcaaaccattacaatgagaataagattttaattatagctgtatagcgatttatcttcttaatgtgactaaattattagtgcttttccattttcagcacttaatactgtgatttattttagcttttgtgtttgataaaccaatacaaagatacaacttgtgtcttgacggataagtagttatcgcagagacgatggtttggcct

SEQ ID NO: 2784 - protein, 520 aa, Arabidopsis thaliana
KTFTFLLQSPPLPISPSPPQFSLSSSPLSKTQRFITPSQGSRLRTLCTKVIIPNMQDSGSPPLSYLTQREAAEIDETLMGPLGFSIDQLMELAGLSVAASIAEVYKPEEYSRVLAICGPGNNGGDGLVAARHLHHFGYKPFICYPKRTAKPLYTGLVTQLDSLSVPFVSVEDLPDDLSKDFDVIVDAMFGFSFHGAPRPPFDDLIRRLVSLQNYEQTLQKHPVIVSVDIPSGWHVEEGDHEDGGIKPDMLVSLTAPKLCAKRFRGPHHFLGGRFVPPSVAEKYKLELPSYPGTSMCVRIGKPPKVDISAMRVNYVSPELLEEQVETDPTVQFRKWFDEAVAAGLRETNAMALSTANKDKKPSSRMVLLKGFDENGFVWFTNYESKKGSDLSENPSAALLFYWEILNRQVRIEGPVERIPESESENYFHSRPRGSQIGAIVSKQSSVVPGRHVLYDEYEELTKQYSDGSVIPKPKNWGGFRLKPNLFEFWQGQPSRLHDRLQYSLQDVNGNPAWKIHRLAP

SEQ ID NO: 2785 - protein, 466 aa, Arabidopsis thaliana
MQDSGSPPLSYLTQREAAEIDETLMGPLGFSIDQLMELAGLSVAASIAEVYKPEEYSRVLAICGPGNNGGDGLVAARHLHHFGYKPFICYPKRTAKPLYTGLVTQLDSLSVPFVSVEDLPDDLSKDFDVIVDAMFGFSFHGAPRPPFDDLIRRLVSLQNYEQTLQKHPVIVSVDIPSGWHVEEGDHEDGGIKPDMLVSLTAPKLCAKRFRGPHHFLGGRFVPPSVAEKYKLELPSYPGTSMCVRIGKPPKVDISAMRVNYVSPELLEEQVETDPTVQFRKWFDEAVAAGLRETNAMALSTANKDKKPSSRMVLLKGFDENGFVWFTNYESKKGSDLSENPSAALLFYWEILNRQVRIEGPVERIPESESENYFHSRPRGSQIGAIVSKQSSVVPGRHVLYDEYEELTKQYSDGSVIPKPKNWGGFRLKPNLFEFWQGQPSRLHDRLQYSLQDVNGNPAWKIHRLAP

SEQ ID NO: 2786 - protein, 442 aa, Arabidopsis thaliana
MGPLGFSIDQLMELAGLSVAASIAEVYKPEEYSRVLAICGPGNNGGDGLVAARHLHHFGYKPFICYPKRTAKPLYTGLVTQLDSLSVPFVSVEDLPDDLSKDFDVIVDAMFGFSFHGAPRPPFDDLIRRLVSLQNYEQTLQKHPVIVSVDIPSGWHVEEGDHEDGGIKPDMLVSLTAPKLCAKRFRGPHHFLGGRFVPPSVAEKYKLELPSYPGTSMCVRIGKPPKVDISAMRVNYVSPELLEEQVETDPTVQFRKWFDEAVAAGLRETNAMALSTANKDKKPSSRMVLLKGFDENGFVWFTNYESKKGSDLSENPSAALLFYWEILNRQVRIEGPVERIPESESENYFHSRPRGSQIGAIVSKQSSVVPGRHVLYDEYEELTKQYSDGSVIPKPKNWGGFRLKPNLFEFWQGQPSRLHDRLQYSLQDVNGNPAWKIHRLAP

SEQ ID NO: 2787 - DNA, 803 bp, Arabidopsis thaliana
gcaaatcgtaaaccgccacaaaaccgaaaaaaacactaattgtgctttccctttagatccatttgtattttcttttggagcttttgaacaatggagtcatcacaagcaacgacgaagccaacgagaggagcaggaggaaggaaaggtggagataggaagaagagtgttagtaaatctgttaaagctggtcttcaatttcccgttggtcgtatcgctcgttacttgaagaaaggtcgttacgctctccgatacggttccggtgctccggtttacctcgccgccgttctcgaatacctagccgccgaggtacttgagctagctgggaacgcagcgagagataataagaagaacaggataaaccctaggcatctatgtttagcgataaggaacgatgaagaattggggagattgcttcatggagttactattgcaagtggtggtgttcttccaaacattaatccagttcttcttcctaagaaatcaacagcttcttcttctcaagctgagaaagcttctgctaccaaatctcctaagaaggcttgataaagaatagtatcgatgttgctttttggttatattcggatcttagatgaagaagaagaagaagaagaaacaacttttttttttttttttttagtttttagaggatttgtgtaggtatctgaaatcttcttctctttgttttggtttgtcttatgtaaaaaccatgggaagatgattatgtttcttacgcaatttgtaatggaaaataagtaatttctgggattagtaacatcatcatctgtctaattaatttctgggtc

SEQ ID NO: 2788 - protein, 150 aa, Arabidopsis thaliana
MESSQATTKPTRGAGGRKGGDRKKSVSKSVKAGLQFPVGRIARYLKKGRYALRYGSGAPVYLAAVLEYLAAEVLELAGNAARDNKKNRINPRHLCLAIRNDEELGRLLHGVTIASGGVLPNINPVLLPKKSTASSSQAEKASATKSPKKA

SEQ ID NO: 2789 - DNA, 588 bp, Arabidopsis thaliana
attcgtaacttagtatcgatcccttttctttctcttttcttgtttccctatatatatctcatatattcccaaaagaatttaaataaaatggcctctagttctatgagctcgagctcttcttggacgtctaagcaaaacaagatgttcgagagggctttagccgtttacgataaagacactcccgaccgttggcaaaacgtggctaaagcagttggaagtaaatctgcagaggaagttaaacgtcactacgacatcctcgttgaagatctcatgaacatcgaacaagacttagtacctttgcctaaatacaaaaccgtcgatgttggaagtaaatctagaggcatcgatgattttgatttgaggttaatgaagaatatgagaatccagtgaagttgttacatgatgtgaagattgctatatgtctaaggattcaaagggatatgttttcttctttcttatactgatgagtgtatcattcccttttcattgtgtttcttatttgctctgtttaatcttatttcacaacaaatcatctagctattttggttttgtttatttataattctaatctatttttgtcaaattctc

SEQ ID NO: 2790 - protein, 129 aa, Arabidopsis thaliana
IRNLVSIPFLSLFLFPYIYLIYSQKNLNKMASSSMSSSSSWTSKQNKMFERALAVYDKDTPDRWQNVAKAVGSKSAEEVKRHYDILVEDLMNIEQDLVPLPKYKTVDVGSKSRGIDDFDLRLMKNMRIQ

SEQ ID NO: 2791 - protein, 100 aa, Arabidopsis thaliana
MASSSMSSSSSWTSKQNKMFERALAVYDKDTPDRWQNVAKAVGSKSAEEVKRHYDILVEDLMNIEQDLVPLPKYKTVDVGSKSRGIDDFDLRLMKNMRIQ

SEQ ID NO: 2792 - protein, 95 aa, Arabidopsis thaliana
MSSSSSWTSKQNKMFERALAVYDKDTPDRWQNVAKAVGSKSAEEVKRHYDILVEDLMNIEQDLVPLPKYKTVDVGSKSRGIDDFDLRLMKNMRIQ

SEQ ID NO: 2793 - DNA, 1425 bp, Arabidopsis thaliana
cattaaattttctttcttcttcaaaagttcgaaacttttttttttccggcaatggagggactagttccggtacagagacttccaattaaagtggcttcaccttctctgtatcggtgtaacaattctgtctcaatcagacgttcaatttcaggttttgccatggacaggaagataaactttagggctccgtcgcaattctcgatccgagctcaacagtcggatttgaaggaaagcttagctgtgtcttcttcatcagtagaggataaaggaaatgttcttagaatcaaggaatgggaagtagagatgtatcaggaggaattagctattagtcaaggtattaggataaggagaaaaccaccaagtaaggctcctttgggatactctggaccatttgagttgagattgcataacaatgatgctgattctcctcgtaatatcttggaggagatcacatggtacaaagacgtagaagtttcccggatgaaggagctaaatccgcttgacgtgctgaagaaagctgtagaggatgctcctcctactagggattttgttggggctcttaggatggctcataaaagaactggcttccctggcttgatagctgaggttaagaaggcttctccaagtagaggaatcttaaaagagaattttgacccggtcgagattgctcaagcttatgaaaaaggcggagcagcatgcctcagcgttttgacagaccagaagtatttccagggaggctttgaaaacttggaagcaataaggagcgctggtgtgaagtgtccactattatgcaaagagtttgttgtagatccatggcagatctactatgctcggactaaaggcgcagatgcagtactgcttattgctgctgtattggctgacctagaaataaccttcttgcttaagatttgcaagaagcttagcttggctgcccttgttgaggtacatgatgagagagagatgggtcgtgtacttggaatagaaggaatcgagcttgttggcatcaataaccgaagtcttgaaacatttgaagtggacatcagtaatacaaagaagcttcttgctcttgaaggagagcatggtagacaaatccgtgagagagacatgattgtggttggcgaatctggtctgtttacaccagatgacattgcctatgtacaagcagccggagtcaaagcagttttggttggagaatccattgtgaagcagaacgaccctgagaaaggaatagctggactttttggcaggaacatttctcatacttagagaccatatcataatacatctccaaatacgtttcctagtacatttgttttgtatcttgctctgtgagtattgaggaaagactagaaaggtttgttggttctgatgtttaagacattttcaaaaaaccatcgaataaaatgaatcgaaatcgatttacag

SEQ ID NO: 2794 - protein, 404 aa, Arabidopsis thaliana
MEGLVPVQRLPIKVASPSLYRCNNSVSIRRSISGFAMDRKINFRAPSQFSIRAQQSDLKESLAVSSSSVEDKGNVLRIKEWEVEMYQEELAISQGIRIRRKPPSKAPLGYSGPFELRLHNNDADSPRNILEEITWYKDVEVSRMKELNPLDVLKKAVEDAPPTRDFVGALRMAHKRTGFPGLIAEVKKASPSRGILKENFDPVEIAQAYEKGGAACLSVLTDQKYFQGGFENLEAIRSAGVKCPLLCKEFVVDPWQIYYARTKGADAVLLIAAVLADLEITFLLKICKKLSLAALVEVHDEREMGRVLGIEGIELVGINNRSLETFEVDISNTKKLLALEGEHGRQIRERDMIVVGESGLFTPDDIAYVQAAGVKAVLVGESIVKQNDPEKGIAGLFGRNISHT

SEQ ID NO: 2795 - protein, 368 aa, Arabidopsis thaliana
MDRKINFRAPSQFSIRAQQSDLKESLAVSSSSVEDKGNVLRIKEWEVEMYQEELAISQGIRIRRKPPSKAPLGYSGPFELRLHNNDADSPRNILEEITWYKDVEVSRMKELNPLDVLKKAVEDAPPTRDFVGALRMAHKRTGFPGLIAEVKKASPSRGILKENFDPVEIAQAYEKGGAACLSVLTDQKYFQGGFENLEAIRSAGVKCPLLCKEFVVDPWQIYYARTKGADAVLLIAAVLADLEITFLLKICKKLSLAALVEVHDEREMGRVLGIEGIELVGINNRSLETFEVDISNTKKLLALEGEHGRQIRERDMIVVGESGLFTPDDIAYVQAAGVKAVLVGESIVKQNDPEKGIAGLFGRNISHT

SEQ ID NO: 2796 - protein, 320 aa, Arabidopsis thaliana
MYQEELAISQGIRIRRKPPSKAPLGYSGPFELRLHNNDADSPRNILEEITWYKDVEVSRMKELNPLDVLKKAVEDAPPTRDFVGALRMAHKRTGFPGLIAEVKKASPSRGILKENFDPVEIAQAYEKGGAACLSVLTDQKYFQGGFENLEAIRSAGVKCPLLCKEFVVDPWQIYYARTKGADAVLLIAAVLADLEITFLLKICKKLSLAALVEVHDEREMGRVLGIEGIELVGINNRSLETFEVDISNTKKLLALEGEHGRQIRERDMIVVGESGLFTPDDIAYVQAAGVKAVLVGESIVKQNDPEKGIAGLFGRNISHT

SEQ ID NO: 2797 - DNA, 765 bp, Arabidopsis thaliana
atttctcattcacttttcatttcaaaagtaaaacaagacaaacaaaaaatacacttaaccatttatttttctctcatgaagaataatactcaacctcaatcatctttcaagaaactttgccggaaactatcaccaaagagggaagattcagccggagagatacaacaacataacagtagcaatggtgaggacaagaacagagagttagaggctgttttttcttacatggatgcaaacagagacggtagaatctcaccagaagagcttcaaaagagtttcatgacattgggagaacaattgtctgatgaagaagccgtagctgctgttagattgtctgatacggacggagatgggatgttggattttgaggaattttctcagttaatcaaagtagatgacgaagaagagaagaagatggagctcaagggagcgtttagactgtatattgcagaaggtgaagattgtattacaccaagaagcttgaagatgatgctaaagaagctaggagaatcaagaaccactgatgattgtagagttatgattagtgcttttgatctcaatgctgatggagttttaagctttgatgagtttgctcttatgatgcgctaagcctccattgttgttgttgttgttgttgttgttgttcttttatttaatctcttattgtatataatttaatagtttgtgacccaataaatacgattgttatttgattaaggatccatatgtgaaactttgttatattagagaagatgtttttttaac

SEQ ID NO: 2798 - protein, 202 aa, Arabidopsis thaliana
ISHSLFISKVKQDKQKIHLTIYFSLMKNNTQPQSSFKKLCRKLSPKREDSAGEIQQHNSSNGEDKNRELEAVFSYMDANRDGRISPEELQKSFMTLGEQLSDEEAVAAVRLSDTDGDGMLDFEEFSQLIKVDDEEEKKMELKGAFRLYIAEGEDCITPRSLKMMLKKLGESRTTDDCRVMISAFDLNADGVLSFDEFALMMR

SEQ ID NO: 2799 - protein, 177 aa, Arabidopsis thaliana
MKNNTQPQSSFKKLCRKLSPKREDSAGEIQQHNSSNGEDKNRELEAVFSYMDANRDGRISPEELQKSFMTLGEQLSDEEAVAAVRLSDTDGDGMLDFEEFSQLIKVDDEEEKKMELKGAFRLYIAEGEDCITPRSLKMMLKKLGESRTTDDCRVMISAFDLNADGVLSFDEFALMMR

SEQ ID NO: 2800 - protein, 127 aa, Arabidopsis thaliana
MDANRDGRISPEELQKSFMTLGEQLSDEEAVAAVRLSDTDGDGMLDFEEFSQLIKVDDEEEKKMELKGAFRLYIAEGEDCITPRSLKMMLKKLGESRTTDDCRVMISAFDLNADGVLSFDEFALMMR

SEQ ID NO: 2801 - DNA, 1432 bp, Arabidopsis thaliana
aaaccattcacaatcagacaatgacatctctccatacgttactcttctcttctcttcttttcttcatcgtctttccaaccttcacgttttcctccaccttattgtttcagagtttcaattgggagtcatggaagaaagaaggaggattctacaattctctccacaactccattgacgacatagccaacgctggaatcactcatctttggcttcctcctccttctcaatccgttgctcctgaaggttacttaccgggaaagctatacgatctaaacagctccaaatacggttcagaggcggaactgaaatcgttaatcaaagcgttgaatcaaaaaggaataaaagctttggctgatatagtgattaaccacagaacagctgagaggaaagacgataaatgtggatactgttatttcgaaggtgggacttccgatgatcgtcttgattgggatccttcctttgtctgccgcaatgaccctaaatttcccggtaccggaaacctcgacaccggaggagattttgatggagcgcccgacatcgaccaccttaaccctagagttcagaaagagttgtccgaatggatgaattggcttaaaactgaaatcggattccatggttggagatttgattatgttcgaggttatgcatcttccatcaccaaattatacgttcagaatacatcaccggattttgcggtgggtgagaaatgggacgatatgaagtacggaggagacgggaaactagactatgatcagaacgagcatcggtcgggtctcaaacagtggatcgaggaagcgggtggtggtgtgttgacagcttttgatttcaccaccaaagggatcttacagtctgctgtcaaaggtgagctttggagactaaaggactcgcagggaaaaccgcctggtatgataggaatcatgcccggaaacgctgtcacattcatagataaccatgatacattcagaacgtgggttttcccttctgataaagtcttgcttggatacgtttatatacttactcatccaggaactccttgcattttttataatcattacatagaatggggactaaaagagagcatctcaaagctggtggctatcaggaacaaaaatgggattggtagcacaagctctgtaacgataaaagcggcagaggcggatctctacttggctatgattgatgataaagttatcatgaagattggaccaaagcaagatgtgggaacacttgttccttctaattttgctttagcttattcaggccttgactttgctgtctgggagaagaagtaacgcataactcgaatcataagaaaagtaatcgaatgtatcttcttcctttttaataaaacattttggcagtatctaaagatatgtataatgaaatataaaatgataaagaatacctaaataaaaagagcactagtggtgct

SEQ ID NO: 2802 - protein, 429 aa, Arabidopsis thaliana
TIHNQTMTSLHTLLFSSLLFFIVFPTFTFSSTLLFQSFNWESWKKEGGFYNSLHNSIDDIANAGITHLWLPPPSQSVAPEGYLPGKLYDLNSSKYGSEAELKSLIKALNQKGIKALADIVINHRTAERKDDKCGYCYFEGGTSDDRLDWDPSFVCRNDPKFPGTGNLDTGGDFDGAPDIDHLNPRVQKELSEWMNWLKTEIGFHGWRFDYVRGYASSITKLYVQNTSPDFAVGEKWDDMKYGGDGKLDYDQNEHRSGLKQWIEEAGGGVLTAFDFTTKGILQSAVKGELWRLKDSQGKPPGMIGIMPGNAVTFIDNHDTFRTWVFPSDKVLLGYVYILTHPGTPCIFYNHYIEWGLKESISKLVAIRNKNGIGSTSSVTIKAAEADLYLAMIDDKVIMKIGPKQDVGTLVPSNFALAYSGLDFAVWEKK

SEQ ID NO: 2803 - protein, 423 aa, Arabidopsis thaliana
MTSLHTLLFSSLLFFIVFPTFTFSSTLLFQSFNWESWKKEGGFYNSLHNSIDDIANAGITHLWLPPPSQSVAPEGYLPGKLYDLNSSKYGSEAELKSLIKALNQKGIKALADIVINHRTAERKDDKCGYCYFEGGTSDDRLDWDPSFVCRNDPKFPGTGNLDTGGDFDGAPDIDHLNPRVQKELSEWMNWLKTEIGFHGWRFDYVRGYASSITKLYVQNTSPDFAVGEKWDDMKYGGDGKLDYDQNEHRSGLKQWIEEAGGGVLTAFDFTTKGILQSAVKGELWRLKDSQGKPPGMIGIMPGNAVTFIDNHDTFRTWVFPSDKVLLGYVYILTHPGTPCIFYNHYIEWGLKESISKLVAIRNKNGIGSTSSVTIKAAEADLYLAMIDDKVIMKIGPKQDVGTLVPSNFALAYSGLDFAVWEKK

SEQ ID NO: 2804 - protein, 236 aa, Arabidopsis thaliana
MNWLKTEIGFHGWRFDYVRGYASSITKLYVQNTSPDFAVGEKWDDMKYGGDGKLDYDQNEHRSGLKQWIEEAGGGVLTAFDFTTKGILQSAVKGELWRLKDSQGKPPGMIGIMPGNAVTFIDNHDTFRTWVFPSDKVLLGYVYILTHPGTPCIFYNHYIEWGLKESISKLVAIRNKNGIGSTSSVTIKAAEADLYLAMIDDKVIMKIGPKQDVGTLVPSNFALAYSGLDFAVWEKK

SEQ ID NO: 2805 - DNA, 664 bp, Arabidopsis thaliana
gcgactctcctctctgtttcgtttttttttcctttcattcttcttatctcctcacactcttcgaacaaggaggaaccctaatctcaagatgaatagggaaaagttgatgaagatggctaacaccgtccgcactggcggaaagggtacagtcagaagaaagaagaaggctgtgcacaagaccaatacaactgatgacaagaggctccagagcacacttaagagaattggagttaactccattcccgctattgaagaagttaacatctttaaggatgatgttgttattcagttcatcaaccctaaggttcaagcttcaattgctgcaaacacatgggttgttagcggttctcctcagaccaaaaaattgcaagatatccttcctcagatcatcagccaacttggaccagacaacatggacaacctgaagaagctagcagagcagttccagaaacaggcttctggtgaaggtaatgccgcctcagcaaccattcaagaagaggatgatgacgatgtcccagagcttgttggagagacattcgaaactgctgctgaagagaaagcaccagctgctgctgcttcttcttagagagaaaagagcgagaccacatcgaaaaaaaaaaaaccgcactttgatttttacatatctttataatatgtttgttcg

SEQ ID NO: 2806 - protein, 194 aa, Arabidopsis thaliana
RLSSLFRFFFLSFFLSPHTLRTRRNPNLKMNREKLMKMANTVRTGGKGTVRRKKKAVHKTNTTDDKRLQSTLKRIGVNSIPAIEEVNIFKDDVVIQFINPKVQASIAANTWVVSGSPQTKKLQDILPQIISQLGPDNMDNLKKLAEQFQKQASGEGNAASATIQEEDDDDVPELVGETFETAAEEKAPAAAASS

SEQ ID NO: 2807 - protein, 165 aa, Arabidopsis thaliana
MNREKLMKMANTVRTGGKGTVRRKKKAVHKTNTTDDKRLQSTLKRIGVNSIPAIEEVNIFKDDVVIQFINPKVQASIAANTWVVSGSPQTKKLQDILPQIISQLGPDNMDNLKKLAEQFQKQASGEGNAASATIQEEDDDDVPELVGETFETAAEEKAPAAAASS

SEQ ID NO: 2808 - protein, 159 aa, Arabidopsis thaliana
MKMANTVRTGGKGTVRRKKKAVHKTNTTDDKRLQSTLKRIGVNSIPAIEEVNIFKDDVVIQFINPKVQASIAANTWVVSGSPQTKKLQDILPQIISQLGPDNMDNLKKLAEQFQKQASGEGNAASATIQEEDDDDVPELVGETFETAAEEKAPAAAASS

SEQ ID NO: 2809 - DNA, 1292 bp, Arabidopsis thaliana
aaaaatcaaaaatcaaaatccctaaaagcttcttgactcgtttatcctctactacaatggcgaaaaccctagacaaatcatctaagaagcgcaaactcgtgaaatccaaatccacgaatttcgataagaaacagaagattaacaaacaacaacaacaaccagaatcctcaacgccatattcaagttcaagctccagctctgattctagcgattccgaatcagacaacgaattcgacccagaagagctccgtgagcttctacaaccttattccaaggaccagcttgtcgatctagtttgttccgcttctcgaatcggatcttcgatctattccgccgtcgtagaagccgcagatcgtgatgttacacacaggaaaatcttcgtttatggtcttccatgggagacgactcgcgagactcttgttggagtctttgaaggttatggtgagattgaagagtgtaccgttgttatagataaggctactggtaaggctaaagggtttggatttgttatgttcaagactaggaaaggagctaaagaagctcttaaagaaccgaagaagaggattcttaatagaactgccacttgccagcttgcttctatgggtcctgcggcttcaggaaaggggcatgatcaacctggtccggtgaagattagtatgggttcgatggctaatcatggacagcctcagcaacagcaggtacaaggtcaacatgtgtttaacggtggtggaatggctgcttcgccgtttatgttagggaaccaataccatccgctttatggagctgggatgttgggaaatccagctttagcagcagcagcagcagctgggggaggttacatgtatccgatgttagcgggtgctctagcacatggcgggttgggttctgatatggtacagtctagtcaaatgggtgggattggtgttgatccaagcgttggtgctgctggtctttcagctctaggttcttactttagaggtcagagtctgcctagtacttatcctgattcggatgctggtggaaaaagagggacgggtaaagattcggatgctggtggctcctcctttcatggctactcaaactattcatgatggtgtgggctgagcatgagaatgataaacatgcagtttctggggatttctttttaacatttctatcaaagtcagtacgttttagtttttttttgtattgttttttcttcctttctttttttttctgtttgatgtcactcttgtccgatatcatacgatagacagtctgtggctcaagtaatatcattgtgattattcgtt

SEQ ID NO: 2810 - protein, 362 aa, Arabidopsis thaliana
KSKIKIPKSFLTRLSSTTMAKTLDKSSKKRKLVKSKSTNFDKKQKINKQQQQPESSTPYSSSSSSSDSSDSESDNEFDPEELRELLQPYSKDQLVDLVCSASRIGSSIYSAVVEAADRDVTHRKIFVYGLPWETTRETLVGVFEGYGEIEECTVVIDKATGKAKGFGFVMFKTRKGAKEALKEPKKRILNRTATCQLASMGPAASGKGHDQPGPVKISMGSMANHGQPQQQQVQGQHVFNGGGMAASPFMLGNQYHPLYGAGMLGNPALAAAAAAGGGYMYPMLAGALAHGGLGSDMVQSSQMGGIGVDPSVGAAGLSALGSYFRGQSLPSTYPDSDAGGKRGTGKDSDAGGSSFHGYSNYS

SEQ ID NO: 2811 - protein, 344 aa, Arabidopsis thaliana
MAKTLDKSSKKRKLVKSKSTNFDKKQKINKQQQQPESSTPYSSSSSSSDSSDSESDNEFDPEELRELLQPYSKDQLVDLVCSASRIGSSIYSAVVEAADRDVTHRKIFVYGLPWETTRETLVGVFEGYGEIEECTVVIDKATGKAKGFGFVMFKTRKGAKEALKEPKKRILNRTATCQLASMGPAASGKGHDQPGPVKISMGSMANHGQPQQQQVQGQHVFNGGGMAASPFMLGNQYHPLYGAGMLGNPALAAAAAAGGGYMYPMLAGALAHGGLGSDMVQSSQMGGIGVDPSVGAAGLSALGSYFRGQSLPSTYPDSDAGGKRGTGKDSDAGGSSFHGYSNYS

SEQ ID NO: 2812 - protein, 193 aa, Arabidopsis thaliana
MFKTRKGAKEALKEPKKRILNRTATCQLASMGPAASGKGHDQPGPVKISMGSMANHGQPQQQQVQGQHVFNGGGMAASPFMLGNQYHPLYGAGMLGNPALAAAAAAGGGYMYPMLAGALAHGGLGSDMVQSSQMGGIGVDPSVGAAGLSALGSYFRGQSLPSTYPDSDAGGKRGTGKDSDAGGSSFHGYSNYS

SEQ ID NO: 2813 - DNA, 877 bp, Arabidopsis thaliana
acatctcacaactcactaatctctagctaaccatggcatttctagtagagaaacaactcttcaaagccctcttctcattcttcttattagttttactcttctccgataccgtcttatctttccgaaaaacaatcgaccagaaaaaaccctgcaaacacttctcgttctatttccatgacatcctctacgatggcgacaatgtagcaaacgcaacctccgccgccatcgtgagccctccaggactaggaaacttcaagttcggtaagtttgtgatctttgatgggcccataacaatggacaagaactatctctcaaaacccgtggctcgcgcacaaggcttctatttctatgacatgaagatggacttcaattcgtggttttcctacacgttggtgtttaactcaacggaacacaaagggacattgaacataatgggtgctgatttgatgatggagccaacaagagatctatcggtcgttggtgggacaggtgacttcttcatggctcgtgggatcgctaccttcgtgactgatttatttcaaggggctaagtatttccgagttaagatggatattaagctctatgaatgttactaagtagctaagaatgtgtgttttgtttgaaaattttatgttgacacagagaaatgtgtttacaataattaagttttttttttgccttttcttttgctgttgtctttttgtttatctataattattatgtgatttatttcaaggggataagtatttccgagttaagatggatattaagctctatgaatgttactaactagcgaataatatttgttttgtttgaaaattggtatgtacacagagataatgtgttactaataagtagtgtttttttttgtggccct

SEQ ID NO: 2814 - protein, 187 aa, Arabidopsis thaliana
MAFLVEKQLFKALFSFFLLVLLFSDTVLSFRKTIDQKKPCKHFSFYFHDILYDGDNVANATSAAIVSPPGLGNFKFGKFVIFDGPITMDKNYLSKPVARAQGFYFYDMKMDFNSWFSYTLVFNSTEHKGTLNIMGADLMMEPTRDLSVVGGTGDFFMARGIATFVTDLFQGAKYFRVKMDIKLYECY

SEQ ID NO: 2815 - protein, 100 aa, Arabidopsis thaliana
MDKNYLSKPVARAQGFYFYDMKMDFNSWFSYTLVFNSTEHKGTLNIMGADLMMEPTRDLSVVGGTGDFFMARGIATFVTDLFQGAKYFRVKMDIKLYECY

SEQ ID NO: 2816 - DNA, 1516 bp, Arabidopsis thaliana
ctattttgtcgttcccggtaaattttgccggcgaagattgaaacttttccaaacgatgcaagcaacggcgaatcttccgacgatatggaatctgtcgcttcgtgggtcatcctctaaagtccatatagtgaaccctaggcatcgaaagtctcacgcgcttcattgtttgagatcagaagggcatgaagagtttgacaattctcagaaaagtcttggacaatcttctattacaaaagaagcaaaacataaggacatatggaacctctttagagaagctcaaaaaaatataatgatcttaaacaaacaacgcctagctgcagttgacgagttagaacagctaaagaaagataaagaggaattgttagagaggataaaccaattggaggcagaaagtcagattgtaatcaagaaagataagtcgtctctattctgggagttgcttctccgtattgattctatggttatcaatggactagttaacattgaagaagcttcatccatgagaaagctggttaaagagcatgaagcgaacatctctgtatttcctcttgatgtcctgcaacaaggagatgccgaaattctagcagaacttagacggttcacaaataaaggcaaaaggaatggtctccatgtgattcatatttgcaccgaaatggctccattagtttctgttggacctttggcctcatatataacaggattgtcttgtgcactccaagaagagggttacatggttgaagttatattgccaaaatattctacacttgatttggacgaaattgaagggcttcgtgaaatcgaagccgatgcatattcttattttgatggccagctgcatgcaaaccgaatatggaacggagttgtctctggaataggagtgacacttattcaaccagtgtattactcgtcaatgtttagccgtgataaagtatacgggtatcaggacgattttgatagatttgcatacttctctcgtgcttcattggattacattgcaaaatctggaaagcagcctgatgttttacacattcacaactggcaaactgcaatagttggaccgttgttttgggatgtttttgttaatcagggacttgaaggtactagaatactcttgacatgccaagactttgacaagggtcttgtacctcctgaaaaattggagctatgtgggctcgatccagctgaacttcaccgtcttgatcgcttacaagataacacaaatccacattttgttaatattttgaagggcggtgttgtctactccaacaaagttgtaataatgtcatcctcacatagctcaatccctggtctcgaaccaactttagctatccacaaggacaagttgttttttgctccctttggaatggacaactcaatggagaaagacttgtgttgtgaccttcacgtctctgcatatacttccattaagaacctatgaaaatacacaatgatgaacaagatgaatgattatttatcatattttcacattaaaaaaaaaaaatgtgtccttgtgttt

SEQ ID NO: 2817 - protein, 478 aa, Arabidopsis thaliana
YFVVPGKFCRRRLKLFQTMQATANLPTIWNLSLRGSSSKVHIVNPRHRKSHALHCLRSEGHEEFDNSQKSLGQSSITKEAKHKDIWNLFREAQKNIMILNKQRLAAVDELEQLKKDKEELLERINQLEAESQIVIKKDKSSLFWELLLRIDSMVINGLVNIEEASSMRKLVKEHEANISVFPLDVLQQGDAEILAELRRFTNKGKRNGLHVIHICTEMAPLVSVGPLASYITGLSCALQEEGYMVEVILPKYSTLDLDEIEGLREIEADAYSYFDGQLHANRIWNGVVSGIGVTLIQPVYYSSMFSRDKVYGYQDDFDRFAYFSRASLDYIAKSGKQPDVLHIHNWQTAIVGPLFWDVFVNQGLEGTRILLTCQDFDKGLVPPEKLELCGLDPAELHRLDRLQDNTNPHFVNILKGGVVYSNKVVIMSSSHSSIPGLEPTLAIHKDKLFFAPFGMDNSMEKDLCCDLHVSAYTSIKNL

SEQ ID NO: 2818 - protein, 460 aa, Arabidopsis thaliana
MQATANLPTIWNLSLRGSSSKVHIVNPRHRKSHALHCLRSEGHEEFDNSQKSLGQSSITKEAKHKDIWNLFREAQKNIMILNKQRLAAVDELEQLKKDKEELLERINQLEAESQIVIKKDKSSLFWELLLRIDSMVINGLVNIEEASSMRKLVKEHEANISVFPLDVLQQGDAEILAELRRFTNKGKRNGLHVIHICTEMAPLVSVGPLASYITGLSCALQEEGYMVEVILPKYSTLDLDEIEGLREIEADAYSYFDGQLHANRIWNGVVSGIGVTLIQPVYYSSMFSRDKVYGYQDDFDRFAYFSRASLDYIAKSGKQPDVLHIHNWQTAIVGPLFWDVFVNQGLEGTRILLTCQDFDKGLVPPEKLELCGLDPAELHRLDRLQDNTNPHFVNILKGGVVYSNKVVIMSSSHSSIPGLEPTLAIHKDKLFFAPFGMDNSMEKDLCCDLHVSAYTSIKNL

SEQ ID NO: 2819 - protein, 382 aa, Arabidopsis thaliana
MILNKQRLAAVDELEQLKKDKEELLERINQLEAESQIVIKKDKSSLFWELLLRIDSMVINGLVNIEEASSMRKLVKEHEANISVFPLDVLQQGDAEILAELRRFTNKGKRNGLHVIHICTEMAPLVSVGPLASYITGLSCALQEEGYMVEVILPKYSTLDLDEIEGLREIEADAYSYFDGQLHANRIWNGVVSGIGVTLIQPVYYSSMFSRDKVYGYQDDFDRFAYFSRASLDYIAKSGKQPDVLHIHNWQTAIVGPLFWDVFVNQGLEGTRILLTCQDFDKGLVPPEKLELCGLDPAELHRLDRLQDNTNPHFVNILKGGVVYSNKVVIMSSSHSSIPGLEPTLAIHKDKLFFAPFGMDNSMEKDLCCDLHVSAYTSIKNL

SEQ ID NO: 2820 - DNA, 1174 bp, Arabidopsis thaliana
aaataaaccacattagtcttttcagattttttgtacacttccttcatcccccacccatctctctctctctctctcatccttcctctttcttctttgcttgcccttttctttttattttattcttccaaaatcaaatagttccttctttgatctcattgggataactaaaagtttcaagaagagaaacatatcattgaagagagaacccacacaaaaaaaaatgtctgtagatttctcatctgagcgtgtttgctatgtccactgcagcttctgcaccacgattttagcggtaagtgtaccatacgcaagtttgttcacacttgtgacggtgagatgtggccattgtaccaatttgctatccctcaacattggagtttcacttcatcaaacctcagctcctcccattcaccaagatcttcagcctcatagacagcacacaacctctctggtgacaaggaaagattgtgcatcgtcttctaggagcaccaacaatttatcggaaaacattgatcgtgaggctcctagaatgcctcctattcgcccaccggagaaaagacaacgtgttccttcggcctacaacagattcatcaaggaggaaatccaaaggattaaggcttgcaatccagagattagccaccgtgaggcatttagcactgctgctaaaaattgggcacattttcctcacattcactttggattaaagctggatggcaacaagaaaggcaagcaattagaccagtcagttgcaggccaaaagtctaatggctattactaaagcctttatatatatacacacatatatacacttatacgtatatatatgtgtatagatatatatgcgtgtgtatgatttatgtttatctttgtacgtacgcattaatgaatgtgtaagcagagagctgatgatggaaagagatcaggcgaggaagaagaagatcatataacgttacatatatatacatgtatgtatatatgttcctttcttttttcttgcgtgtgcttcatctataacttcatttctagttttattctcctaataagtgaagtctataaatttgaacctaaaatgtttaggaagaatcttctttctgaagattgtaatataaatttcaactttactcattctgaaaaggtgtggtcacgactttatatatataatccctagttttatggt

SEQ ID NO: 2821 - protein, 184 aa, Arabidopsis thaliana
MSVDFSSERVCYVHCSFCTTILAVSVPYASLFTLVTVRCGHCTNLLSLNIGVSLHQTSAPPIHQDLQPHRQHTTSLVTRKDCASSSRSTNNLSENIDREAPRMPPIRPPEKRQRVPSAYNRFIKEEIQRIKACNPEISHREAFSTAAKNWAHFPHIHFGLKLDGNKKGKQLDQSVAGQKSNGYY

SEQ ID NO: 2822 - protein, 93 aa, Arabidopsis thaliana
MCKQRADDGKRSGEEEEDHITLHIYTCMYICSFLFSCVCFIYNFISSFILLISEVYKFEPKMFRKNLLSEDCNINFNFTHSEKVWSRLYIYNP

SEQ ID NO: 2823 - DNA, 1573 bp, Arabidopsis thaliana
gtcaaatcattttcgacgactgttattaataattaattcgttaatgacgcaccgttagtcaactccgcttcgtattaattactcctccgatctctttcttattcttctccggcgacacttcccttgcttctccctcttaggactctctctacgaatctgtaagcttcaaattcttacgccacactccgagattcgcttctgattattgtatgaatttttgagctccaaggatccactgccatgtatttatgctgctaaagcttgaaggcagtagtggaatcaccattaagttctttgctttgtaatttagcttgatttgagaataaacaaatgggaaaagcatcaggcttgcttctgtttctcttgggttttgggttctttgttgtcacatataatcttctgacacttatagttcacaatagatctggtgtgagtaattcagatggaagtccacttctggatcctgttgttcagatgcctctaaatattaggaaagccaagagttctccagcaccttttcatgttgccttaacagctacagatgcaccttataataagtggcagtgtcgtattatgtattattggtataagcagaagaaagctcttcctggttctgatatgggtggcttcacccgtattttgcattccggtaattctgataacttgatggatgaaatacccacatttgtggttgatcctcttcctccaggtcttgatcgggggtatgttgtcttgaatagaccatgggcattcgtgcaatggcttgaaagagctaccatcaaggaagactatgtgctcatggcagagcctgatcatgtatttgttaatccccttcccaatttggctgttggaggattcccagccgcttttccgtttttctatattactcctgaaaagtatgaaaacatagtcagaaagtattatccagcggagatggggccagtaacaaatatcgaccccattggcaactctcctgttatcataagcaaggaatcacttgaaaagattgctcctacatggatgaatgtctcgctgacaatgaaaaacgatccagaaactgataaggcatttggatgggtgctggaaatgtacggttacgcaattgcatctgctatacatggggtgcgtcacatacttcggaaggatttcatgcttcagcctccgtgggatttgtctaccaaggggaagtttatcattcattacacttatggatgcgactacaacatgaagggggagctgacatatggcaaaataggagagtggcgattcgataagagatcacatttgcggggtcctcctccaaggaacatgtccttgccgcctcccggtgttcccgaaagtgtggtgacacttgtgaagatggtgaatgaagctactgcgactatccctaattgggacactctctaactcacatccacacacaaaacacaaaccatagggacaaatccatacagcaacaatattttgcctaatttttttttccttctccctttacttcccttcttgtctgttttttcttgtaatggttaaattatgaacttgagtagtaaattacaaaattatttgtttgact

SEQ ID NO: 2824 - protein, 358 aa, Arabidopsis thaliana
MGKASGLLLFLLGFGFFVVTYNLLTLIVHNRSGVSNSDGSPLLDPVVQMPLNIRKAKSSPAPFHVALTATDAPYNKWQCRIMYYWYKQKKALPGSDMGGFTRILHSGNSDNLMDEIPTFVVDPLPPGLDRGYVVLNRPWAFVQWLERATIKEDYVLMAEPDHVFVNPLPNLAVGGFPAAFPFFYITPEKYENIVRKYYPAEMGPVTNIDPIGNSPVIISKESLEKIAPTWMNVSLTMKNDPETDKAFGWVLEMYGYAIASAIHGVRHILRKDFMLQPPWDLSTKGKFIIHYTYGCDYNMKGELTYGKIGEWRFDKRSHLRGPPPRNMSLPPPGVPESVVTLVKMVNEATATIPNWDTL

SEQ ID NO: 2825 - protein, 310 aa, Arabidopsis thaliana
MPLNIRKAKSSPAPFHVALTATDAPYNKWQCRIMYYWYKQKKALPGSDMGGFTRILHSGNSDNLMDEIPTFVVDPLPPGLDRGYVVLNRPWAFVQWLERATIKEDYVLMAEPDHVFVNPLPNLAVGGFPAAFPFFYITPEKYENIVRKYYPAEMGPVTNIDPIGNSPVIISKESLEKIAPTWMNVSLTMKNDPETDKAFGWVLEMYGYAIASAIHGVRHILRKDFMLQPPWDLSTKGKFIIHYTYGCDYNMKGELTYGKIGEWRFDKRSHLRGPPPRNMSLPPPGVPESVVTLVKMVNEATATIPNWDTL

SEQ ID NO: 2826 - protein, 277 aa, Arabidopsis thaliana
MYYWYKQKKALPGSDMGGFTRILHSGNSDNLMDEIPTFVVDPLPPGLDRGYVVLNRPWAFVQWLERATIKEDYVLMAEPDHVFVNPLPNLAVGGFPAAFPFFYITPEKYENIVRKYYPAEMGPVTNIDPIGNSPVIISKESLEKIAPTWMNVSLTMKNDPETDKAFGWVLEMYGYAIASAIHGVRHILRKDFMLQPPWDLSTKGKFIIHYTYGCDYNMKGELTYGKIGEWRFDKRSHLRGPPPRNMSLPPPGVPESVVTLVKMVNEATATIPNWDTL

SEQ ID NO: 2827 - DNA, 1123 bp, Arabidopsis thaliana
gcttactgattacagtttcagttccaaagatgagaactttgagctcccaattatactccaatggtggtctcacttggttccagaagaagaatcagagctctctgttcatcaagcatctcagagtctctaaaccatcgagggttcagctcatatctgctgttcaattccgtccgtgcatcgatattcataagggaaaagtgaaacagatagttggatccacacttcgtgacttgaaagaggatggttcagttctcgttacgaattttgaatcggataagtctgcggaagagtatgcaaagatgtacaaagaagatgggcttacgggtggtcatgtgataatgcttggagcagaccctttaagccaagctgcagctattggagcattacatgcttatcctggcggtttgcaagttggaggtggaatcaattctgagaattgcatgagttatattgaggagggagcaagccatgtcattgtcacttcgtatgtatttaacaatggaaagattgatcttgaaagactcaaagatattgtgagcattgttgggaaacaaagactgatattggaccttagctgcagaaagaaggatggaagatacgcaattgttactgatagatggcagaagttcagcgacgtcatccttgacgagaaatcattggagtttcttggaggattttcagatgagtttctggtgcatggcgtagacgttgaaggaaagaagctagggatcgatgaagagcttgtagcattgcttggcaactactctccgattccagtaacttatgcgggaggtgtgacggtaatggatgatgtagagaggatcaaggacgcaggaaagggacgtgtagatgtaacagtgggaagtgccttagacattttcgggggaaatcttccatacaaagacgtcgtcgcttggcatcacaagcagcactcactccattgatatcgccattttcacctttgctcatcttttttatttgcattaccccaaaccttaagcttcaatatttgcaacattaatcttcagctttaaacttttgtgcttctttctaaactcttcaagaatttgtcaattttgaatattttttcgattaatcaagtttatggtttggtttgactacc

SEQ ID NO: 2828 - protein, 313 aa, Arabidopsis thaliana
LLITVSVPKMRTLSSQLYSNGGLTWFQKKNQSSLFIKHLRVSKPSRVQLISAVQFRPCIDIHKGKVKQIVGSTLRDLKEDGSVLVTNFESDKSAEEYAKMYKEDGLTGGHVIMLGADPLSQAAAIGALHAYPGGLQVGGGINSENCMSYIEEGASHVIVTSYVFNNGKIDLERLKDIVSIVGKQRLILDLSCRKKDGRYAIVTDRWQKFSDVILDEKSLEFLGGFSDEFLVHGVDVEGKKLGIDEELVALLGNYSPIPVTYAGGVTVMDDVERIKDAGKGRVDVTVGSALDIFGGNLPYKDVVAWHHKQHSLH

SEQ ID NO: 2829 - protein, 304 aa, Arabidopsis thaliana
MRTLSSQLYSNGGLTWFQKKNQSSLFIKHLRVSKPSRVQLISAVQFRPCIDIHKGKVKQIVGSTLRDLKEDGSVLVTNFESDKSAEEYAKMYKEDGLTGGHVIMLGADPLSQAAAIGALHAYPGGLQVGGGINSENCMSYIEEGASHVIVTSYVFNNGKIDLERLKDIVSIVGKQRLILDLSCRKKDGRYAIVTDRWQKFSDVILDEKSLEFLGGFSDEFLVHGVDVEGKKLGIDEELVALLGNYSPIPVTYAGGVTVMDDVERIKDAGKGRVDVTVGSALDIFGGNLPYKDVVAWHHKQHSLH

SEQ ID NO: 2830 - protein, 214 aa, Arabidopsis thaliana
MYKEDGLTGGHVIMLGADPLSQAAAIGALHAYPGGLQVGGGINSENCMSYIEEGASHVIVTSYVFNNGKIDLERLKDIVSIVGKQRLILDLSCRKKDGRYAIVTDRWQKFSDVILDEKSLEFLGGFSDEFLVHGVDVEGKKLGIDEELVALLGNYSPIPVTYAGGVTVMDDVERIKDAGKGRVDVTVGSALDIFGGNLPYKDVVAWHHKQHSLH

SEQ ID NO: 2831 - DNA, 1622 bp, Arabidopsis thaliana
tgatcggttcacgagtcatccggtaaagacttgaacttaaaaccatggcgagaccgagacgaagaaacacagagatcggtgatggcttcacagagatattcaacagagagattggtttctctcatccaatcaccatctctcgtcgaatctccgcttctgaggggagagtgaagaaactagatctttacgggaagttaaatggtcatgagggatgtgtgaatgcagtggagttcaattcgactggcgatgttcttgtttccgggtccgatgatcgacaaatcatgctctggaactggttgagtggaagcaggaagttgtcgtatccctctggccattgtgaaaatgtgtttcagactaagttcataccttttacggatgacaggacaatcataacatctggtgctgatggacaagtaagacttggtcagatcctagaaaatggtaaagtggagacgaaaagactagggaggcatcacggtcgcgtgtacaagcttgctgttttgcctggagatcctaacgtattctacagctgtggtgaagatggttttgttcaacattttgatatacgcagcaacagtgctactatggttttgtattcctctccgttcacacaaggatgcaggagacatcactccagcagtaggatcagattgaattctattgcgatagatccgaggaattcatattatcttgcggttgggggttctgatgaatatgcacgagtctacgatactagaagagtacaattagctccagtatgtcgccacgtcttaccagacgctcctgtgaacactttctgtcctcgtcatctccgggaaaccaacagtgttcacatcacgggattagcatattccaaagctggagaactattggtctcttacaacgacgagcttatttatctgtttgagaagaacatgggttatggttcgtcgcctgtttctgtctctcctgagaaactgcaagaaatggaagaaccacaggtgtatataggtcaccgcaatgcacaaacagtgaaaggagtgaacttctttggtccaaatgatgaatatgtcacgagtggttcagactgcggtcacatttttatatggaagaagaaaggaggtaagcttgtccgagctatggtgggtgatagacgagtggtgaatcagttagagtctcacccacacataccgttacttgcatcctgcgggattgaaaagagcgttaagctctggacgccaatgtcaaatgatgttctttccctgcctgaaaagatcgataaggtgatggaattgaacagggtggggagagaagaccaatcgagggtaacactgactcctgatgtaattatgcatgttcttaggctacagagacgtcagacgtcggcttttacagagaggagatacgtttcaactgacattggcagtgatgaaggaaatgatgctcgcttcattgcaagcttagtagccaacgacgatgagtcttcagacagagaatgtactgtaagctgagtcctctcaactagtgtaatagattacaggtcttgttccaaatacagatacttgtggattttgcttgtgtgttgtaatttataataaggaaaagaaaataagaacgagaaattagtaatctaatcttctttc

SEQ ID NO: 2832 - protein, 481 aa, Arabidopsis thaliana
MARPRRRNTEIGDGFTEIFNREIGFSHPITISRRISASEGRVKKLDLYGKLNGHEGCVNAVEFNSTGDVLVSGSDDRQIMLWNWLSGSRKLSYPSGHCENVFQTKFIPFTDDRTIITSGADGQVRLGQILENGKVETKRLGRHHGRVYKLAVLPGDPNVFYSCGEDGFVQHFDIRSNSATMVLYSSPFTQGCRRHHSSSRIRLNSIAIDPRNSYYLAVGGSDEYARVYDTRRVQLAPVCRHVLPDAPVNTFCPRHLRETNSVHITGLAYSKAGELLVSYNDELIYLFEKNMGYGSSPVSVSPEKLQEMEEPQVYIGHRNAQTVKGVNFFGPNDEYVTSGSDCGHIFIWKKKGGKLVRAMVGDRRVVNQLESHPHIPLLASCGIEKSVKLWTPMSNDVLSLPEKIDKVMELNRVGREDQSRVTLTPDVIMHVLRLQRRQTSAFTERRYVSTDIGSDEGNDARFIASLVANDDESSDRECTVS

SEQ ID NO: 2833 - protein, 402 aa, Arabidopsis thaliana
MLWNWLSGSRKLSYPSGHCENVFQTKFIPFTDDRTIITSGADGQVRLGQILENGKVETKRLGRHHGRVYKLAVLPGDPNVFYSCGEDGFVQHFDIRSNSATMVLYSSPFTQGCRRHHSSSRIRLNSIAIDPRNSYYLAVGGSDEYARVYDTRRVQLAPVCRHVLPDAPVNTFCPRHLRETNSVHITGLAYSKAGELLVSYNDELIYLFEKNMGYGSSPVSVSPEKLQEMEEPQVYIGHRNAQTVKGVNFFGPNDEYVTSGSDCGHIFIWKKKGGKLVRAMVGDRRVVNQLESHPHIPLLASCGIEKSVKLWTPMSNDVLSLPEKIDKVMELNRVGREDQSRVTLTPDVIMHVLRLQRRQTSAFTERRYVSTDIGSDEGNDARFIASLVANDDESSDRECTVS

SEQ ID NO: 2834 - protein, 301 aa, Arabidopsis thaliana
MVLYSSPFTQGCRRHHSSSRIRLNSIAIDPRNSYYLAVGGSDEYARVYDTRRVQLAPVCRHVLPDAPVNTFCPRHLRETNSVHITGLAYSKAGELLVSYNDELIYLFEKNMGYGSSPVSVSPEKLQEMEEPQVYIGHRNAQTVKGVNFFGPNDEYVTSGSDCGHIFIWKKKGGKLVRAMVGDRRVVNQLESHPHIPLLASCGIEKSVKLWTPMSNDVLSLPEKIDKVMELNRVGREDQSRVTLTPDVIMHVLRLQRRQTSAFTERRYVSTDIGSDEGNDARFIASLVANDDESSDRECTVS

SEQ ID NO: 2835 - DNA, 500 bp, Arabidopsis thaliana
gctaaatcaaaatcgtctttctcctccaaagaagacctctcaaaacattacagtttgcgaaaagatatcgcaatatggcaagtgaagcaccgagttgggcagatcaatggggaaccggagggatcggggagatgccggaggaagacaacaccaaaagcaagaaagatgccggcggtaagaactctggccaaaccaaatcagccaagattgttgatttcgtaagttttaagtggatgaagaatcttgtccataagaagaagaaagactctgattcttgaaagataagaaagaatcattaaatttcgatgtttgttttggaagaaattgtttcttcctaagatctcaatttatctatcaatctatttatttatttttatttgttttgtctttcatatgagttaatgcgttttggtgcattccacgatcgaaagtcttttgttctttacgacatggtttaatattttaataacatgtaggcaactaggcctcgcttatcattt

SEQ ID NO: 2836 - protein, 73 aa, Arabidopsis thaliana
AKSKSSFSSKEDLSKHYSLRKDIAIWQVKHRVGQINGEPEGSGRCRRKTTPKARKMPAVRTLAKPNQPRLLIS

SEQ ID NO: 2837 - protein, 67 aa, Arabidopsis thaliana
MASEAPSWADQWGTGGIGEMPEEDNTKSKKDAGGKNSGQTKSAKIVDFVSFKWMKNLVHKKKKDSDS

SEQ ID NO: 2838 - protein, 48 aa, Arabidopsis thaliana
MPEEDNTKSKKDAGGKNSGQTKSAKIVDFVSFKWMKNLVHKKKKDSDS

SEQ ID NO: 2839 - DNA, 711 bp, Arabidopsis thaliana
acactcgtcgccttgctttatgctttattttctcttctttagctgtttatttcttcagcaaatctgatttcaaaaaaaattcatcgacgaaactgaaaaaaaatgagtgacgggaggaggaagaagagcgtgaacggaggtgcaccggcgcaaacaatcttggatgatcggagatctagtcttccggaagttgaagcttctccaccggctgggaaacgagctgttatcaagagtgccgatatgaaagatgatatgcaaaaggaagctatcgaaatcgccatctccgcgtttgagaagtacagtgtggagaaggatatagctgagaatataaagaaggagtttgacaagaaacatggtgctacttggcattgcattgttggtcgcaactttggttcttatgtaacgcacgagacaaaccatttcgtttacttctacctcgaccagaaagctgtgctgctcttcaaatcgggttaagaatttgaaaaccaagaaaactcattgtgatgttcagtcccattatcatcatcacgttgtagctagtttcttgtaatttgtatgtatgtgttgcttctaaggcttttaaccaaaccaaatttggagaataaaccctataaaaagtcttttagtacatgtcatgcatcttcaaatgtaaatttgatttcaccagatctaaaactcagctttgataaatcagatattccggtttctgtt

SEQ ID NO: 2840 - protein, 123 aa, Arabidopsis thaliana
MSDGRRKKSVNGGAPAQTILDDRRSSLPEVEASPPAGKRAVIKSADMKDDMQKEAIEIAISAFEKYSVEKDIAENIKKEFDKKHGATWHCIVGRNFGSYVTHETNHFVYFYLDQKAVLLFKSG

SEQ ID NO: 2841 - protein, 77 aa, Arabidopsis thaliana
MKDDMQKEAIEIAISAFEKYSVEKDIAENIKKEFDKKHGATWHCIVGRNFGSYVTHETNHFVYFYLDQKAVLLFKSG

SEQ ID NO: 2842 - protein, 73 aa, Arabidopsis thaliana
MQKEAIEIAISAFEKYSVEKDIAENIKKEFDKKHGATWHCIVGRNFGSYVTHETNHFVYFYLDQKAVLLFKSG

SEQ ID NO: 2843 - DNA, 891 bp, Arabidopsis thaliana
aacgaagagtcatggcgatgctttttcgacctcctccttcacaatgtagaagcttctctccttttgtcttcaactacagctccagagaagtttcttcgtcgtctcgtctctccttgaaaacctccggcgacgaagaaaactgggtttcacgtttccggtcgaaatctctcagtttggtgttctctggagctcttgctctcggtttatctctatcaggcgtggggtttgcagatgcaaaagttggtgttaacaaaccagaattgcttcctaaagagttcacttctgttatagatgttgctgatttcctctctaatggtcaggagaagagaattgctcaagaaatcgctaatcttgagaaagatacaggattcaagttgagagtcttggctcaaaactatcccgttacccctggactagcaatcaaagatttctggcaggtggatgatagcacaattgtgtttgtcgctgacccgacttttgggaacatattgaatttcaatgttggagctacggttgatttagacatacctcgtagtttctggagtcgactggctgggaaatacggcaatatgttttactggaaagagaagggagaagatgcatctattgaagctgcagtgatggcgatatcaagttgcttacgagaaccagttggtcgaaacaactgtgcagagatccaatgaagtatatgaccccatcaagcgtatatgttattatcataatatcattgtatagattggcaccaaagagatacagaatttgtaagaatgaatccacgtctagtagtaacctctctccatttctcagcttcacctactcaaacaaacagtttcaattggttacttgtatcttttaaaacaaacaaatagagaaaccaaaatcaataaaccg

SEQ ID NO: 2844 - protein, 226 aa, Arabidopsis thaliana
RRVMAMLFRPPPSQCRSFSPFVFNYSSREVSSSSRLSLKTSGDEENWVSRFRSKSLSLVFSGALALGLSLSGVGFADAKVGVNKPELLPKEFTSVIDVADFLSNGQEKRIAQEIANLEKDTGFKLRVLAQNYPVTPGLAIKDFWQVDDSTIVFVADPTFGNILNFNVGATVDLDIPRSFWSRLAGKYGNMFYWKEKGEDASIEAAVMAISSCLREPVGRNNCAEIQ

SEQ ID NO: 2845 - protein, 223 aa, Arabidopsis thaliana
MAMLFRPPPSQCRSFSPFVFNYSSREVSSSSRLSLKTSGDEENWVSRFRSKSLSLVFSGALALGLSLSGVGFADAKVGVNKPELLPKEFTSVIDVADFLSNGQEKRIAQEIANLEKDTGFKLRVLAQNYPVTPGLAIKDFWQVDDSTIVFVADPTFGNILNFNVGATVDLDIPRSFWSRLAGKYGNMFYWKEKGEDASIEAAVMAISSCLREPVGRNNCAEIQ

SEQ ID NO: 2846 - protein, 221 aa, Arabidopsis thaliana
MLFRPPPSQCRSFSPFVFNYSSREVSSSSRLSLKTSGDEENWVSRFRSKSLSLVFSGALALGLSLSGVGFADAKVGVNKPELLPKEFTSVIDVADFLSNGQEKRIAQEIANLEKDTGFKLRVLAQNYPVTPGLAIKDFWQVDDSTIVFVADPTFGNILNFNVGATVDLDIPRSFWSRLAGKYGNMFYWKEKGEDASIEAAVMAISSCLREPVGRNNCAEIQ

SEQ ID NO: 2847 - DNA, 1090 bp, Arabidopsis thaliana
agacaccagtcttaccctaacttttttcaaagtctctgtctttctgtggaaatctggggaataaacatatgaatctaaagagaaaaagaagaaagtaaaaaagcaaaatcgaagtttttgttcaattttctgggatcaaagagcaattttcgtttctttattcgttgaaagtgtgaagcttttttgatttagtgagaagtgttaatggcgggttacagagcagatgatgattacgattacctattcaaggtggttctgatcggtgattcaggtgttggaaagtccaatttgctttctcgattcaccaggaacgagtttagtctcgagtctaaatcaacgatcggggtcgagttcgcgactcgtagcttgaatgttaatgaaaaagtcatcaaagcccagatttgggacactgctggtcaagaaagataccgagcaatcactagtgcttactatcgaggagctgttggggcgcttcttgtttacgacgtaacccgacactcaacattcgaaaacgttgagagatggctaagggaactccgtgaccacactgacccaaacatagttgtgatgcttgtgggaaacaaatccgatcttcgccatcttgtagcagtccaaaccgaagatgcaaaatcttttgcagagaatgaatcactctacttcatggaaacctcagctcttgaatctaccaatgttgagaacgcgttttctgaagtactcactcagatttaccatgttgtgagcaagaaagcaatggaggctggtgaagattccggtaatgttccttcgaaaggagagaagatcgatgttgatgtttccgcagtgaagaaaactggttgctgctccaactaaatggtcttatgtcctaaagctgaaatcggtttttaaattttacattcaaattttgtttttgaagatgtttgcttttttttaggaaaacaatctatgttattatgccttttgatttgcttgtttgaaaattgcttagctttggtctgattctgtaccggttgagggattttgtaatttaaccggttctggtctatggtttgttcagtttgtttttaattcaatccgcaaatatctctaaatc

SEQ ID NO: 2848 - protein, 214 aa, Arabidopsis thaliana
MAGYRADDDYDYLFKVVLIGDSGVGKSNLLSRFTRNEFSLESKSTIGVEFATRSLNVNEKVIKAQIWDTAGQERYRAITSAYYRGAVGALLVYDVTRHSTFENVERWLRELRDHTDPNIVVMLVGNKSDLRHLVAVQTEDAKSFAENESLYFMETSALESTNVENAFSEVLTQIYHVVSKKAMEAGEDSGNVPSKGEKIDVDVSAVKKTGCCSN

SEQ ID NO: 2849 - DNA, 929 bp, Arabidopsis thaliana
atcggtttaaagtattgaaccaatccaatatatgaggccggtttaataatccttcgatttcgattcgaactttggtttcatctccccaaatcgaagcgaaggtctctcaacaatggcgaaatcagtgtcgacggcggcttcctcgcttgtgcaaaaccttaggcggtacatcaagaagccatggcagatcaccggaccttgcgctcacccagaatacctcgaagctgttccaaaggcgacggagtatcgtctccgatgccccgctacgattgatgaagaagcaatcgtgccttcctcggatccagagaccgtatacaacatcgtataccacggcagagatcagcgcagaaaccgcccaccgatccggcgatacgtattgacgaaggacaacgtggttcagatgatgaacgagaagaagagttttgacgtctcggacttccctaaggtttacttgaccaccacagtcgaggaggatttggatacgcgtggtggaggctacgagaaataatcaggttttttgctcatctcgtctttctcttgtaacgtactgatgggggaaagactgcgcgtgacacatctctaccgacaaaaaatatctcccttgtttgattattcaataagatatctagtagctttatgaactacaaaacacttcattttccttcacaagaaacagattgttgttcagttgtattccctatctttatgatgaacccgtgatcgtgattgtttcaagtctgagtgatttagaaatggttaataatgtaatacaaagagagaaccagttagtagtagtctctgtgttcttggggaccctttcttctctccatcagtgactacctttcttctctgcatcagtgactaagaagaaggagaagaagcagaaacactatgtctccatcaatttgtgtttttatgaattttacccc

SEQ ID NO: 2850 - protein, 131 aa, Arabidopsis thaliana
MAKSVSTAASSLVQNLRRYIKKPWQITGPCAHPEYLEAVPKATEYRLRCPATIDEEAIVPSSDPETVYNIVYHGRDQRRNRPPIRRYVLTKDNVVQMMNEKKSFDVSDFPKVYLTTTVEEDLDTRGGGYEK

SEQ ID NO: 2851 - DNA, 588 bp, Arabidopsis thaliana
aaaaccgtgaaggtcggatctctttcttgatttggccgacacatctgatctaacaatggcgacgaacaacatcgtacgtttgatcgctccaagccgatccgtctcctctagattcctcgagccagtgtcacggtttctaagctccggtacacctcctccgccgcaagatccatctccgaatcaggatctgaaccgggacgtgaagcaagatcagaatcttcaacagaatctgcagatgcagaaggaagaagaagaggaaggagaaggtggtggaggtggagagtttgtgaacgaagatactggtgagattggagggcctagaggtcctgaaccgactcggtacggcgattgggaacaacgtggtcgatgctctgatttctgagaggattcatgtatccctgtgttttagcttgttcttatatatttctgggaaaaatggaaataaattcgttttatgtgtttatgtatttgcaaaataatggagaaaatggaagaaaatgtagtagaacttcaaattcgttgcctttatttggatcatcattctctggtgatcttgttattccagtaatagttaataagttcttcctc

SEQ ID NO: 2852 - protein, 108 aa, Arabidopsis thaliana
MATNNIVRLIAPSRSVSSRFLEPVSRFLSSGTPPPPQDPSPNQDLNRDVKQDQNLQQNLQMQKEEEEEGEGGGGGEFVNEDTGEIGGPRGPEPTRYGDWEQRGRCSDF

SEQ ID NO: 2853 - protein, 66 aa, Arabidopsis thaliana
MYPCVLACSYIFLGKMEINSFYVFMYLQNNGENGRKCSRTSNSLPLFGSSFSGDLVIPVIVNKFFL

SEQ ID NO: 2854 - DNA, 1010 bp, Arabidopsis thaliana
atcttctaagaaagaaacaaagaaagacttcacattttaccattatttgctctgagctcagtaggagagttcaagaaacaatggcaaagatgcaattatcaatctttatcgctgtcgttgcgcttatcgtctgctctgcatctgctaaaaccgcaagccctccagctccagtgctgccaccgacaccagctccagcaccagccccggaaaatgtgaatctcaccgagcttttaagtgtagctggtccgttccacacattcctcgactaccttctctcgactggagtcattgagactttccaaaaccaagctaacaacactgaggaaggcatcacaatctttgtccctaaagatgatgctttcaaagctcagaagaatcctcctttgtcaaatctcacaaaggatcagcttaagcagcttgttctcttccatgctcttcctcattactattcgctttcggaattcaagaacttgagccaatctggtccagtgagcacctttgctggtggtcaatactccttgaaattcactgatgtttctggcacggttaggattgattctttatggaccaggactaaagtcagcagcagtgttttctccactgaccctgttgcggtttaccaagtgaaccgcgtgcttctacccgaagcaatctttggtactgatgtccctccaatgcctgctccagctcctgctcctatcgttagtgctccttcggattctccttcagttgctgattctgaaggagcttcttcaccaaagtcctcacacaagaactccggacaaaagctgctacttgcaccaatctccatggttatttccggtttggtggcattgttcttgtgatcagatggttttgcagattgagttatgtttttaagttacaatgtgaaagattgtattacatcatttgaattgtctttttgatttttgaaacccattttttattatacatttttatcattattattgtttgtcattacgattgttgtgaattgaaattgttcctcc

SEQ ID NO: 2855 - protein, 280 aa, Arabidopsis thaliana
LLRKKQRKTSHFTIICSELSRRVQETMAKMQLSIFIAVVALIVCSASAKTASPPAPVLPPTPAPAPAPENVNLTELLSVAGPFHTFLDYLLSTGVIETFQNQANNTEEGITIFVPKDDAFKAQKNPPLSNLTKDQLKQLVLFHALPHYYSLSEFKNLSQSGPVSTFAGGQYSLKFTDVSGTVRIDSLWTRTKVSSSVFSTDPVAVYQVNRVLLPEAIFGTDVPPMPAPAPAPIVSAPSDSPSVADSEGASSPKSSHKNSGQKLLLAPISMVISGLVALFL

SEQ ID NO: 2856 - protein, 254 aa, Arabidopsis thaliana
MAKMQLSIFIAVVALIVCSASAKTASPPAPVLPPTPAPAPAPENVNLTELLSVAGPFHTFLDYLLSTGVIETFQNQANNTEEGITIFVPKDDAFKAQKNPPLSNLTKDQLKQLVLFHALPHYYSLSEFKNLSQSGPVSTFAGGQYSLKFTDVSGTVRIDSLWTRTKVSSSVFSTDPVAVYQVNRVLLPEAIFGTDVPPMPAPAPAPIVSAPSDSPSVADSEGASSPKSSHKNSGQKLLLAPISMVISGLVALFL

SEQ ID NO: 2857 - protein, 251 aa, Arabidopsis thaliana
MQLSIFIAVVALIVCSASAKTASPPAPVLPPTPAPAPAPENVNLTELLSVAGPFHTFLDYLLSTGVIETFQNQANNTEEGITIFVPKDDAFKAQKNPPLSNLTKDQLKQLVLFHALPHYYSLSEFKNLSQSGPVSTFAGGQYSLKFTDVSGTVRIDSLWTRTKVSSSVFSTDPVAVYQVNRVLLPEAIFGTDVPPMPAPAPAPIVSAPSDSPSVADSEGASSPKSSHKNSGQKLLLAPISMVISGLVALFL

SEQ ID NO: 2858 - DNA, 803 bp, Arabidopsis thaliana
gttgcttaacctattagagtttccttcctccaacaaaccatctttataagactccaaaatggagggtaagagatcacaaggacaaggttacatgaaaaagaagtcttaccttgtggaagaagatatggagactgatacggatgaagaagaggaagtaggtagggatagagttagagggtctagaggtagcatcaatcgtggtggctcgttgcggctttgccaagtagatagatgcacagctgatatgaaagaggcaaaactgtatcaccggagacacaaagtgtgtgaagttcatgcaaaggcatcttctgtctttctctcaggacttaaccaacgcttttgtcaacaatgcagtaggtttcatgacctccaagagtttgatgaagctaagagaagttgcaggaggcgcttagctggacacaatgagcgaagaaggaagagctctggtgagagtacttatggagaaggatcaggtcggagaggaatcaatggtcaggtggtgatgcagaatcaagaaagatcaagggtagagatgacacttcctatgccaaactcatcattcaagcgaccacagattagatagagaagctgtctgctctctctcttctgtcatctaaacttctctcttagaatcctaaaattgtggtatctaacaatgttatagagaaataaataactaccactctctctagtactctctaatgttatcagctatatgcaaacgctaagactatacttgaaccttgagtgttatcttgtatgtttcaaagatatggctaatgatatgtgtaatacttctacct

SEQ ID NO: 2859 - protein, 174 aa, Arabidopsis thaliana
MEGKRSQGQGYMKKKSYLVEEDMETDTDEEEEVGRDRVRGSRGSINRGGSLRLCQVDRCTADMKEAKLYHRRHKVCEVHAKASSVFLSGLNQRFCQQCSRFHDLQEFDEAKRSCRRRLAGHNERRRKSSGESTYGEGSGRRGINGQVVMQNQERSRVEMTLPMPNSSFKRPQIR

SEQ ID NO: 2860 - protein, 163 aa, Arabidopsis thaliana
MKKKSYLVEEDMETDTDEEEEVGRDRVRGSRGSINRGGSLRLCQVDRCTADMKEAKLYHRRHKVCEVHAKASSVFLSGLNQRFCQQCSRFHDLQEFDEAKRSCRRRLAGHNERRRKSSGESTYGEGSGRRGINGQVVMQNQERSRVEMTLPMPNSSFKRPQIR

SEQ ID NO: 2861 - protein, 152 aa, Arabidopsis thaliana
METDTDEEEEVGRDRVRGSRGSINRGGSLRLCQVDRCTADMKEAKLYHRRHKVCEVHAKASSVFLSGLNQRFCQQCSRFHDLQEFDEAKRSCRRRLAGHNERRRKSSGESTYGEGSGRRGINGQVVMQNQERSRVEMTLPMPNSSFKRPQIR

SEQ ID NO: 2862 - DNA, 1213 bp, Arabidopsis thaliana
ctgtgactgtgagtgaagaagataatgcagactcaccttttggtgggacctatcccactcaaaggctaccgtcgattctcttcctcctccttctccggcgatctcctccctccgtcgtctaaccctatcggccgagacctattccctcaccgtcgaaggcaccgcgacggcaaatctcggagttaccgtaatcgctcgaaaacgacgattactagtgctgcgttttcttcaagttctaataccggcgggcagaatcattacgctgttttgggcatcgctcgaaacgccacacaaggtgacatcaagagagcttatcgtttgctagctcgaaagtttcatcctgatgttaataaggactctaaagccggagagctattcaagagtgtccgttgttcctacgaagtactatctaatgaagctacaaggactcagtacgacagagcacttaaacttcaagaaaattcccggttccatagagtgaaaaggcacagctacacccctgaggttgaagatgccatgaagtattactacacctggtctgagaaaagacaaagatccagacacgggagattctatggacactattctacatatccaaactcacatttctacgctgagaccgagccgcaagaagaagaaggagtagaaacagcaccagaccagcgagactcatttgttgaagctctcaaatccgccttcttatcgatgtttcttctatatacattcggttgcctagcatctctcacatttagcacattcacagcgttgctcgacaaggaactcgacatgggttacaaagtcggattcatgatcgcttggatacttggcggaaaaggcggtatccttcttactctctgcttaacatttgcaagctggctctgtgggaaagcaagcagcagcgtggtggttcttgtgttagtagcaatgtgggttggctctaatttagctagacatgctcctcttccacaaggtgctcttctcaccctcctctacatgtcaatcaaacttcaagtcgactcaacctgaatcttctgtaagtttccactacgttttagattgtaaatagctaagttacattatttgtatcctatgatttgggtcttggagaaaaatgattagtagtaaagagaagaaattgcttgaaggttacaaactctttgttattctttttccaagattacaaatcaatgaatcaaaagttacaaaattcagc

SEQ ID NO: 2863 - protein, 333 aa, Arabidopsis thaliana
MQTHLLVGPIPLKGYRRFSSSSFSGDLLPPSSNPIGRDLFPHRRRHRDGKSRSYRNRSKTTITSAAFSSSSNTGGQNHYAVLGIARNATQGDIKRAYRLLARKFHPDVNKDSKAGELFKSVRCSYEVLSNEATRTQYDRALKLQENSRFHRVKRHSYTPEVEDAMKYYYTWSEKRQRSRHGRFYGHYSTYPNSHFYAETEPQEEEGVETAPDQRDSFVEALKSAFLSMFLLYTFGCLASLTFSTFTALLDKELDMGYKVGFMIAWILGGKGGILLTLCLTFASWLCGKASSSVVVLVLVAMWVGSNLARHAPLPQGALLTLLYMSIKLQVDST

SEQ ID NO: 2864 - protein, 169 aa, Arabidopsis thaliana
MKYYYTWSEKRQRSRHGRFYGHYSTYPNSHFYAETEPQEEEGVETAPDQRDSFVEALKSAFLSMFLLYTFGCLASLTFSTFTALLDKELDMGYKVGFMIAWILGGKGGILLTLCLTFASWLCGKASSSVVVLVLVAMWVGSNLARHAPLPQGALLTLLYMSIKLQVDST

SEQ ID NO: 2865 - DNA, 590 bp, Arabidopsis thaliana
aatagacacaaaagcatataagcaaaaaatacaaaacaaattatggcttcttcatcactcatcagtgtagccctaaccctaatcttgatcttccacctcatgccggaaacaaccgtcgctcgtcgtcttactgatcaggagccgagtgatgaagtagtcaccaccactaccgacgaagctaacaacctaccgtttccaccgggcttgccatttggcggtgttcctccgttaccgtcactttttccgccgtttgtaccttctccgttccctggaaatatcccacgtttaccatttccgtttccgtttccgacatcacctccggcgccatcccttcctggtttccctggctttacgtttcctcccctgccattcctcacaccgccacctctgtgaacgtatacgttagcgccgttataatgttagttatcccgttggaataatctcatggtaatttcgataatcatcatgtgtactcgatgatataatactggtttttaatgaaaattttaataaagatatgttgtgtacttgtgtttgtgtaaatgtaacacaatgttgatctaagaaataaaggaccgatcgatttgagg

SEQ ID NO: 2866 - protein, 116 aa, Arabidopsis thaliana
MASSSLISVALTLILIFHLMPETTVARRLTDQEPSDEVVTTTTDEANNLPFPPGLPFGGVPPLPSLFPPFVPSPFPGNIPRLPFPFPFPTSPPAPSLPGFPGFTFPPLPFLTPPPL

SEQ ID NO: 2867 - protein, 97 aa, Arabidopsis thaliana
MPETTVARRLTDQEPSDEVVTTTTDEANNLPFPPGLPFGGVPPLPSLFPPFVPSPFPGNIPRLPFPFPFPTSPPAPSLPGFPGFTFPPLPFLTPPPL

SEQ ID NO: 2868 - DNA, 1057 bp, Arabidopsis thaliana
gagatgaaacacaaaaattggactttggtttgaaattggcgacatttttgggaaatctagagactaataatcaatttcgtcaaaagatcaaatcttgctaaattttcttctgctcgtttgattttccgaatcgttggtttcgataagtgaagaaaagatggggaatttgttcgtgaagaaaccacagatcacggaggttgatcgagcgattctctctctcaaaacccaaagacgcaagcttggtcaatatcagcagaagcttgagaaagtaattgaagcggaaaagcaagctgcaagagacttaatccgtgaaaagcgaaaggacagagctttgttagcattgaggaagaaacgaactcaagaagagttattgaagcaagtggatcaatgggtcatcaatgttgaacaacaattaacagatattgaacttacgagcaaacaaaaggcagtgtttgagagcttaaagcagggtaatagtgctattaaggccattcaaagcgaattggaccttgatgatgttcaaaaactaatggatgatactgctgatgctaaagcttatcaagatgagctgaacgctatattgggagagaaactatcagcagaggatgaggaagatatattagcagaatttgacaacctagaaagtcagcttattgttgatgagatgcctgaagtgcctacaaaggagtctgaagaatctgagaagctggatcttccggatgtgccaacaaaaactcctgtcgcttccaatgcggaaatcacaccagctgagtccgccacaaaaacaaaagttctcgaagaacctttgccggcttgagctagaagaaactgatcagcaatacgattttatcattcttttaccagttttttctttggtgctctctgaagttttctgtataatctttgaagtcgctgtcatttgtaaagaacaagatatatttggaatcccattgtgtttcgggaaagttagcacaattaacttactctttggttcaaacatacggaaggatttagatttaaagaatgaaaaacaagattatggtaagagttttccaac

SEQ ID NO: 2869 - protein, 219 aa, Arabidopsis thaliana
MGNLFVKKPQITEVDRAILSLKTQRRKLGQYQQKLEKVIEAEKQAARDLIREKRKDRALLALRKKRTQEELLKQVDQWVINVEQQLTDIELTSKQKAVFESLKQGNSAIKAIQSELDLDDVQKLMDDTADAKAYQDELNAILGEKLSAEDEEDILAEFDNLESQLIVDEMPEVPTKESEESEKLDLPDVPTKTPVASNAEITPAESATKTKVLEEPLPA

SEQ ID NO: 2870 - protein, 132 aa, Arabidopsis thaliana
MRCLKCLQRSLKNLRSWIFRMCQQKLLSLPMRKSHQLSPPQKQKFSKNLCRLELEETDQQYDFIILLPVFSLVLSEVFCIIFEVAVICKEQDIFGIPLCFGKVSTINLLFGSNIRKDLDLKNEKQDYGKSFP

SEQ ID NO: 2871 - protein, 112 aa, Arabidopsis thaliana
MCQQKLLSLPMRKSHQLSPPQKQKFSKNLCRLELEETDQQYDFIILLPVFSLVLSEVFCIIFEVAVICKEQDIFGIPLCFGKVSTINLLFGSNIRKDLDLKNEKQDYGKSFP

SEQ ID NO: 2872 - DNA, 956 bp, Arabidopsis thaliana
gacgttctttcatttttcccgttatccagacacactcgcgaaaatggcggctcactcttcttgcaactttgctttgacgaatccgatcatctcacaaatcgattctttctctaagaagaaactatctgttccattatacttcttctctacaagaaaagcattgacgaatccttggttaggcgttgttgattcatccctctctctcacttctccagtctccgctctacaaactaatcgcccaagaagaatccataaatccgccatctccagcttacccaccgcgaatccagatttagtggtttctgatgcgaaaaagcccaaatggtcatggagggcaattaaatcatttgcaatgggagagcttgaagctaggaagctcaagtatccaaatactggaactgaagcacttctcatgggtattttgattgaaggaactagttttacttcaaagtttttgcgggcgaataagattatgctttacaaagtgcgtgaagaaacggtcaagttactaggaaaggcagatatgtatttctttagcccggaacatcctcctttaactgaagatgctcaaagagcacttgactctgctctggatcagaatctaaaagcaggtggtatcggggaagtaatgccagcacatatactacttgggatttggtctgaagttgaatctccaggtcacaagatactggcaactcttggtttcactgatgagaaatctaaagagttagagtcttttgcctctgaatctggctttttagatgaatagtatattacatccatatcatttctccattaatgcaaaatctccaagttcatagttgctgtttgcaataatattcgtatgtgttcgtctttgctcattcttattttcggttctttgtttcgcctttaagactttaagcttttttcacaaaaactactaacacttgatccttaagctttacttgctatat

SEQ ID NO: 2873 - protein, 255 aa, Arabidopsis thaliana
TFFHFSRYPDTLAKMAAHSSCNFALTNPIISQIDSFSKKKLSVPLYFFSTRKALTNPWLGVVDSSLSLTSPVSALQTNRPRRIHKSAISSLPTANPDLVVSDAKKPKWSWRAIKSFAMGELEARKLKYPNTGTEALLMGILIEGTSFTSKFLRANKIMLYKVREETVKLLGKADMYFFSPEHPPLTEDAQRALDSALDQNLKAGGIGEVMPAHILLGIWSEVESPGHKILATLGFTDEKSKELESFASESGFLDE

SEQ ID NO: 2874 - protein, 241 aa, Arabidopsis thaliana
MAAHSSCNFALTNPIISQIDSFSKKKLSVPLYFFSTRKALTNPWLGVVDSSLSLTSPVSALQTNRPRRIHKSAISSLPTANPDLVVSDAKKPKWSWRAIKSFAMGELEARKLKYPNTGTEALLMGILIEGTSFTSKFLRANKIMLYKVREETVKLLGKADMYFFSPEHPPLTEDAQRALDSALDQNLKAGGIGEVMPAHILLGIWSEVESPGHKILATLGFTDEKSKELESFASESGFLDE

SEQ ID NO: 2875 - protein, 138 aa, Arabidopsis thaliana
MGELEARKLKYPNTGTEALLMGILIEGTSFTSKFLRANKIMLYKVREETVKLLGKADMYFFSPEHPPLTEDAQRALDSALDQNLKAGGIGEVMPAHILLGIWSEVESPGHKILATLGFTDEKSKELESFASESGFLDE

SEQ ID NO: 2876 - DNA, 974 bp, Arabidopsis thaliana
ataaatgctcttctcctccgatctctccgccataaaatctactctttcttcttctgggtgttcaaagaattagtcgttctcgcgtattcactttccatggcgggctttctctccgttgtccggcgcgtgtacctcactctctacaattggatcgtctttgctggatgggctcaggttttgtacttagcgataacgacgttgaaggaaacgggttatgagaatgtctatgacgccattgagaagcctctccagcttgctcagactgccgccgttctcgagattcttcatggattagtaggtttggtcagatctcctgtttctgcaactctgccacagataggttcaaggctatttctcacttggggcatcctatacagttttccagaggtccgatctcattttcttgttacgtcgctggtcataagctggtctatcacagagattattcgctactcattcttcggctttaaggaagctctaggctttgcaccttcatggcacttgtggctcagatacagcagctttttattgctataccctaccggtatcaccagcgaagttggtcttatctaccttgccttaccacacatcaagacatcggagatgtacagcgttaggatgcctaacatattgaacttctcatttgacttcttctatgcaacgatactcgtccttgcaatctatgtcccaggtagcccacacatgtacaggtacatgcttggtcagcgaaagagagctctctccaaatccaagagggaataaaagaaaagatttagaaagagacgaaaaagctcatcaactgttttctcctcttgtcttgttcgttcatgtactactagtctactactacaacttgtcttttgtttagcttgtttgagcttttacttcctcggcgattacttgaacttacatgcagcaggatactattaagtgtaatgtggtttctaaattaataagaaaatcattggttcctt

SEQ ID NO: 2877 - protein, 253 aa, Arabidopsis thaliana
INALLLRSLRHKIYSFFFWVFKELVVLAYSLSMAGFLSVVRRVYLTLYNWIVFAGWAQVLYLAITTLKETGYENVYDAIEKPLQLAQTAAVLEILHGLVGLVRSPVSATLPQIGSRLFLTWGILYSFPEVRSHFLVTSLVISWSITEIIRYSFFGFKEALGFAPSWHLWLRYSSFLLLYPTGITSEVGLIYLALPHIKTSEMYSVRMPNILNFSFDFFYATILVLAIYVPGSPHMYRYMLGQRKRALSKSKRE

SEQ ID NO: 2878 - protein, 221 aa, Arabidopsis thaliana
MAGFLSVVRRVYLTLYNWIVFAGWAQVLYLAITTLKETGYENVYDAIEKPLQLAQTAAVLEILHGLVGLVRSPVSATLPQIGSRLFLTWGILYSFPEVRSHFLVTSLVISWSITEIIRYSFFGFKEALGFAPSWHLWLRYSSFLLLYPTGITSEVGLIYLALPHIKTSEMYSVRMPNILNFSFDFFYATILVLAIYVPGSPHMYRYMLGQRKRALSKSKRE

SEQ ID NO: 2879 - DNA, 1311 bp, Arabidopsis thaliana
actgcaaattttgatattttgggttttagcagtgaagtttgcgaaaatggcgtcttcggtttttctatccagtttctcgtcatcgtcttctttgcaactctgctcttcctttcacggcgagtacttagctccgtcgagatgctttctcggagctccggtcacttcctcttctttatcactctccggtaagaagaactcatattctccgagacagttccatgtttctgccaagaaagtttctgggttagaggaagccattagaatcagaaaaatgagagagcttgaaactaaatcaaaagttaggagaaatccaccattaagacgtggaagagtatcgcctcgtcttcttgtacctgatcacattccaaggcctccttatgttgagtctggtgtattaccggatatatcaagtgagttccagattcctggtcctgaaggcattgcgaaaatgagagctgcttgcgagcttgctgctcgggttttaaactatgctggaactttggttaagccatctgttacgactaatgaaatcgataaagctgtgcatgatatgattattgaagctggtgcttatccttcacctcttggatatggtggatttcctaaaagtgtgtgtacttcagttaatgagtgtatgtgtcacggaataccagattctcgccagctacagagcggggatataatcaacatcgatgtcacggtttacttggatggttaccatggagatacgtcgagaactttcttctgtggagaagttgacgaaggtttcaaacgacttgtgaaggttacggaagaatgtttggagagaggtattgcagtttgtaaagacggagcaagcttcaagaaaatcgggaaaagaatcagtgagcatgcggaaaagttcggctacaacgttgtggagcggtttgttgggcatggtgttggaccagtattccactccgaacctcttatatatcattaccgaaatgatgagcctggactaatggttgagggacagacattcacaattgaaccgattctcacgattggaaccacagaatgtgtaacatggccagacaactggactactctgacagcagatggtggcgtcgctgctcagtttgagcataccattctgattactagaactggttcagagattcttaccaaatgctaaaactattcacattgatcatttccatttcaccttttatttgctgatcatttaaggtccatagtataaattcattatctttgagaccatagtctaacaatttgtgttagtgccatcttttaagatctcaagattagtttgctattaaaaattttccc

SEQ ID NO: 2880 - protein, 384 aa, Arabidopsis thaliana
LQILIFWVLAVKFAKMASSVFLSSFSSSSSLQLCSSFHGEYLAPSRCFLGAPVTSSSLSLSGKKNSYSPRQFHVSAKKVSGLEEAIRIRKMRELETKSKVRRNPPLRRGRVSPRLLVPDHIPRPPYVESGVLPDISSEFQIPGPEGIAKMRAACELAARVLNYAGTLVKPSVTTNEIDKAVHDMIIEAGAYPSPLGYGGFPKSVCTSVNECMCHGIPDSRQLQSGDIINIDVTVYLDGYHGDTSRTFFCGEVDEGFKRLVKVTEECLERGIAVCKDGASFKKIGKRISEHAEKFGYNVVERFVGHGVGPVFHSEPLIYHYRNDEPGLMVEGQTFTIEPILTIGTTECVTWPDNWTTLTADGGVAAQFEHTILITRTGSEILTKC

SEQ ID NO: 2881 - protein, 369 aa, Arabidopsis thaliana
MASSVFLSSFSSSSSLQLCSSFHGEYLAPSRCFLGAPVTSSSLSLSGKKNSYSPRQFHVSAKKVSGLEEAIRIRKMRELETKSKVRRNPPLRRGRVSPRLLVPDHIPRPPYVESGVLPDISSEFQIPGPEGIAKMRAACELAARVLNYAGTLVKPSVTTNEIDKAVHDMIIEAGAYPSPLGYGGFPKSVCTSVNECMCHGIPDSRQLQSGDIINIDVTVYLDGYHGDTSRTFFCGEVDEGFKRLVKVTEECLERGIAVCKDGASFKKIGKRISEHAEKFGYNVVERFVGHGVGPVFHSEPLIYHYRNDEPGLMVEGQTFTIEPILTIGTTECVTWPDNWTTLTADGGVAAQFEHTILITRTGSEILTKC

SEQ ID NO: 2882 - protein, 294 aa, Arabidopsis thaliana
MRELETKSKVRRNPPLRRGRVSPRLLVPDHIPRPPYVESGVLPDISSEFQIPGPEGIAKMRAACELAARVLNYAGTLVKPSVTTNEIDKAVHDMIIEAGAYPSPLGYGGFPKSVCTSVNECMCHGIPDSRQLQSGDIINIDVTVYLDGYHGDTSRTFFCGEVDEGFKRLVKVTEECLERGIAVCKDGASFKKIGKRISEHAEKFGYNVVERFVGHGVGPVFHSEPLIYHYRNDEPGLMVEGQTFTIEPILTIGTTECVTWPDNWTTLTADGGVAAQFEHTILITRTGSEILTKC

SEQ ID NO: 2883 - DNA, 629 bp, Arabidopsis thaliana
aaggaaaaataagaaacaagaacaactagggtttgattaacctagcttgttttttatttaaagttctatgaagataacaactttcatcataagatctttatcgttgttatctatgatctatcaaatgcaaagtcttttgacattgatagatatataaatgattccttttgaacttttctcaagacaccattccgcttgatttttttgatatctttctttctattcaacaaaaatgatttcgctaagtttcatcgtgcgtctagcaaaccaggagaacagacgaaacagaaggtacgaaactaacattaaggatcgtcttgtctcgggggagttatcggacggtagcagaccagccagagatcaaaacggtgtcccgagaggacatcttgcggtctatgtggggcgcgaagagaggcaaaggtttgtgataccgaccaagtatcttcaatatcctgaatttaggagtttgatggatgaagtagcggacgagtttgggtacgatcatgaaggagggattcatattccttgtgaagaaagtgtttttgaagagattttgattagatacatgtcttgtgacaagaagaaataagtgtacatacaatacaaatatatataagcatttttaaaat

SEQ ID NO: 2884 - protein, 118 aa, Arabidopsis thaliana
MISLSFIVRLANQENRRNRRYETNIKDRLVSGELSDGSRPARDQNGVPRGHLAVYVGREERQRFVIPTKYLQYPEFRSLMDEVADEFGYDHEGGIHIPCEESVFEEILIRYMSCDKKK

SEQ ID NO: 2885 - DNA, 932 bp, Arabidopsis thaliana
aactcttcacgctgtcccgaaaaagactcttctcttctctcttcctctttccttcacacaactctctcattctactctctgttttttttctttaatcataacatttttttgaagaacagagattctttttgtttgtgtaagagatgggaaattgtcaagcggttgatgcggctgcgttggttctacaacatcctgatggcaagatcgatagatattacggtcctgtatccgttagtgagatcatgcgtatgtatcctggtcactacgtttctcttattattcctttgccggagaagaatattccggcgacaacaacaacaacagatgataagagtgagagaaaggttgtgaggttcacgcgcgtgaaacttctccgaccaacggagaatcttgtacttggtcatgcttatcgtctcatcacttcacaagaggttatgaaggttttaagagccaagaagtacgcgaaaacaaagaaacaccaaagtgaaacgagtaaggagaagaagaagccatcatcggagaagaagattgatgaagaatccgacaagaatcagaatctggaaacgaaagatgagaagcaacgttcagtgttaacgaattcagcttcatcgagatcaaaaacatggaggccatcattgcagagcatctctgaagctacgagttgatgtttgggttttacgtgagggacaagaaacgtagtctctgtgtgtgaatcattcagaagatggaatctgaagaagaaagagatataaacattattgaataaactcttctcttatgttcctttctggttataatttacataggagatgaaaattttatagattaagatgtaaaaagaactatgcagagattaagaactaagtcccttttttgtcctgttaatgtatatatgtgctccatgtgaagaaatcaatcaaaaaatagattgt

SEQ ID NO: 2886 - protein, 173 aa, Arabidopsis thaliana
MGNCQAVDAAALVLQHPDGKIDRYYGPVSVSEIMRMYPGHYVSLIIPLPEKNIPATTTTTDDKSERKVVRFTRVKLLRPTENLVLGHAYRLITSQEVMKVLRAKKYAKTKKHQSETSKEKKKPSSEKKIDEESDKNQNLETKDEKQRSVLTNSASSRSKTWRPSLQSISEATS

SEQ ID NO: 2887 - protein, 140 aa, Arabidopsis thaliana
MRMYPGHYVSLIIPLPEKNIPATTTTTDDKSERKVVRFTRVKLLRPTENLVLGHAYRLITSQEVMKVLRAKKYAKTKKHQSETSKEKKKPSSEKKIDEESDKNQNLETKDEKQRSVLTNSASSRSKTWRPSLQSISEATS

SEQ ID NO: 2888 - protein, 138 aa, Arabidopsis thaliana
MYPGHYVSLIIPLPEKNIPATTTTTDDKSERKVVRFTRVKLLRPTENLVLGHAYRLITSQEVMKVLRAKKYAKTKKHQSETSKEKKKPSSEKKIDEESDKNQNLETKDEKQRSVLTNSASSRSKTWRPSLQSISEATS

SEQ ID NO: 2889 - DNA, 958 bp, Arabidopsis thaliana
agatcttaaatcgatgcaaaagaaaacgataaatctcgtttggttaaaaaattaaccagaaaacgagatctgacttctaacttctacttctacttagatctcctcaaaattcaaatcggaaaaaagtttgagaaaaatctcgatgaagaagaagatgattccgacgacgatcttactctcagctctcattttctctctatcaccgatctgtgaagctgtgtggcttactgtacctcacaccggatcaaagtgcgtctccgaagaaatccaaagcaacgtcatcgttttagctgattaccttgttatctccgaggaacattctatcttccctactgtctccgttaaggttacagcaccttatggcaccgtgttacaccacagggaaaatacaacaaacggtcagtttgcattcacaacccaagaatcaggaacttacttggcgtgttttgaggccgatgctaaaagtcatggtaacaaagattttagcatcaacatcgactggaaaactggaatcgcagctaaagattgggactccattgctagaaaagaaaagatcgagggtgtagagctggagtttaagaaacttgaaggtgcagttgaagcaatccatgaaaatctgatttacctcagaaacagagaagcagagatgaggattgtgagtgaaaaaacaaactcgagagtcgcatggtacagtataatgtcgctggggatttgcattgtggtctctggtttacagattttgtacttgaagcaatactttgaaaagaagaagcttatttagatcatggatagtttcttgttgaagattactagaaccaacagtttgctctgctttctttctcttgatcttctctttggaactgttagtgtaaaattttgttcactcatttaacttgtaatttgtctcctattattacatataacatataactagactctaattataggaattgcaact

SEQ ID NO: 2890 - protein, 212 aa, Arabidopsis thaliana
MKKKMIPTTILLSALIFSLSPICEAVWLTVPHTGSKCVSEEIQSNVIVLADYLVISEEHSIFPTVSVKVTAPYGTVLHHRENTTNGQFAFTTQESGTYLACFEADAKSHGNKDFSINIDWKTGIAAKDWDSIARKEKIEGVELEFKKLEGAVEAIHENLIYLRNREAEMRIVSEKTNSRVAWYSIMSLGICIVVSGLQILYLKQYFEKKKLI

SEQ ID NO: 2891 - protein, 208 aa, Arabidopsis thaliana
MIPTTILLSALIFSLSPICEAVWLTVPHTGSKCVSEEIQSNVIVLADYLVISEEHSIFPTVSVKVTAPYGTVLHHRENTTNGQFAFTTQESGTYLACFEADAKSHGNKDFSINIDWKTGIAAKDWDSIARKEKIEGVELEFKKLEGAVEAIHENLIYLRNREAEMRIVSEKTNSRVAWYSIMSLGICIVVSGLQILYLKQYFEKKKLI

SEQ ID NO: 2892 - DNA, 625 bp, Arabidopsis thaliana
atctctctctctctctcccttctcacatttctctccactcagatttccaattcctaaagatagagagaatgactaaaatctctgttggattgcaacttgtgacaagagattcgagggaaaaactaaacaatatagtgatcaaatcttcactgagactaaaccgatccaatccaaacatctcggagctttgtttccttaaaacatgtcatctctgcaataaacaactccatcaagacaaagatgtttacatgtacagaggagatttgggattttgtagtagagagtgcagagaaagtcagatgttgattgatgatagaaaagaactagaggcttcgacgaagatgatgttggcttcgtacagacgatgtaataacggcgccggaaaaagcgagtctcggaatttgtttgatgatctccggcgacgacgtcaattatttatagttccttgaggcttctttaagcaatatctaattatagtttttttggttacacatcttatgaaagttattagtaaaagaaagagaattaaattgtatctccggttgtcatttttcaaaatcttaaatgttaattggacagtttatgtggtgatctcattctcaggtggtttaattactgatttagc

SEQ ID NO: 2893 - protein, 148 aa, Arabidopsis thaliana
LSLSLPSHISLHSDFQFLKIERMTKISVGLQLVTRDSREKLNNIVIKSSLRLNRSNPNISELCFLKTCHLCNKQLHQDKDVYMYRGDLGFCSRECRESQMLIDDRKELEASTKMMLASYRRCNNGAGKSESRNLFDDLRRRRQLFIVP

SEQ ID NO: 2894 - protein, 126 aa, Arabidopsis thaliana
MTKISVGLQLVTRDSREKLNNIVIKSSLRLNRSNPNISELCFLKTCHLCNKQLHQDKDVYMYRGDLGFCSRECRESQMLIDDRKELEASTKMMLASYRRCNNGAGKSESRNLFDDLRRRRQLFIVP

SEQ ID NO: 2895 - DNA, 855 bp, Arabidopsis thaliana
actaacttctacataaacaaactcgttgcgctcttctcaattccacgaatcacacactcttcttcttcttctgttcatcaaagaaaacgaaacccatttctcaaaatccaaaattttcaaaaactcaaaactcatcatgggtttcatttcttcttcatcaccagtagaagagtctcattaccatacacacaagatcttccttttctccaactacatccttctcggcgctgcttcaagttgtatcttcctcacactctctctccgtctaatcccttccatctgcggattcctcctcatcctcctccacgccaccacaatcgccgccgcagtctcaggctgcgctgctgcatcttgcggaagaaaccgttggtacgccgctcacatggttgcaactgtgctcactgctatattccaaggctctgtctctgttctcatcttcaccaacacgtctaaattcctcgggagtcttaagtcgtatgtgcgtgacgaagatgctgctgtgattttgaaactcggtggtggtctttgtattgtgatcttttgtcttgattggatcgttcttgtgtgtgctttcttcttgaagtactatgcttatgtcgatggtggtgatggcgttgcgatgaagagaactggtaaggttcagagtgaggagaatccgaaggactggccatggccgttccaagtttaaagtttgtgtccttttgttttgtggtgagaactgttgagttagatcaatatcaaatgttggttttatggttctgtttcggtgggtattattgtgatttgttcatttgttttttgagtgtttgatgtaattcgtcaatgatctgttacatatataaagtcttttcttat

SEQ ID NO: 2896 - protein, 183 aa, Arabidopsis thaliana
MGFISSSSPVEESHYHTHKIFLFSNYILLGAASSCIFLTLSLRLIPSICGFLLILLHATTIAAAVSGCAAASCGRNRWYAAHMVATVLTAIFQGSVSVLIFTNTSKFLGSLKSYVRDEDAAVILKLGGGLCIVIFCLDWIVLVCAFFLKYYAYVDGGDGVAMKRTGKVQSEENPKDWPWPFQV

SEQ ID NO: 2897 - protein, 150 aa, Arabidopsis thaliana
TNFYINKLVALFSIPRITHSSSSSVHQRKRNPFLKIQNFQKLKTHHGFHFFFITSRRVSLPYTQDLPFLQLHPSRRCFKLYLPHTLSPSNPFHLRIPPHPPPRHHNRRRSLRLRCCILRKKPLVRRSHGCNCAHCYIPRLCLCSHLHQHV

SEQ ID NO: 2898 - protein, 101 aa, Arabidopsis thaliana
MVATVLTAIFQGSVSVLIFTNTSKFLGSLKSYVRDEDAAVILKLGGGLCIVIFCLDWIVLVCAFFLKYYAYVDGGDGVAMKRTGKVQSEENPKDWPWPFQV

SEQ ID NO: 2899 - DNA, 836 bp, Arabidopsis thaliana
acaatcgctggactctgctactgcgaagaacaacaaattccttgtttatcatggcgaattccggcgaagagaagttgaagctctactcttactggagaagctcgtgtgctcatcgtgtccgtatcgccctcgctttgaaagggcttgattatgagtatataccagtgaatttgctcaagggtgatcaattcgattcagatttcaagaagatcaatccaatgggaactgtaccagctctggtggatggagatgttgtgattaatgattcttttgcgataataatgtatctggatgagaagtaccctgagccacctttgttacctcgtgacctccataaacgagctgtgaattaccaggcaatgagtattgtcttgtctggcatacagcctcatcaaaatctggctgttattaggtatatcgaggaaaagataaatgtggaggagaagactgcttgggttaataatgctatcacaaaaggatttacagctctcgagaaactgttggtgaattgcgctgggaaacttgcgactggtgatgaaatttacctggctgatctctttctagcaccacagatccacggagcaatcaacagattccagattaacatggaaccatacccaaatcttgcaaaatgttacgaatcatacaaggaactgcctgtgtttcaaaatgcactaccggaaaagcagccagatgctccttcttccaccaactgattccgtgaacccgtaagctacgctcagcttaataaaacctcagacaacaacaacaatgatgagagtaataccttgtactcgtacatgtatcatataaaccagttacatcttagttcctcc

SEQ ID NO: 2900 - protein, 237 aa, Arabidopsis thaliana
NRWTLLLRRTTNSLFIMANSGEEKLKLYSYWRSSCAHRVRIALALKGLDYEYIPVNLLKGDQFDSDFKKINPMGTVPALVDGDVVINDSFAIIMYLDEKYPEPPLLPRDLHKRAVNYQAMSIVLSGIQPHQNLAVIRYIEEKINVEEKTAWVNNAITKGFTALEKLLVNCAGKLATGDEIYLADLFLAPQIHGAINRFQINMEPYPNLAKCYESYKELPVFQNALPEKQPDAPSSTN

SEQ ID NO: 2901 - protein, 221 aa, Arabidopsis thaliana
MANSGEEKLKLYSYWRSSCAHRVRIALALKGLDYEYIPVNLLKGDQFDSDFKKINPMGTVPALVDGDVVINDSFAIIMYLDEKYPEPPLLPRDLHKRAVNYQAMSIVLSGIQPHQNLAVIRYIEEKINVEEKTAWVNNAITKGFTALEKLLVNCAGKLATGDEIYLADLFLAPQIHGAINRFQINMEPYPNLAKCYESYKELPVFQNALPEKQPDAPSSTN

SEQ ID NO: 2902 - protein, 165 aa, Arabidopsis thaliana; identical to SEQ ID NO: 2470

SEQ ID NO: 2903 - DNA, 575 bp, Arabidopsis thaliana
atatctcacatctccaatctctgaacatcactaacctcaaatctctcttctcaaataccattcttctcagcaacttcacacatttcgaaagagaatctcagaaagatcaatctagagagaccaaaaagagatcggaagagatggcttctacctccgcgatgtcattggtcacaccacttaaccagacccgttcgtctcctttccttaagccattacctctgaaaccatccaaggctttggttgcaactggaggcagagcacagaggcttcaagttaaggccctcaagatggacaaggctttgaccggtatctccgcggctgctcttactgcttcgatggtgattccggagatagctgaagctgctggttctggaatctctccttccctcaagaatttcttgctcagcattgcttctggtggcctcgtcctcactgtcatcattggtgtcgtcgtcggcgtctccaactttgaccctgtcaagagaacctaagacctatatatctttcttacatcattattgtaatctgttctccttctgtgtattcgtttcaatgttgcagcaatgaacttttgg

SEQ ID NO: 2904 - protein, 162 aa, Arabidopsis thaliana
ISHLQSLNITNLKSLFSNTILLSNFTHFERESQKDQSRETKKRSEEMASTSAMSLVTPLNQTRSSPFLKPLPLKPSKALVATGGRAQRLQVKALKMDKALTGISAAALTASMVIPEIAEAAGSGISPSLKNFLLSIASGGLVLTVIIGVVVGVSNFDPVKRT

SEQ ID NO: 2905 - protein, 116 aa, Arabidopsis thaliana
MASTSAMSLVTPLNQTRSSPFLKPLPLKPSKALVATGGRAQRLQVKALKMDKALTGISAAALTASMVIPEIAEAAGSGISPSLKNFLLSIASGGLVLTVIIGVVVGVSNFDPVKRT

SEQ ID NO: 2906 - protein, 110 aa, Arabidopsis thaliana
MSLVTPLNQTRSSPFLKPLPLKPSKALVATGGRAQRLQVKALKMDKALTGISAAALTASMVIPEIAEAAGSGISPSLKNFLLSIASGGLVLTVIIGVVVGVSNFDPVKRT

SEQ ID NO: 2907 - DNA, 638 bp, Arabidopsis thaliana
gaaaagattctgacgctggtagtggtgagtggtgagcacggccaaaaggattttggtattgaaaaatggcatcaaaattggttcaacttcaatcaaaggcatgtcaggcttcaaagtttgtggccaagcatgggaattcgtactacaagcaattgttggagcagaacaagcaatacatccaagagcctgcaactatagagaagtgcagtgaattgtctaaacaattgctctacactcgtcttgctagcattcccgggcgctacgaaacatttaggaaagaagtagactacgcaaagaacttattgaagaacagagcgaatctgaaggtggaagatgcaggaatcgctgcattgtttggcttagaatgctttgcttggttttgcgcaggtgaaatcgtcggcagaggattcactttcaccggctactacccttgaaattgagacaacaaacaaccaggtcgccggaatattcttcctgacgcttgtaactccctccatatgattcctcacttgaactatatatacttcctcgaatccatttatattttcagttttttcctgaaacagaagtgttggagctaagggaaaaaaaaacattttggtaaagctcttaataagttgagaaaaatgcatttgatg

SEQ ID NO: 2908 - protein, 122 aa, Arabidopsis thaliana
MASKLVQLQSKACQASKFVAKHGNSYYKQLLEQNKQYIQEPATIEKCSELSKQLLYTRLASIPGRYETFRKEVDYAKNLLKNRANLKVEDAGIAALFGLECFAWFCAGEIVGRGFTFTGYYP

SEQ ID NO: 2909 - protein, 65 aa, Arabidopsis thaliana
EKILTLVVVSGEHGQKDFGIEKWHQNWFNFNQRHVRLQSLWPSMGIRTTSNCWSRTSNTSKSLQL

SEQ ID NO: 2910 - DNA, 2572 bp, Arabidopsis thaliana
atgaaatttaactttaacgagacagaggatgcaccagattcacgacgatctccgacgcccaaagagccggttaggtgggttcctctccagagccacccggttttcgcttctcttccttcctcccaagatgaacccgccgtgtcgcagctgtttccgagaaatttcatggcttgggacggagactcgcgcgtatactactgggattcgagacgatatctccttcaccgattatctctgcgcttgggtgaacctgaaccatcctccgtcctcgccgcagtcccgtccaaggtgatgcaaccagaccttcaggtgacattttctgttagcaaaatctccatcaataagtctggatcagctgtacttcttgccggctcagatgggatatgtgtgatgtacctatttggacgtgcttctgtgatagaagacaatgtcatttgcagggtagtttctattggttcagaaatctatactagtagtgacagtgccataaccttgctacaagcatcgtggcaccctgatagtgacacccatttgggaattctatcctcggatgcagttttcaggcttttcgatttgtcttcagatactgagctaccagagcaagaatattatctgcagcccggtgagccaggaagatctagaacagcttcatcaatttatcctgctgatttcagttttggaggagatcatctgtgggatagatttactgtctttatattattcactgatggttcaatttatatcttatgccccgttgtgccatttggaagtgtttacaaatgggaatccgtaatggagatttacaacgatgctaatatgtatggggttaagtcatccaattcgttagcagttagcaactccagtctggctattgaatggttggaagctacatttccagatttgactgagcaaggaactagaggtgaaaatatattggtggtgaaagctcagccttatgctttgcttgacgcatcactggctttacagggccctttatataaagcatctagtggcgacggagatgaagatttcgctgttcgggaggcagaatgtaaaggccgggcagtgagtctattatataatcttgttagcaaagattcgattctggtaactgcctggagtgctggacaattacaggttgatgccctggttgatgaaatccagcctgtttggatatctggtaactcatctcgtcttcgcatgaactcccacaacaaaatacaaggagttgcaatgatttgtgagtcaaacataagtgagcttccagttgcaacttcaaacctgccgctcgatcacactgtttggttagggcatccaccaccactgttaagacttgcaatggttgatttggctctccccaaaatgcgtgaaggtggctctcttgttaccttgtttgctgactcccttttgccagaacgaatatactcccttcacgacggtggcattgattcaacagtcttacactctcttcccttcacaagtcaggccagtggaaaagatgaagctctcaaaacgccatctgttcacactgtcctaagtacatgccaagaagaatccgctgtatctcctttgttgggttttgtgcctctgtcggattcgtttgggtattcatggatcgttgcagtcttatcctcaggagaatgcattgtggcagagatgaaaacttgggatctcttgcttccaattcatgtcagtacggataagacagtgtcttcaagcgcaatagagaaaaaagagcaagagaactcgtgcatcataagcaaggagctccttgcaggtcccaaaattagaattgcgccccacgctttacctaaccagcgttcaactccagccaattccgtagaaggcagatcaattctgcttgactatgtcaaacttttccatgaaaactacatcgaatatgcacacaaggtccactttgagctgcagcatcatgctcctaacctgaagagaataatcgatgaccaacaccagcggcttgctgaggcaaatgagaaaatatcaaaagttgagaaaaaccaatcttttctggagaaaaggattgacaaagcaattgaaagacatgattctcttgaacaatgcttgcaacgtctccgtagcttgcctggtacacacaagaaacctctgacgagagcagaactggattttaaatcggagctcgatcaatatgcgggagttgaggtggatgcgcttcaatcatccatcgaaacactgagagcaagagtgaagaagtcaactcaaaaatctcacaagggcacagtagtcgcagctagtcagaaaaagcagtattcaaagaaaaacttaattcaagatacacaaatgtcacagcttcagtccacactcgccaaactatccctgatgaatagcgataactccaagaaagtcaagatcgtggaatctgcgctgaaatcgcaagaaagcagtttcatgtagtcactcactgtaacagggacgcagttatcatttccttgactgactaaatcctgttcaaatttgaatatatgtgctgcaccaaattttctaactctctccttgtaagttttgtctgttaaatcaaactacggtattactt

SEQ ID NO: 2911 - protein, 810 aa, Arabidopsis thaliana
MKFNFNETEDAPDSRRSPTPKEPVRWVPLQSHPVFASLPSSQDEPAVSQLFPRNFMAWDGDSRVYYWDSRRYLLHRLSLRLGEPEPSSVLAAVPSKVMQPDLQVTFSVSKISINKSGSAVLLAGSDGICVMYLFGRASVIEDNVICRVVSIGSEIYTSSDSAITLLQASWHPDSDTHLGILSSDAVFRLFDLSSDTELPEQEYYLQPGEPGRSRTASSIYPADFSFGGDHLWDRFTVFILFTDGSIYILCPVVPFGSVYKWESVMEIYNDANMYGVKSSNSLAVSNSSLAIEWLEATFPDLTEQGTRGENILVVKAQPYALLDASLALQGPLYKASSGDGDEDFAVREAECKGRAVSLLYNLVSKDSILVTAWSAGQLQVDALVDEIQPVWISGNSSRLRMNSHNKIQGVAMICESNISELPVATSNLPLDHTVWLGHPPPLLRLAMVDLALPKMREGGSLVTLFADSLLPERIYSLHDGGIDSTVLHSLPFTSQASGKDEALKTPSVHTVLSTCQEESAVSPLLGFVPLSDSFGYSWIVAVLSSGECIVAEMKTWDLLLPIHVSTDKTVSSSAIEKKEQENSCIISKELLAGPKIRIAPHALPNQRSTPANSVEGRSILLDYVKLFHENYIEYAHKVHFELQHHAPNLKRIIDDQHQRLAEANEKISKVEKNQSFLEKRIDKAIERHDSLEQCLQRLRSLPGTHKKPLTRAELDFKSELDQYAGVEVDALQSSIETLRARVKKSTQKSHKGTVVAASQKKQYSKKNLIQDTQMSQLQSTLAKLSLMNSDNSKKVKIVESALKSQESSFM

SEQ ID NO: 2912 - protein, 755 aa, Arabidopsis thaliana
MAWDGDSRVYYWDSRRYLLHRLSLRLGEPEPSSVLAAVPSKVMQPDLQVTFSVSKISINKSGSAVLLAGSDGICVMYLFGRASVIEDNVICRVVSIGSEIYTSSDSAITLLQASWHPDSDTHLGILSSDAVFRLFDLSSDTELPEQEYYLQPGEPGRSRTASSIYPADFSFGGDHLWDRFTVFILFTDGSIYILCPVVPFGSVYKWESVMEIYNDANMYGVKSSNSLAVSNSSLAIEWLEATFPDLTEQGTRGENILVVKAQPYALLDASLALQGPLYKASSGDGDEDFAVREAECKGRAVSLLYNLVSKDSILVTAWSAGQLQVDALVDEIQPVWISGNSSRLRMNSHNKIQGVAMICESNISELPVATSNLPLDHTVWLGHPPPLLRLAMVDLALPKMREGGSLVTLFADSLLPERIYSLHDGGIDSTVLHSLPFTSQASGKDEALKTPSVHTVLSTCQEESAVSPLLGFVPLSDSFGYSWIVAVLSSGECIVAEMKTWDLLLPIHVSTDKTVSSSAIEKKEQENSCIISKELLAGPKIRIAPHALPNQRSTPANSVEGRSILLDYVKLFHENYIEYAHKVHFELQHHAPNLKRIIDDQHQRLAEANEKISKVEKNQSFLEKRIDKAIERHDSLEQCLQRLRSLPGTHKKPLTRAELDFKSELDQYAGVEVDALQSSIETLRARVKKSTQKSHKGTVVAASQKKQYSKKNLIQDTQMSQLQSTLAKLSLMNSDNSKKVKIVESALKSQESSFM

SEQ ID NO: 2913 - protein, 713 aa, Arabidopsis thaliana
MQPDLQVTFSVSKISINKSGSAVLLAGSDGICVMYLFGRASVIEDNVICRVVSIGSEIYTSSDSAITLLQASWHPDSDTHLGILSSDAVFRLFDLSSDTELPEQEYYLQPGEPGRSRTASSIYPADFSFGGDHLWDRFTVFILFTDGSIYILCPVVPFGSVYKWESVMEIYNDANMYGVKSSNSLAVSNSSLAIEWLEATFPDLTEQGTRGENILVVKAQPYALLDASLALQGPLYKASSGDGDEDFAVREAECKGRAVSLLYNLVSKDSILVTAWSAGQLQVDALVDEIQPVWISGNSSRLRMNSHNKIQGVAMICESNISELPVATSNLPLDHTVWLGHPPPLLRLAMVDLALPKMREGGSLVTLFADSLLPERIYSLHDGGIDSTVLHSLPFTSQASGKDEALKTPSVHTVLSTCQEESAVSPLLGFVPLSDSFGYSWIVAVLSSGECIVAEMKTWDLLLPIHVSTDKTVSSSAIEKKEQENSCIISKELLAGPKIRIAPHALPNQRSTPANSVEGRSILLDYVKLFHENYIEYAHKVHFELQHHAPNLKRIIDDQHQRLAEANEKISKVEKNQSFLEKRIDKAIERHDSLEQCLQRLRSLPGTHKKPLTRAELDFKSELDQYAGVEVDALQSSIETLRARVKKSTQKSHKGTVVAASQKKQYSKKNLIQDTQMSQLQSTLAKLSLMNSDNSKKVKIVESALKSQESSFM

SEQ ID NO: 2914 - DNA, 1016 bp, Arabidopsis thaliana
agagctcataaattttgtggagagcaaagttctcagcaaaatcaaagaagaaccgaacgagagagagaaacgaattcttctcaggtgttaaagaatgtctcggagatatgatagccgtaccacaatcttctcgccagaaggtcgtctttaccaggtagagtatgctatggaggccattggaaacgccggttctgcgattggaatcttatccaaagacggtgttgtgttgatcggtgagaagaaagtcacctcaaagcttcttcaaacctcaacctctgctgagaaaatgtacaagattgatgaccatgttgcctgtgctgttgctggtataatgtctgatgctaacatacttatcaacacggctcgagttcaagctcaacgttacaccttcatgtaccaagagcccatgccggttgagcagctggttcaatctctttgtgacacaaaacaaggatacacacagtttggtggtcttcgcccgtttggtgtctcctttctctttgcaggatgggacaagcaccatggtttccagctttatatgagtgacccgagtgggaactatggtggttggaaagctgcagctgttggagcaaacaatcaggcggctcagtctatcctgaaacaagactacaaggacgatgcaaccagggaagaagcagtcgagcttgccttgaaggttctgaccaagacaatggacagcactagcttaacatctgagaagctagagcttgctgaagtgtatctgactccatccaagactgttaagtaccatgttcactcacctgagtcgctcaccaaactgttggtcaagcacggtgtgactcaacccgctgctgaaacatcttaagcccaaaagtatctctagtcttattcgcctggtacggtgtctccgctttatgtttgtagttctctgttttacagctttccttttggtttgaactttgaagttacctttggcgatgaaactagatttgacaatgttatgaatttatcttcaatgcatcatctttttactt

SEQ ID NO: 2915 - protein, 250 aa, Arabidopsis thaliana
MSRRYDSRTTIFSPEGRLYQVEYAMEAIGNAGSAIGILSKDGVVLIGEKKVTSKLLQTSTSAEKMYKIDDHVACAVAGIMSDANILINTARVQAQRYTFMYQEPMPVEQLVQSLCDTKQGYTQFGGLRPFGVSFLFAGWDKHHGFQLYMSDPSGNYGGWKAAAVGANNQAAQSILKQDYKDDATREEAVELALKVLTKTMDSTSLTSEKLELAEVYLTPSKTVKYHVHSPESLTKLLVKHGVTQPAAETS

SEQ ID NO: 2916 - protein, 226 aa, Arabidopsis thaliana
MEAIGNAGSAIGILSKDGVVLIGEKKVTSKLLQTSTSAEKMYKIDDHVACAVAGIMSDANILINTARVQAQRYTFMYQEPMPVEQLVQSLCDTKQGYTQFGGLRPFGVSFLFAGWDKHHGFQLYMSDPSGNYGGWKAAAVGANNQAAQSILKQDYKDDATREEAVELALKVLTKTMDSTSLTSEKLELAEVYLTPSKTVKYHVHSPESLTKLLVKHGVTQPAAETS

SEQ ID NO: 2917 - protein, 186 aa, Arabidopsis thaliana
MYKIDDHVACAVAGIMSDANILINTARVQAQRYTFMYQEPMPVEQLVQSLCDTKQGYTQFGGLRPFGVSFLFAGWDKHHGFQLYMSDPSGNYGGWKAAAVGANNQAAQSILKQDYKDDATREEAVELALKVLTKTMDSTSLTSEKLELAEVYLTPSKTVKYHVHSPESLTKLLVKHGVTQPAAETS

SEQ ID NO: 2918 - DNA, 605 bp, Arabidopsis thaliana
atttgatttcgttccttttaccggtgcttctttcctattcggacgaagctccggaaaatggacgggttcgggtcgcatccaagaacactcgccgttgatcaatggatggatatagttaatggtaaaggttacggcgttggtggaacaacccaagtctactcaactcgacccgactcaccaaagtttcaaccgtctattccgcctccaccagggtctacatcgaagacacgtacaactgctactccttggagattaatcgatgcggaaacgaagagaaaaaaaagaatcgctacgtacaagacttacgctttggaaggaaaagtcaaatccacggtcaagaaagggtttcattggatcaaagacaggtattctcatattatacacggatgatttaactttttatttgatttttcgtgtcttgggttgtcaccggcgataatctccggcgacatattatttttttgttgacgtaaaagagatttgttatagggagtgttttgatttgattttgaaagcaagatgtcgttgtatgagagaaaataaatttagtgtacaacgcgattcaggtcaaacgcggtccatgtttgtggcccaatttattgctt

SEQ ID NO: 2919 - protein, 110 aa, Arabidopsis thaliana
MDGFGSHPRTLAVDQWMDIVNGKGYGVGGTTQVYSTRPDSPKFQPSIPPPPGSTSKTRTTATPWRLIDAETKRKKRIATYKTYALEGKVKSTVKKGFHWIKDRYSHIIHG

SEQ ID NO: 2920 - protein, 94 aa, Arabidopsis thaliana
MDIVNGKGYGVGGTTQVYSTRPDSPKFQPSIPPPPGSTSKTRTTATPWRLIDAETKRKKRIATYKTYALEGKVKSTVKKGFHWIKDRYSHIIHG

SEQ ID NO: 2921 - protein, 59 aa, Arabidopsis thaliana
MRKRREKKESLRTRLTLWKEKSNPRSRKGFIGSKTGILILYTDDLTFYLIFRVLGCHRR

SEQ ID NO: 2922 - DNA, 703 bp, Arabidopsis thaliana
aagtttgatcgaaagtttcagacttcaataagttttcagtttcgtgcatagattaggaatctcgaaaccctaattctgttttctacacgaaacccatcaaaatcgaattttgatcgtttctaatttctgccatttgattctcttcatcagtcacatttaggggaaacgagaagccctaatctttgattctttaatcgccatggctaatagctctttcaagttggaacacccactagagaggagacaaattgaatcttctcgcatcagggagaagtatccagacagaattccagtgatcgtagagagagctgaaagaagtgatgttcccaatatcgacaagaagaagtaccttgttccagctgatctaactgttgggcaatttgtgtatgttgtccgtaaaagaatcaagctgagtgccgaaaaggctatcttcgtctttgtgaagaacacattgcctccaactgctgcaatgatgtctgcaatctatgatgagaacaaagacgaagatgggtttctctacatgacttacagtggagagaacacctttggtttggtttaaatgtgtgccttccaatgcttttgtgctgatgtgtatattatatgctcttttataacactatgaatatgcaaaagttatatgtactactattaatgtaaatgttgctttgaatttaagttgttagtttgggttttacttttggac

SEQ ID NO: 2923 - protein, 119 aa, Arabidopsis thaliana
MANSSFKLEHPLERRQIESSRIREKYPDRIPVIVERAERSDVPNIDKKKYLVPADLTVGQFVYVVRKRIKLSAEKAIFVFVKNTLPPTAAMMSAIYDENKDEDGFLYMTYSGENTFGLV

SEQ ID NO: 2924 - DNA, 1081 bp, Arabidopsis thaliana
aaaacgcaccgctttgtttgattgttcctccttgtccccgaccagagaaatacaaaggaagaagaagaagagttgtttgattatctttaagcaaagaggaaactgttttgcttctagatccgatccaatccaatcaaacaaaggatccgattgatcagaaaaaatccaccaaatttctcaagatcgaaacatataattgaagatgagcgacgtatttgaagggtacgagcgtcaatactgcgagctctcaaccaatctctctagaaaatgtcactctgcatcggttctctccaacggagaggagaagaaggggaagattgctcagatcaagtctggaatagacgaagctgatgtcttgatccggaaaatggatcttgaggcaagaagtttgcagccgagtgctaaagctgtgtgtctttctaaactaagagagtataaatctgatctgaaccaattgaagaaggaattcaaacgagtctcttccgcagatgctaagccgtcttcccgtgaagagttgatggaatccggaatggcggatctgcatgcagtatctgctgatcaaagaggaagattggcaatgtccgtggagaggcttgaccaatcaagtgacagaatcagggagagtagaagactaatgctggagacagaagaggttggcatctcaattgtccaagatttgagtcagcaacgccaaaccctccttcatgcgcacaacaagcttcatggtgtggatgacgccattgacaagagcaagaaggtgttgacggctatgtcaaggagaatgactaggaacaaatggatcattacatcggtaatcgtggctctcgttctcgccatcatcttgatcatctcatacaagctttctcattaatatactcaaaaaacattattcatcgtgattgtgtatatatatatgatggttgattttctctgtaatggcccaagtggttacttgtatttttaagtacgatgtttgtattgaagtggcaacacttttaacattcataaggtttcccaagtcttttcttttttgtctttttttccaaaaaagtggtactattttatataaagcagatgtttc

SEQ ID NO: 2925 - protein, 222 aa, Arabidopsis thaliana
MSDVFEGYERQYCELSTNLSRKCHSASVLSNGEEKKGKIAQIKSGIDEADVLIRKMDLEARSLQPSAKAVCLSKLREYKSDLNQLKKEFKRVSSADAKPSSREELMESGMADLHAVSADQRGRLAMSVERLDQSSDRIRESRRLMLETEEVGISIVQDLSQQRQTLLHAHNKLHGVDDAIDKSKKVLTAMSRRMTRNKWIITSVIVALVLAIILIISYKLSH

SEQ ID NO: 2926 - protein, 167 aa, Arabidopsis thaliana
MDLEARSLQPSAKAVCLSKLREYKSDLNQLKKEFKRVSSADAKPSSREELMESGMADLHAVSADQRGRLAMSVERLDQSSDRIRESRRLMLETEEVGISIVQDLSQQRQTLLHAHNKLHGVDDAIDKSKKVLTAMSRRMTRNKWIITSVIVALVLAIILIISYKLSH

SEQ ID NO: 2927 - protein, 117 aa, Arabidopsis thaliana
MESGMADLHAVSADQRGRLAMSVERLDQSSDRIRESRRLMLETEEVGISIVQDLSQQRQTLLHAHNKLHGVDDAIDKSKKVLTAMSRRMTRNKWIITSVIVALVLAIILIISYKLSH

SEQ ID NO: 2928 - DNA, 641 bp, Arabidopsis thaliana
aatattattgtgtttggtcctatttattactctctgctctcttcctgaagcttcttcatctttttgtttgacaagaagaggtagagaagaagatgtctcaatcaatctcctccagcacaaaggcagaagaagttgttagtgtagatgtgagccaagccaagactctcctccagtctgggcatcaatatcttgacgttaggactcaggacgagtttaggagaggccattgtgaggcagctaagatcgtcaacattccctacatgctcaacacacctcaaggtagagtgaagaatcgagagttcttggagcaagtatcttctcttctaaacccagctgatgatatccttgtgggttgtcagagtggagccagatccttaaaagccacaactgaacttgttgctgcaggttacaagaaagtgagaaacgtgggaggtggctacttggcttgggtagatcacagctttcccatcaacaaggaggaggaggagccatctgctaattaataatcttaagattctcttcttttcttaatcaaataatataactgcctgtgtgatgtagtaatcattttcaatttaaaattccagtttcttgtaatcaaaactttcgtgtaccaaattcaataaaagctgtgtttctct

SEQ ID NO: 2929 - protein, 136 aa, Arabidopsis thaliana
MSQSISSSTKAEEVVSVDVSQAKTLLQSGHQYLDVRTQDEFRRGHCEAAKIVNIPYMLNTPQGRVKNREFLEQVSSLLNPADDILVGCQSGARSLKATTELVAAGYKKVRNVGGGYLAWVDHSFPINKEEEEPSAN

SEQ ID NO: 2930 - protein, 80 aa, Arabidopsis thaliana
MLNTPQGRVKNREFLEQVSSLLNPADDILVGCQSGARSLKATTELVAAGYKKVRNVGGGYLAWVDHSFPINKEEEEPSAN

SEQ ID NO: 2931 - DNA, 883 bp, Arabidopsis thaliana
atgtgttctcataatgaaaacatcgattcccgaaaattcacaaaatcagaaccttgtcatattaaaaaaatctcaatttcaattctctcgatttctctatcatcatcatccatggcttcgcaagctagccttctccttcagaaacaactcaaagatctctgtaagcatcctgttgatggattctctgctggtctcgttgatgagaagaatatattcgaatggagcgttaccattatcggacctcctgatactctctatgaaggaggattctttaacgcgattatgacatttccgcaaaactatccgaatagtccgccaaccgtgaggtttacttcggatatgtggcatcctaacgtttattctgatggtcgtgtttgcatatctattcttcatcctcccggtgatgatcctagcggttatgagcttgcaagcgagcgttggactcctgttcatacagttgagagtattatgttgagtatcatatcaatgctttctggtcctaacgatgagtctccagcaaatgttgaagctgccaaagaatggcgagataagagagatgagttcaagaagaaagtgagccgttgtgtcagaaagtctcaagaaatgttttgatcaacgtcaaacttcacacctttgagatctctggagtttcaatcaaaagttcttcatattcctatctgaaaccctttgaaacgcaacttgttataactcggtttacatctctttttgtcgcgttcgagaaccagagcgttttgaaaggtgtttggttgagaaaagtgctgttcttgagaaactggtattaaaattataaatttcatttgttaagaatcttctttgcttataaagttataaacctataatatcagcaatagtttgctctctg

SEQ ID NO: 2932 - protein, 203 aa, Arabidopsis thaliana
MCSHNENIDSRKFTKSEPCHIKKISISILSISLSSSSMASQASLLLQKQLKDLCKHPVDGFSAGLVDEKNIFEWSVTIIGPPDTLYEGGFFNAIMTFPQNYPNSPPTVRFTSDMWHPNVYSDGRVCISILHPPGDDPSGYELASERWTPVHTVESIMLSIISMLSGPNDESPANVEAAKEWRDKRDEFKKKVSRCVRKSQEMF

SEQ ID NO: 2933 - protein, 166 aa, Arabidopsis thaliana
MASQASLLLQKQLKDLCKHPVDGFSAGLVDEKNIFEWSVTIIGPPDTLYEGGFFNAIMTFPQNYPNSPPTVRFTSDMWHPNVYSDGRVCISILHPPGDDPSGYELASERWTPVHTVESIMLSIISMLSGPNDESPANVEAAKEWRDKRDEFKKKVSRCVRKSQEMF

SEQ ID NO: 2934 - protein, 109 aa, Arabidopsis thaliana
MTFPQNYPNSPPTVRFTSDMWHPNVYSDGRVCISILHPPGDDPSGYELASERWTPVHTVESIMLSIISMLSGPNDESPANVEAAKEWRDKRDEFKKKVSRCVRKSQEMF

SEQ ID NO: 2935 - DNA, 730 bp, Arabidopsis thaliana
agaaacaagtcttataaaaagccacattaagttcttactctgctgcattaactgatggctagattcatggcttacaatcaaaatccacaaatgttggctctatgcataacagtagcagtaatgttccttggtgtgagatcagaattgagtcaggatataaagggatgtcaggatgcgatgtctgatctctactcttgtcttccttttgtcactaacaaagctaaagcaccagactcaacatgttgcagcacactcaaggtaaaaatagacaaagggcagaccaggaaatgtctatgtactctagtcaaagacagggatgatcctggtttggggttcaaagttgatgccaaccgtgcaatgagcctcccttccgcttgtcatgtccctgcaaacatctctcaatgcccagatcttctacatctgcttccagattcaccagcctctcaaatatttaagcaattcactgaatcttcttctcagactgttggacataaagcggtctccacaagctcaagcatcaaaggaagagacaacaagcaatttggtttaatgatggctggtgctctctcaatatggtatataatgtaaaatcctctgtgatctaaagttgatgaacacaataaccaaaatcattatacgagtcatatctactagctgaagcagatgtatcatggcttattaataagaacttattgagaaactcttaagcatcatagaatgcgattagaag

SEQ ID NO: 2936 - protein, 177 aa, Arabidopsis thaliana
MARFMAYNQNPQMLALCITVAVMFLGVRSELSQDIKGCQDAMSDLYSCLPFVTNKAKAPDSTCCSTLKVKIDKGQTRKCLCTLVKDRDDPGLGFKVDANRAMSLPSACHVPANISQCPDLLHLLPDSPASQIFKQFTESSSQTVGHKAVSTSSSIKGRDNKQFGLMMAGALSIWYIM

SEQ ID NO: 2937 - protein, 173 aa, Arabidopsis thaliana
MAYNQNPQMLALCITVAVMFLGVRSELSQDIKGCQDAMSDLYSCLPFVTNKAKAPDSTCCSTLKVKIDKGQTRKCLCTLVKDRDDPGLGFKVDANRAMSLPSACHVPANISQCPDLLHLLPDSPASQIFKQFTESSSQTVGHKAVSTSSSIKGRDNKQFGLMMAGALSIWYIM

SEQ ID NO: 2938 - protein, 165 aa, Arabidopsis thaliana
MLALCITVAVMFLGVRSELSQDIKGCQDAMSDLYSCLPFVTNKAKAPDSTCCSTLKVKIDKGQTRKCLCTLVKDRDDPGLGFKVDANRAMSLPSACHVPANISQCPDLLHLLPDSPASQIFKQFTESSSQTVGHKAVSTSSSIKGRDNKQFGLMMAGALSIWYIM

SEQ ID NO: 2939 - DNA, 710 bp, Arabidopsis thaliana
gttctaaaattaagacaactctaaatgttagtatcgtttctgtaatatttattatatcctcttcttcttttttactgattcatcaaatcggggatcggataagcctgactgcttcagggtttaagggttactctcactcacacttccgctggtttgacaagattggataaaagcagccatggcaagtctgataatgactacaccattcccaggttctgtcactacatgtaagaagacaaataacctgtcagttcaaagagcctttagggtgacttgtatgcagacagagaaaccattagaggagctatacaatgttaaagtggaacggaaagtttcacagaaacggttggaggaacttggggtttcgagatggtcagtttggaagacagggaaatgcaaattgccatgggattggcaggtggatcagttggtttacattgaacaaggagaggttcgagttgttcccgaaggaagcaagaggtatatgcagtttttagctggagatcttgttcggtatccgaaatggttggaagctgatcttttctttaacgctccttatattgagcggtattgtttcaaggcctatggtgatgattgatccaactttgacttttgagtttttagtagagccaagaaactttacacttgttgtgtgttgttgtagcctgatggatctttttgtgataatataagaaaacaagttctctctc

SEQ ID NO: 2940 - protein, 139 aa, Arabidopsis thaliana
MASLIMTTPFPGSVTTCKKTNNLSVQRAFRVTCMQTEKPLEELYNVKVERKVSQKRLEELGVSRWSVWKTGKCKLPWDWQVDQLVYIEQGEVRVVPEGSKRYMQFLAGDLVRYPKWLEADLFFNAPYIERYCFKAYGDD

SEQ ID NO: 2941 - protein, 134 aa, Arabidopsis thaliana
MTTPFPGSVTTCKKTNNLSVQRAFRVTCMQTEKPLEELYNVKVERKVSQKRLEELGVSRWSVWKTGKCKLPWDWQVDQLVYIEQGEVRVVPEGSKRYMQFLAGDLVRYPKWLEADLFFNAPYIERYCFKAYGDD

SEQ ID NO: 2942 - protein, 106 aa, Arabidopsis thaliana
MQTEKPLEELYNVKVERKVSQKRLEELGVSRWSVWKTGKCKLPWDWQVDQLVYIEQGEVRVVPEGSKRYMQFLAGDLVRYPKWLEADLFFNAPYIERYCFKAYGDD

SEQ ID NO: 2943 - DNA, 964 bp, Arabidopsis thaliana
ctgatcagatgtgccagctatacaaaagtctctcacgtctctcccagaaaactcttattttatcgccgagaaagtgacggaaaacgaaatccaaacgggataataaacctaaaacctaaattagtgatttagctacgactcctaaagattcaaatttgggttacatcggacgaatcatgactctgcttccgatttcaatcttcttcttctttttattttgcattccttcgccattaatcgccgccgctaacgatgacgatataccgacggcgtacactctcctccaaagctacaactttcccgtcgggattcttcctaaaggagtggtgtcatatgatttagataaatctactggtcaattccacgcgtatttcaacaaatcgtgcagtttcgctcttcaaggctcttaccaattggattacaaatcgacaatctctggatacatatcggagaacaagatcacgaagcttaccggcgtgaaggtgaaagttctcttcttgtggctcaacatcgttgaggttattaggaacggagacgaactcgagttctccgttgggatcacatcggcgaacttcgagatcgatgagttttacgagtcgccacagtgtggttgcggatttgattgcaaaacgaagacgaagactttgggaagaaacccttttgtttcttcggtttaaaggttaagacttcttattgcagaatctgaactctttggatgatttatgttctttctccaatcatttaatttttcaatcaatgctttgtttgtatctcttcttaggatcgaaccgataagttgtatttatgaaccgatcaggaataaaacagtggtggaaaaagttaattcttatgtctaaggagaagattggcatgaatttgagtttcgtattggctgatcaatggtttgtgtgttgcattcgacgaatgcttatgaatgtctgtatgaaacgttagatcttttgtc

SEQ ID NO: 2944 - protein, 166 aa, Arabidopsis thaliana
MTLLPISIFFFFLFCIPSPLIAAANDDDIPTAYTLLQSYNFPVGILPKGVVSYDLDKSTGQFHAYFNKSCSFALQGSYQLDYKSTISGYISENKITKLTGVKVKVLFLWLNIVEVIRNGDELEFSVGITSANFEIDEFYESPQCGCGFDCKTKTKTLGRNPFVSSV

SEQ ID NO: 2945 - DNA, 884 bp, Arabidopsis thaliana
aaacccgattgtttcgagcacaaacgtcacttgtggtttacatcgtcttcatcatctccataacttcatatctcctctccttccgctgccaccgttagcgatgtctttggacactgtggacaaactggtggtgttcttggccaagagagacggaatagacaagcttgtgaagacattccaatacgtggccaagctcgcgtgctggcatgttgaagccacacgacccgaagccgccgataggttcaagaagtgggaggtcgcctccggtctcagccgcaaagccttcaggaccgggagatctctcacggggttcaatgcgctgagacgaaaccccggggcaaccccgatgatccgtttcttggcggtcctagccaattcaggggaaatggtttacttcttctttgatcattttctttggttatcaagaattggttcaatagacgccaagctcgccaagaaaatgagtttcatatccgcttttggcgaatctttcggctacactttcttcatcatcattgattgcatcttcataaagcaaagactcaaatccttaaaaaagctccagcattcgaccgatgaaccgaaagaagaaatcggcgccaaaattagcgagattcggggagatatagtaatgaggttgatgggaatttcagccaacgttgcggatttacttatagcattggcagaaattcacccaaaccccttttgtaaccacaccattacactcggtataagcggtttagtttcagcttgggccggttggtataggaactggccatcgtgagatgtaataaaatcaaatgtttgttgttttgaatgaacgtatcaaacgtgtaatgtaactcacttgaatatatgaaacatttctattttacattatctat

SEQ ID NO: 2946 - protein, 260 aa, Arabidopsis thaliana
NPIVSSTNVTCGLHRLHHLHNFISPLLPLPPLAMSLDTVDKLVVFLAKRDGIDKLVKTFQYVAKLACWHVEATRPEAADRFKKWEVASGLSRKAFRTGRSLTGFNALRRNPGATPMIRFLAVLANSGEMVYFFFDHFLWLSRIGSIDAKLAKKMSFISAFGESFGYTFFIIIDCIFIKQRLKSLKKLQHSTDEPKEEIGAKISEIRGDIVMRLMGISANVADLLIALAEIHPNPFCNHTITLGISGLVSAWAGWYRNWPS

SEQ ID NO: 2947 - protein, 227 aa, Arabidopsis thaliana
MSLDTVDKLVVFLAKRDGIDKLVKTFQYVAKLACWHVEATRPEAADRFKKWEVASGLSRKAFRTGRSLTGFNALRRNPGATPMIRFLAVLANSGEMVYFFFDHFLWLSRIGSIDAKLAKKMSFISAFGESFGYTFFIIIDCIFIKQRLKSLKKLQHSTDEPKEEIGAKISEIRGDIVMRLMGISANVADLLIALAEIHPNPFCNHTITLGISGLVSAWAGWYRNWPS

SEQ ID NO: 2948 - protein, 145 aa, Arabidopsis thaliana
MIRFLAVLANSGEMVYFFFDHFLWLSRIGSIDAKLAKKMSFISAFGESFGYTFFIIIDCIFIKQRLKSLKKLQHSTDEPKEEIGAKISEIRGDIVMRLMGISANVADLLIALAEIHPNPFCNHTITLGISGLVSAWAGWYRNWPS

SEQ ID NO: 2949 - DNA, 617 bp, Arabidopsis thaliana
acaagaacaactgaaaaaaggaaaagaaagaaatctataaaaaaaaaatggattttcagacaattcaagtgatgccatgggaatatgttctagcttctcaatctcttaataactatcaagagaatcatgttcgttggtctcagtctccagactctcacactttctctgttgatcttcctgggttaaggaaagaagaaataaaagttgagatcgaagattcgatatacttaatcatacgaacggaggcaacccctatgtcgcctccggatcagcctttgaagacttttaagaggaaatttcggttgccggaatcgatagatatgatcggaatatcagctggctacgaagatggtgtgttgactgtgattgtacccaagaggattatgacaaggaggctcattgatccttctgatgttcctgaaagtcttcaacttcttgctagagctgcttaataacgcgttacattgttcttccttgtcccccacgagttcaatctttgtttatctaaacgtctttaaaggaaaacaaaaaagaatgtgtattttttttttcttggtatcgaactattatgtgtagttagtatattaatccaaatccaatgtttatgtttaaatcct

SEQ ID NO: 2950 - protein, 134 aa, Arabidopsis thaliana
MDFQTIQVMPWEYVLASQSLNNYQENHVRWSQSPDSHTFSVDLPGLRKEEIKVEIEDSIYLIIRTEATPMSPPDQPLKTFKRKFRLPESIDMIGISAGYEDGVLTVIVPKRIMTRRLIDPSDVPESLQLLARAA

SEQ ID NO: 2951 - protein, 126 aa, Arabidopsis thaliana
MPWEYVLASQSLNNYQENHVRWSQSPDSHTFSVDLPGLRKEEIKVEIEDSIYLIIRTEATPMSPPDQPLKTFKRKFRLPESIDMIGISAGYEDGVLTVIVPKRIMTRRLIDPSDVPESLQLLARAA

SEQ ID NO: 2952 - DNA, 668 bp, Arabidopsis thaliana
aagaaaaacccaaacggccaaatccaggttttggctcagacgaccagaggaagagcaccgacgatggcgtggacacgattgattcagagcgcgagagcagctctagggacagcgcaatcgtgctcgactcttggcctccctagattccactcctccaaaccagccacttatttcgtgaaggtagggattccagagtttctaggtgggattggaagaggagctgagactcacattgccaaaattgaaactgagattggtgaccttcataagcttcttgtgacgcgtactctcagactcaagaaacttggcattccttgcaaacataggaaactgatactgaagtatggccagaaatacaggttagggctatggaaacctagagctgacgctattaaggcctgatcaagtctctatgttgtaactgtgagtctctcgactgccggaataagctctagtacttgaatgatcattgtcaaaccagttcagtattggacaaaatagacagtagaagtaatgttggttttgatgtttgagaaacaaacctagtgacattttccttgttaaatgtaacagttttttttctccattggtctagattgaaagtgtgttttaccttgagaaacctatagatgtagtaacttttctctatatatatgaaagtggcttct

SEQ ID NO: 2953 - protein, 133 aa, Arabidopsis thaliana
KKNPNGQIQVLAQTTRGRAPTMAWTRLIQSARAALGTAQSCSTLGLPRFHSSKPATYFVKVGIPEFLGGIGRGAETHIAKIETEIGDLHKLLVTRTLRLKKLGIPCKHRKLILKYGQKYRLGLWKPRADAIKA

SEQ ID NO: 2954 - protein, 112 aa, Arabidopsis thaliana
MAWTRLIQSARAALGTAQSCSTLGLPRFHSSKPATYFVKVGIPEFLGGIGRGAETHIAKIETEIGDLHKLLVTRTLRLKKLGIPCKHRKLILKYGQKYRLGLWKPRADAIKA

SEQ ID NO: 2955 - DNA, 745 bp, Arabidopsis thaliana
tgactcaccaaagcatcacataacactcacacacacactttctcttctcttattttctcagttcttttaactcttttctctacatatattcaaatggccaccatcgaggttgaacaagtgactccagtagcagctgagaacatcgaggtgccaccaccaaaggctgtggagtcggaggaagtcaccaccgtctccgagtctcttccagctccggtaacagaatctcaagcgcctgtcgaagtaacaactaaagatttggtcgtggaagagacagagaaaccaatcgaagaaacagaggaagctcaagttgaaactccggaggttgtggagatcaagaaagatgaagaagctccggttgaaactccggtggttgtggaggatgagagcaaaacagaggaagttgtagaggcgaagaaagaggaagaagtagaagaaaagaagacagaggaagctccagtggttgtggaggaagagaagaagccagaggcagaggaggagaaacccgccgtggaagcctccgtgacagctccagtggagaaggctgatgagtaaatgtgaagaaaaaaactgtcttttgaaagacaaaagaagaagaaaatgttagcaagtaatttatttgctactttaagtactttgtgtcttgttatgtttttgagtctatgactcttcttgcttttggttttttaatcttcttaagtactattttcaatggttatcatttttaataagatatacattattttat

SEQ ID NO: 2956 - protein, 152 aa, Arabidopsis thaliana
MATIEVEQVTPVAAENIEVPPPKAVESEEVTTVSESLPAPVTESQAPVEVTTKDLVVEETEKPIEETEEAQVETPEVVEIKKDEEAPVETPVVVEDESKTEEVVEAKKEEEVEEKKTEEAPVVVEEEKKPEAEEEKPAVEASVTAPVEKADE

SEQ ID NO: 2957 - DNA, 822 bp, Arabidopsis thaliana
atagttaaataaaattcatcttttcacggatatatttaatttggagccatgatgaattcaagaatttctattatcattgcgttatcttgcattatgatcacttcaattcgtgcatacgataccgacgatcttcaagatctctgcgttgccgataaatctcacggaaccaaactgaatggatttccgtgcaaggaaacattaaacatcacggagtccgacttcttcttcgccggaatctcaaaacccgccgtcataaactctacgatgggttcggccgtaacaggagccaacgtggaaaagatcccaggcctcaacactctctccgtctccttagcacgtatagactacgcgccgggaggtttaaacccaccgcacactcacccacgcgccaccgaagtcgtctacgttctagaaggagagcttgaggttggatttatcacaacagcgaataagcttttcactaaaaccataaagattggtgaagttttcgtttttccaagagggcttgtgcattttcaaaagaacaatgggaaatctcccgcgtcggttttgtcggcatttaatagtcagttgccgggaacggcttctgttgcggcaaccctatttgcggcagagccggctttgccggaagatgtgttaactaagacttttcaagtgggatctaagatggttgataagattaaggaaaggcttgccactaaaaaataattcataaaagtttaaaaaaaaaataaaaacatgaaaatataatgtaaccgttacctagaaagattttatttaacactactgtattgaataaaaaggtgttactgtgattatctt

SEQ ID NO: 2958 - protein, 219 aa, Arabidopsis thaliana
MMNSRISIIIALSCIMITSIRAYDTDDLQDLCVADKSHGTKLNGFPCKETLNITESDFFFAGISKPAVINSTMGSAVTGANVEKIPGLNTLSVSLARIDYAPGGLNPPHTHPRATEVVYVLEGELEVGFITTANKLFTKTIKIGEVFVFPRGLVHFQKNNGKSPASVLSAFNSQLPGTASVAATLFAAEPALPEDVLTKTFQVGSKMVDKIKERLATKK

SEQ ID NO: 2959 - protein, 218 aa, Arabidopsis thaliana
MNSRISIIIALSCIMITSIRAYDTDDLQDLCVADKSHGTKLNGFPCKETLNITESDFFFAGISKPAVINSTMGSAVTGANVEKIPGLNTLSVSLARIDYAPGGLNPPHTHPRATEVVYVLEGELEVGFITTANKLFTKTIKIGEVFVFPRGLVHFQKNNGKSPASVLSAFNSQLPGTASVAATLFAAEPALPEDVLTKTFQVGSKMVDKIKERLATKK

SEQ ID NO: 2960 - protein, 204 aa, Arabidopsis thaliana
MITSIRAYDTDDLQDLCVADKSHGTKLNGFPCKETLNITESDFFFAGISKPAVINSTMGSAVTGANVEKIPGLNTLSVSLARIDYAPGGLNPPHTHPRATEVVYVLEGELEVGFITTANKLFTKTIKIGEVFVFPRGLVHFQKNNGKSPASVLSAFNSQLPGTASVAATLFAAEPALPEDVLTKTFQVGSKMVDKIKERLATKK

SEQ ID NO: 2961 - DNA, 768 bp, Arabidopsis thaliana
gtggaacaaaaacagagcaaaatggcaataatatctcagttttttgctccattaccatctctcaccggaaccctaaccctaaccggtcgttcttttctccctctaaaccttgatacccaattcccaaaacctagactttccagggacagagccgccacactcgtactccaatccaagggtgatgattccgtcgatgcatcggatcggataatctcagccgtctgttacttctacccattcttcgatgggattcaatacggcaaattcatcatcacacagtaccaaccttttcagattctcatccaacctttgtttcccgccatcagagctttcaagagcttccctttcaatgggtttcttatcttcatcactctctacttcgtcgttgtgaggaaccctaatttcagcaggtacgtcaggttcaacacgatgcaggcgattgtgcttgatgtgttgttgattttcccggatttgcttgagaggagctttaatcctagagatgggtttggtttagatgtggtgatgagtttggacagcacagtgttcctcttcttgcttgtctctttgatctatggattctctgcttgcttgtttggtctgaccccgaggttgcctcttgttgccgaggctgctgataggcaagtcctttgattcaataatatctttgtatgtaacacatttgctgtgattaaaccttctgtattggatcgctttctgataatcaaaacatacaatgtaactttttgatccaatgaaaaaggtttctgc

SEQ ID NO: 2962 - protein, 216 aa, Arabidopsis thaliana
VEQKQSKMAIISQFFAPLPSLTGTLTLTGRSFLPLNLDTQFPKPRLSRDRAATLVLQSKGDDSVDASDRIISAVCYFYPFFDGIQYGKFIITQYQPFQILIQPLFPAIRAFKSFPFNGFLIFITLYFVVVRNPNFSRYVRFNTMQAIVLDVLLIFPDLLERSFNPRDGFGLDVVMSLDSTVFLFLLVSLIYGFSACLFGLTPRLPLVAEAADRQVL

SEQ ID NO: 2963 - protein, 209 aa, Arabidopsis thaliana
MAIISQFFAPLPSLTGTLTLTGRSFLPLNLDTQFPKPRLSRDRAATLVLQSKGDDSVDASDRIISAVCYFYPFFDGIQYGKFIITQYQPFQILIQPLFPAIRAFKSFPFNGFLIFITLYFVVVRNPNFSRYVRFNTMQAIVLDVLLIFPDLLERSFNPRDGFGLDVVMSLDSTVFLFLLVSLIYGFSACLFGLTPRLPLVAEAADRQVL

SEQ ID NO: 2964 - DNA, 1281 bp, Arabidopsis thaliana
atcttgtagaaacagaaacttgtctggtcttttcgaatgtgatttttggttgatgatgatgaggctagttcaagtatcttccactgaatccatttcttctatttccgcttcctcggcccggaatggtggagttctctacttgaagcgtggttctgtctgtgtatgtagagtcttgaagccgaataaagttgctctcaacagtatgattctttcagctatgaggacttgctcaatctctgggttccatactcatcttccgaagtcaagcggttcagtttcttcgagaaagaggttttcttctactgctttatcactcatcactcaaaccatttcaccatttgctcatccccgttcatcagtaattgtgtcaagccttctctccccatctgatatccctcagaaatctgaagaatggtttgctttaaggaaagacaagttaaccacaagtacattcagtacagcgctggggttttggaaaggaaaccggcgtgccgagctctggcatgaaaaggtttatgattcagatgcacgagttgttgaggagtctgcacggtttgctatgaactggggtgtacaaatggaatcatctgcgatagaaaggtacaaaagaataatgggttgtgaggttggaacaatgggatttgctattcactccaatgaggaatttcactggcttggcgcttcaccggatggaatcctcgattgctttggtattctagaagtgaaatgtccatataacaaagggaaaaccgaaactgtattaccctggaaaaaagtgccctactattacatgcctcagctgcagggtcaaatggagataatggaccgggaatgggtcaacttatactgctggacacgaaatggaagcacggttttccgtgtgatgagagaccgaagctattggagaatcatacatgatgtattaagggagttctggtgggagagtgtgattcctgcaagggaggctttgttgttagggaaagaggatgaggaggtgaaaaagtatgagccaacatctacgcataaacgaaccaagcttgccatagctaaaagcctaaatttggctgcggaatcaaaactagtatgcagagaaattgctgatcatgtcgagttcttttagatgaaataggagaatgatgattcatcttattagatcacgcattgttgtacttatgaaactggttaaatgatgtaacactctttaatcagatttcactctttggagtttagtggttttctatcgtctgtaaattaattggatgtgaaatgattttcattgct

SEQ ID NO: 2965 - protein, 372 aa, Arabidopsis thaliana
SCRNRNLSGLFECDFWLMMMRLVQVSSTESISSISASSARNGGVLYLKRGSVCVCRVLKPNKVALNSMILSAMRTCSISGFHTHLPKSSGSVSSRKRFSSTALSLITQTISPFAHPRSSVIVSSLLSPSDIPQKSEEWFALRKDKLTTSTFSTALGFWKGNRRAELWHEKVYDSDARVVEESARFAMNWGVQMESSAIERYKRIMGCEVGTMGFAIHSNEEFHWLGASPDGILDCFGILEVKCPYNKGKTETVLPWKKVPYYYMPQLQGQMEIMDREWVNLYCWTRNGSTVFRVMRDRSYWRIIHDVLREFWWESVIPAREALLLGKEDEEVKKYEPTSTHKRTKLAIAKSLNLAAESKLVCREIADHVEFF

SEQ ID NO: 2966 - protein, 355 aa, Arabidopsis thaliana
MMMRLVQVSSTESISSISASSARNGGVLYLKRGSVCVCRVLKPNKVALNSMILSAMRTCSISGFHTHLPKSSGSVSSRKRFSSTALSLITQTISPFAHPRSSVIVSSLLSPSDIPQKSEEWFALRKDKLTTSTFSTALGFWKGNRRAELWHEKVYDSDARVVEESARFAMNWGVQMESSAIERYKRIMGCEVGTMGFAIHSNEEFHWLGASPDGILDCFGILEVKCPYNKGKTETVLPWKKVPYYYMPQLQGQMEIMDREWVNLYCWTRNGSTVFRVMRDRSYWRIIHDVLREFWWESVIPAREALLLGKEDEEVKKYEPTSTHKRTKLAIAKSLNLAAESKLVCREIADHVEFF

SEQ ID NO: 2967 - protein, 354 aa, Arabidopsis thaliana
MMRLVQVSSTESISSISASSARNGGVLYLKRGSVCVCRVLKPNKVALNSMILSAMRTCSISGFHTHLPKSSGSVSSRKRFSSTALSLITQTISPFAHPRSSVIVSSLLSPSDIPQKSEEWFALRKDKLTTSTFSTALGFWKGNRRAELWHEKVYDSDARVVEESARFAMNWGVQMESSAIERYKRIMGCEVGTMGFAIHSNEEFHWLGASPDGILDCFGILEVKCPYNKGKTETVLPWKKVPYYYMPQLQGQMEIMDREWVNLYCWTRNGSTVFRVMRDRSYWRIIHDVLREFWWESVIPAREALLLGKEDEEVKKYEPTSTHKRTKLAIAKSLNLAAESKLVCREIADHVEFF

SEQ ID NO: 2968 - DNA, 1189 bp, Arabidopsis thaliana
acaatcccaccattaaaaaagaagaacccaagatcgactcttacttcgaatctctctcaactttcttcctcagcttacgggaacttccacacatatacatccacaagaacccatatcgaagattcatcctacatatatttacatggatcagtactcatcctctttggtcgatacttcattagatctcactattggcgttactcgtatgcgagttgaagaagatccaccgacaagtgctttggtggaagaattaaaccgagttagtgctgagaacaagaagctctcggagatgctaaccttgatgtgtgacaactacaacgtcttgaggaagcaacttatggaatatgttaacaagagcaacataaccgagagggatcaaatcagccctcccaagaaacgcaaatccccggcgagagaggacgcattcagctgcgcggttattggcggagtgtcggagagtagctcaacggatcaagatgagtatttgtgtaagaagcagagagaagagactgtcgtgaaggagaaagtctcaagggtctattacaagaccgaagcttctgacactaccctcgttgtgaaagatgggtatcaatggaggaaatatggacagaaagtgactagagacaatccatctccaagagcttacttcaaatgtgcttgtgctccaagctgttctgtcaaaaagaaggttcagagaagtgtggaggatcagtccgtgttagttgcaacttatgagggtgaacacaaccatccaatgccatcgcagatcgattcaaacaatggcttaaaccgccacatctctcatggtggttcagcttcaacacccgttgcagcaaacagaagaagtagcttgactgtgccggtgactaccgtagatatgattgaatcgaagaaagtgacgagcccaacgtcaagaatcgattttccccaagttcagaaacttttggtggagcaaatggcttcttccttaaccaaagatcctaactttacagcagctttagcagcagctgttaccggaaaattgtatcaacagaatcataccgagaaatagtttagcttcaaattccgttagagtttttagatttgaatttgtcatgagtaagagaaggagagtagattataatccattgtgatactgaaaatgtaacatgtaatcgtttttcatacaatctccaatacattcggcttt

SEQ ID NO: 2969 - protein, 302 aa, Arabidopsis thaliana
MDQYSSSLVDTSLDLTIGVTRMRVEEDPPTSALVEELNRVSAENKKLSEMLTLMCDNYNVLRKQLMEYVNKSNITERDQISPPKKRKSPAREDAFSCAVIGGVSESSSTDQDEYLCKKQREETVVKEKVSRVYYKTEASDTTLVVKDGYQWRKYGQKVTRDNPSPRAYFKCACAPSCSVKKKVQRSVEDQSVLVATYEGEHNHPMPSQIDSNNGLNRHISHGGSASTPVAANRRSSLTVPVTTVDMIESKKVTSPTSRIDFPQVQKLLVEQMASSLTKDPNFTAALAAAVTGKLYQQNHTEK

SEQ ID NO: 2970 - protein, 281 aa, Arabidopsis thaliana
MRVEEDPPTSALVEELNRVSAENKKLSEMLTLMCDNYNVLRKQLMEYVNKSNITERDQISPPKKRKSPAREDAFSCAVIGGVSESSSTDQDEYLCKKQREETVVKEKVSRVYYKTEASDTTLVVKDGYQWRKYGQKVTRDNPSPRAYFKCACAPSCSVKKKVQRSVEDQSVLVATYEGEHNHPMPSQIDSNNGLNRHISHGGSASTPVAANRRSSLTVPVTTVDMIESKKVTSPTSRIDFPQVQKLLVEQMASSLTKDPNFTAALAAAVTGKLYQQNHTEK

SEQ ID NO: 2971 - protein, 253 aa, Arabidopsis thaliana
MLTLMCDNYNVLRKQLMEYVNKSNITERDQISPPKKRKSPAREDAFSCAVIGGVSESSSTDQDEYLCKKQREETVVKEKVSRVYYKTEASDTTLVVKDGYQWRKYGQKVTRDNPSPRAYFKCACAPSCSVKKKVQRSVEDQSVLVATYEGEHNHPMPSQIDSNNGLNRHISHGGSASTPVAANRRSSLTVPVTTVDMIESKKVTSPTSRIDFPQVQKLLVEQMASSLTKDPNFTAALAAAVTGKLYQQNHTEK

SEQ ID NO: 2972 - DNA, 1379 bp, Arabidopsis thaliana
aaaaaaaaaacttcaaagagagagagagagagagttttgtgaactcaagaaaataaaaaaagttatagttaatgggattcggcttagagagtatcaaatcaatctccggcggatggggcgcggcggcgcgttcctgtgacgcttgtaaatcagttaccgccgccgtgttctgtcgagttgactcagctttcttatgcatagcatgtgacacaagaatccattccttcactcgccacgagcgcgtgtgggtttgtgaagtttgtgaacaagctcccgccgccgtcacttgcaaagccgacgccgccgctctttgcgtcagttgtgatgccgatattcactctgctaatcctctcgctagccgtcacgaacgtgtccccgtcgaaactttcttcgactcagccgaaaccgccgtcgccaaaatctcagcttcttcgacttttggtatccttggctcatccaccaccgttgatttaaccgctgttccggttatggctgatgatctcggtttatgtccgtggttacttcctaatgatttcaacgaaccggctaaaatcgaaatcggaactgaaaacatgaaaggttcttctgactttatgttttctgatttcgatcggcttattgatttcgagtttccgaattcgttcaatcatcatcaaaacaacgccggaggagatagtcttgttccggttcagacgaaaacagagcctctcccgttaactaacaatgatcattgcttcgatattgatttctgcagatcaaagctctctgctttcacttacccttctcaatcagtcagccacagtgtttcgacttcttctattgaatacggtgtagttcctgacggaaacacaaacaactctgttaaccggagcacgatcactagctcgacgactggtggtgatcatcaagcgagctctatggatagagaagctagggttttgaggtacagagagaagagaaagaacaggaaatttgagaagacgattcgttacgcttcgaggaaagcttatgcagagtcacggccaaggatcaaaggccggtttgcgaaaagaacagagacagaaaacgacgacattttccttagtcatgtttatgcttcagcagcacacgcacagtacggtgtcgtaccaacgttctgattcgaatctacggtggataaacaatcaacctgaagacttcatatcttccaccgttgatttacagtcggtgtataataagtatagtgagtcttaccgtagacaaacatcttatcctctttaccgttttaattactttttttttacgcgctctcactgccactgtaactcttttttttttttcttcctatatatgtatgcttatttttatttagaaaatgttatgaaatcatataatttggt

SEQ ID NO: 2973 - protein, 355 aa, Arabidopsis thaliana
MGFGLESIKSISGGWGAAARSCDACKSVTAAVFCRVDSAFLCIACDTRIHSFTRHERVWVCEVCEQAPAAVTCKADAAALCVSCDADIHSANPLASRHERVPVETFFDSAETAVAKISASSTFGILGSSTTVDLTAVPVMADDLGLCPWLLPNDFNEPAKIEIGTENMKGSSDFMFSDFDRLIDFEFPNSFNHHQNNAGGDSLVPVQTKTEPLPLTNNDHCFDIDFCRSKLSAFTYPSQSVSHSVSTSSIEYGVVPDGNTNNSVNRSTITSSTTGGDHQASSMDREARVLRYREKRKNRKFEKTIRYASRKAYAESRPRIKGRFAKRTETENDDIFLSHVYASAAHAQYGVVPTF

SEQ ID NO: 2974 - protein, 216 aa, Arabidopsis thaliana
MADDLGLCPWLLPNDFNEPAKIEIGTENMKGSSDFMFSDFDRLIDFEFPNSFNHHQNNAGGDSLVPVQTKTEPLPLTNNDHCFDIDFCRSKLSAFTYPSQSVSHSVSTSSIEYGVVPDGNTNNSVNRSTITSSTTGGDHQASSMDREARVLRYREKRKNRKFEKTIRYASRKAYAESRPRIKGRFAKRTETENDDIFLSHVYASAAHAQYGVVPTF

SEQ ID NO: 2975 - protein, 188 aa, Arabidopsis thaliana
MKGSSDFMFSDFDRLIDFEFPNSFNHHQNNAGGDSLVPVQTKTEPLPLTNNDHCFDIDFCRSKLSAFTYPSQSVSHSVSTSSIEYGVVPDGNTNNSVNRSTITSSTTGGDHQASSMDREARVLRYREKRKNRKFEKTIRYASRKAYAESRPRIKGRFAKRTETENDDIFLSHVYASAAHAQYGVVPTF

SEQ ID NO: 2976 - DNA, 1125 bp, Arabidopsis thaliana
tgacagagacaacaaactaaagttggtggtgatagagtgagagagaaacatggaaggcaaagaagaagacgtcaatgttggagccaacaagttcccagagagacagccgatcggtacggcggctcagacggagagcaaggactataaggaaccaccaccggcgccgtttttcgaacccggcgagctcaaatcttggtctttctacagagcagggatagctgagttcatagccactttccttttcctctacgtcaccgttttgacagtcatgggtgttaagagagctcccaatatgtgtgcctctgttggaatccaaggcatcgcttgggcttttggtggcatgatctttgctcttgtttactgtactgctggaatctcaggaggacatattaatccggcggtgacttttggtttgttcttggcgaggaagctatctttaaccagagctctgttctacatagtaatgcagtgccttggagctatatgtggtgctggtgtggttaaagggtttcaaccagggctgtaccagacgaatggcggtggagctaatgtggtggctcatggttacacaaagggttcaggtcttggtgcagagattgttggaacttttgttctggtttacactgttttctcagctactgatgctaagagaagtgccagagactctcatgtccctatcttggctccgcttccaattgggtttgctgtcttcttggtgcacttggctaccatcccaattactggaactggcattaacccggccaggagtctcggagctgccatcatctacaacaaggatcatgcttgggatgaccattggatcttctgggtcggtccattcattggtgctgcgcttgctgctctgtaccatcagatagtcatcagagctattcctttcaagtccaagacataaagtttcctacatattctctgatcatcatcaagctaagaatatatcaatctttaattctatatgctttcttcttgtttcctatgtcatgtgtgatgatctctatatgtaccactagagctttgatcttgtaacagtgtaaatgtgtaatctattatgtatcaatggcattgtatcttgtaacattaattatgtcaatggaagaatacattgtg

SEQ ID NO: 2977 - protein, 287 aa, Arabidopsis thaliana
MEGKEEDVNVGANKFPERQPIGTAAQTESKDYKEPPPAPFFEPGELKSWSFYRAGIAEFIATFLFLYVTVLTVMGVKRAPNMCASVGIQGIAWAFGGMIFALVYCTAGISGGHINPAVTFGLFLARKLSLTRALFYIVMQCLGAICGAGVVKGFQPGLYQTNGGGANVVAHGYTKGSGLGAEIVGTFVLVYTVFSATDAKRSARDSHVPILAPLPIGFAVFLVHLATIPITGTGINPARSLGAAIIYNKDHAWDDHWIFWVGPFIGAALAALYHQIVIRAIPFKSKT

SEQ ID NO: 2978 - protein, 214 aa, Arabidopsis thaliana
MGVKRAPNMCASVGIQGIAWAFGGMIFALVYCTAGISGGHINPAVTFGLFLARKLSLTRALFYIVMQCLGAICGAGVVKGFQPGLYQTNGGGANVVAHGYTKGSGLGAEIVGTFVLVYTVFSATDAKRSARDSHVPILAPLPIGFAVFLVHLATIPITGTGINPARSLGAAIIYNKDHAWDDHWIFWVGPFIGAALAALYHQIVIRAIPFKSKT

SEQ ID NO: 2979 - protein, 206 aa, Arabidopsis thaliana
MCASVGIQGIAWAFGGMIFALVYCTAGISGGHINPAVTFGLFLARKLSLTRALFYIVMQCLGAICGAGVVKGFQPGLYQTNGGGANVVAHGYTKGSGLGAEIVGTFVLVYTVFSATDAKRSARDSHVPILAPLPIGFAVFLVHLATIPITGTGINPARSLGAAIIYNKDHAWDDHWIFWVGPFIGAALAALYHQIVIRAIPFKSKT

SEQ ID NO: 2980 - DNA, 1645 bp, Arabidopsis thaliana
gacatcgtcttctttgctgcttctagggttctactattggttctctaacattgtcgttatgatgtccaacggtggtgattcgtcggaaattgtccgggaactggaagagttaaagctcaagaaggcagaaatagagcaccgtatttcgaccctcgaagctaagctccaggatacggcggcagttgaactgtacgacgccgtatccaacggtgactcttatctgacggcaccggagcttgaacatgggttatctccagatcagatttaccgttatagtcgtcaactgttacttccttcgtttgctgttgaagggcagtcaaatcttttgaagtcttcggtattagttattggagcaggaggactaggttcacctgccttattgtatcttgcagcatgtggtgttggtcagttgggtattatcgatcatgatgttgtagagctcaacaatatgcataggcagattatacacacagaagcatttattggacatcccaaagtgaaatctgctgctgctgcttgtcgctcgataaattcaacgatcaaagttgatgaatatgtggaagctcttcgcacttccaatgctttggaaatcctcagccaatatgatatcatagtcgatgcgactgataatcctccaagccgttacatgatcagtgattgttgtgtcttgttaggaaagcctttggtgtcgggtgctgcgcttggtatggaagggcagcttacggtttataatcataacggaggcccgtgttaccggtgtctttttcccactcctccacctacctcagcgtgccaaagatgttctgatagtggagttcttggagtagtgccaggtgttattggttgtctacaagcgctagagacaattaaactcgcaagcctggtgggagaaccactctctgaacggatgcttctttttgatgctttatcagcaaggatgcgcattgtcaagatcagaggcaggtcatcacagtgcaccgtgtgtggagacaattcatctttcaataagcaaacttttaaagattttgactatgaggacttcactcaatttcctttatttgcgggcccattgaacctgcttcctgcagaatcaagaattagcagcaaggagttcaaagaaattcttcaaaagaaggaacaacatgttctgctcgatgttcgaccttcacatcactataagattgtctctctcccggattcactcaacatccctcttgcaaacttagagactcggttaaacgagcttacttcagctcttaaagaaaagggaaatggccatgcgaacactgaatcttgcacaaatcctagtgtcttcgttgtatgcagacgcgggaatgattcacaaagagctgttcaatatcttcgtgagtcgggttttgattcggctaaggatataattggaggactggaagcttgggcagccaatgtcaaccccaacttccccacctactagagggaaacttttttgaaccaacttggttaaatccatagctcaagatgtttggagcagaaacatgtattattagttatgtcatgtaacaaaaccttatcaaatccatgttgaaacctgtctgaatcagagtgagttttagatgttatgataccatgtactcgtttgattcatatcattcatagattactgaac

SEQ ID NO: 2981 - protein, 483 aa, Arabidopsis thaliana
TSSSLLLLGFYYWFSNIVVMMSNGGDSSEIVRELEELKLKKAEIEHRISTLEAKLQDTAAVELYDAVSNGDSYLTAPELEHGLSPDQIYRYSRQLLLPSFAVEGQSNLLKSSVLVIGAGGLGSPALLYLAACGVGQLGIIDHDVVELNNMHRQIIHTEAFIGHPKVKSAAAACRSINSTIKVDEYVEALRTSNALEILSQYDIIVDATDNPPSRYMISDCCVLLGKPLVSGAALGMEGQLTVYNHNGGPCYRCLFPTPPPTSACQRCSDSGVLGVVPGVIGCLQALETIKLASLVGEPLSERMLLFDALSARMRIVKIRGRSSQCTVCGDNSSFNKQTFKDFDYEDFTQFPLFAGPLNLLPAESRISSKEFKEILQKKEQHVLLDVRPSHHYKIVSLPDSLNIPLANLETRLNELTSALKEKGNGHANTESCTNPSVFVVCRRGNDSQRAVQYLRESGFDSAKDIIGGLEAWAANVNPNFPTY

SEQ ID NO: 2982 - protein, 464 aa, Arabidopsis thaliana
MMSNGGDSSEIVRELEELKLKKAEIEHRISTLEAKLQDTAAVELYDAVSNGDSYLTAPELEHGLSPDQIYRYSRQLLLPSFAVEGQSNLLKSSVLVIGAGGLGSPALLYLAACGVGQLGIIDHDVVELNNMHRQIIHTEAFIGHPKVKSAAAACRSINSTIKVDEYVEALRTSNALEILSQYDIIVDATDNPPSRYMISDCCVLLGKPLVSGAALGMEGQLTVYNHNGGPCYRCLFPTPPPTSACQRCSDSGVLGVVPGVIGCLQALETIKLASLVGEPLSERMLLFDALSARMRIVKIRGRSSQCTVCGDNSSFNKQTFKDFDYEDFTQFPLFAGPLNLLPAESRISSKEFKEILQKKEQHVLLDVRPSHHYKIVSLPDSLNIPLANLETRLNELTSALKEKGNGHANTESCTNPSVFVVCRRGNDSQRAVQYLRESGFDSAKDIIGGLEAWAANVNPNFPTY

SEQ ID NO: 2983 - protein, 463 aa, Arabidopsis thaliana
MSNGGDSSEIVRELEELKLKKAEIEHRISTLEAKLQDTAAVELYDAVSNGDSYLTAPELEHGLSPDQIYRYSRQLLLPSFAVEGQSNLLKSSVLVIGAGGLGSPALLYLAACGVGQLGIIDHDVVELNNMHRQIIHTEAFIGHPKVKSAAAACRSINSTIKVDEYVEALRTSNALEILSQYDIIVDATDNPPSRYMISDCCVLLGKPLVSGAALGMEGQLTVYNHNGGPCYRCLFPTPPPTSACQRCSDSGVLGVVPGVIGCLQALETIKLASLVGEPLSERMLLFDALSARMRIVKIRGRSSQCTVCGDNSSFNKQTFKDFDYEDFTQFPLFAGPLNLLPAESRISSKEFKEILQKKEQHVLLDVRPSHHYKIVSLPDSLNIPLANLETRLNELTSALKEKGNGHANTESCTNPSVFVVCRRGNDSQRAVQYLRESGFDSAKDIIGGLEAWAANVNPNFPTY

SEQ ID NO: 2984 - DNA, 825 bp, Arabidopsis thaliana
agactctctcttctcatctctctctctctctctctcttcaaaccctaaaaattcacgcattttggcacagttaagttcgctgaatcccgttcctcttcctctgtctctctccccaagaaaatcactcagatcaaagctcaaatttcggatctcacagctgtcgcttcggtagaggaaaggatgaccagagaacatcctcccgagcctcttgatttcttcatctggactgttgaggatgttgggtcttggctcgaggagataaaccttgggggctaccgccagattttcaaagaaaatggtgtcaatggagaatatctagaaagcatgtctgtgtttactaccgagcagatccttcacttcataaggaggcatcacatgaagtggggagacttcatcaccctctgtaaagaactcagaaggattaaagtggcttgcttgaaaggtgagcagagagttagacggccatggtgggcaccgtcttgtctatccgtagtctttgttaaggcagccaaacgcaaccgacagtctcgtgttgtatctctcaagcttgaatcttgacattacactttggctgtttatgtacgtacttgtctctcttctcttctcttgttttcttttccttttttttttttttttggtttgggtttgtttgtggcacatgcactaggaagaaacaaactcaagtcaaaaaagctgtttggcttggtgaaatcttgcaagcgggaaaaaaattatgcgttttgtactttggtggtgtatacaaagcttgctctcagatgtttaatatatggcttgtgcaatctttatgtgacagataatagtgtg

SEQ ID NO: 2985 - protein, 125 aa, Arabidopsis thaliana
MTREHPPEPLDFFIWTVEDVGSWLEEINLGGYRQIFKENGVNGEYLESMSVFTTEQILHFIRRHHMKWGDFITLCKELRRIKVACLKGEQRVRRPWWAPSCLSVVFVKAAKRNRQSRVVSLKLES

SEQ ID NO: 2986 - protein, 77 aa, Arabidopsis thaliana
MSVFTTEQILHFIRRHHMKWGDFITLCKELRRIKVACLKGEQRVRRPWWAPSCLSVVFVKAAKRNRQSRVVSLKLES

SEQ ID NO: 2987 - DNA, 587 bp, Arabidopsis thaliana
attatttttagagacgagaggagacggcgacaatggcgaatttgatgatgagattaccaattagcttgagaagcttctctgtttcagcttcttcatccaacggttcgccgccggtgatcggaggatctagcggcggtgtaggaccgatgattgtggaattaccgttggagaagatacgaagaccgttgatgcgaaccagatccaacgatcagaacaaagtgaaagagcttatggatagtatccgtcaaatcggtcttcaagttccgattgatgtgattgaagttgatggaacttactatgggttctcgggatgtcacagatacgaggcgcatcagaagctagggcttccaactatacgttgcaaaatccgtaaaggaacaaaggaaacattaaggcatcatcttcgctgaagagagtttatacttttatgtatattgtttgtatgataggaactcgagagtgtgtgtatgaaagtggctatgtttaagttaataattagaactttgtacaatctttgtgacagatctagtgactggattctacgatctatttgcacactaataagtagctgaaacaatggttcaaag

SEQ ID NO: 2988 - protein, 125 aa, Arabidopsis thaliana
MANLMMRLPISLRSFSVSASSSNGSPPVIGGSSGGVGPMIVELPLEKIRRPLMRTRSNDQNKVKELMDSIRQIGLQVPIDVIEVDGTYYGFSGCHRYEAHQKLGLPTIRCKIRKGTKETLRHHLR

SEQ ID NO: 2989 - protein, 121 aa, Arabidopsis thaliana
MMRLPISLRSFSVSASSSNGSPPVIGGSSGGVGPMIVELPLEKIRRPLMRTRSNDQNKVKELMDSIRQIGLQVPIDVIEVDGTYYGFSGCHRYEAHQKLGLPTIRCKIRKGTKETLRHHLR

SEQ ID NO: 2990 - protein, 120 aa, Arabidopsis thaliana
MRLPISLRSFSVSASSSNGSPPVIGGSSGGVGPMIVELPLEKIRRPLMRTRSNDQNKVKELMDSIRQIGLQVPIDVIEVDGTYYGFSGCHRYEAHQKLGLPTIRCKIRKGTKETLRHHLR

SEQ ID NO: 2991 - DNA, 619 bp, Arabidopsis thaliana
gaactatcttcttttatcaaaaactatattcacaggctgccgtgtaccttctccatccaaagatggcaactatagctactggtcttaacattgcaacccagcgtgtcttcgtcaccagcgagaatcggccagtttgtctcgccggtccggtccatttgaacaattcgtggaatcttgggtcaagaacaactaaccggatgatgaaacttcagccgattaaagcagcaccggaaggagggatatcggacgtagtggagaaaagcattaaggaagctcaggagacttgtgcgggcgatcctgtgagtggagagtgtatagctgcgtgggacgaggttgaagaacttagcgcagcagctagccatgctagagacaagaagaaggctgatggttcggaccctttggaggaatactgcaaagacaatcctgagaccaacgagtgccgtacttacgacaactgaagcgatcaagatcctgttccggattcatacgtatacgacaaatctttgttccggtccatttggtaatgtcaggttatataaatcatgtctttgaatctgaattagctccaaaaacatttgtaatttgtagttccataaacgaatacaaaagccaaaatttc

SEQ ID NO: 2992 - protein, 151 aa, Arabidopsis thaliana
TIFFYQKLYSQAAVYLLHPKMATIATGLNIATQRVFVTSENRPVCLAGPVHLNNSWNLGSRTTNRMMKLQPIKAAPEGGISDVVEKSIKEAQETCAGDPVSGECIAAWDEVEELSAAASHARDKKKADGSDPLEEYCKDNPETNECRTYDN

SEQ ID NO: 2993 - protein, 131 aa, Arabidopsis thaliana
MATIATGLNIATQRVFVTSENRPVCLAGPVHLNNSWNLGSRTTNRMMKLQPIKAAPEGGISDVVEKSIKEAQETCAGDPVSGECIAAWDEVEELSAAASHARDKKKADGSDPLEEYCKDNPETNECRTYDN

SEQ ID NO: 2994 - protein, 86 aa, Arabidopsis thaliana
MMKLQPIKAAPEGGISDVVEKSIKEAQETCAGDPVSGECIAAWDEVEELSAAASHARDKKKADGSDPLEEYCKDNPETNECRTYDN

SEQ ID NO: 2995 - DNA, 771 bp, Arabidopsis thaliana
gagccataaactttagaaaagagagagagagacaaagagagatctgatcctttgaagaaacaacaccaaaaaaaaaaaaaaaagaatggcatcagcggatgaaaaggtggtggaagagaaggcttcggtgatttcaagcttgttggacaaagccaaaggtttctttgcggagaagctggcgaatattccgacgccggaagcaaccgtggacgacgttgatttcaaaggcgtgacacgtgatggagtagattatcacgccaaggtctccgtcaagaatccttactctcaatccatccctatctgccagatctcttacatcctcaagagtgccacaaggacgatcgcgtcaggcacgataccggacccgggttcgttggttgggagcggcacgacggttctggacgtaccggttaaggtggcttatagcatagcggttagtctgatgaaggatatgtgtacggactgggacattgactatcaactagacattgggctaaccttcgacattcctgttgttggtgatatcaccattcctgtctctactcagggagagatcaagctcccttcccttcgcgacttcttttaattaccttagttcaaatatagttttcttaaatcataatctaattttcaataatgtacgatccataaacatagacgatcggagattaatacatttctggaatcctttttttattttgttgatttcaacaaggattttattggttattaattatgtatgtttttcaattgtgtgtgtgatttatcttt

SEQ ID NO: 2996 - protein, 166 aa, Arabidopsis thaliana
MASADEKVVEEKASVISSLLDKAKGFFAEKLANIPTPEATVDDVDFKGVTRDGVDYHAKVSVKNPYSQSIPICQISYILKSATRTIASGTIPDPGSLVGSGTTVLDVPVKVAYSIAVSLMKDMCTDWDIDYQLDIGLTFDIPVVGDITIPVSTQGEIKLPSLRDFF

SEQ ID NO: 2997 - DNA, 1001 bp, Arabidopsis thaliana
aaggaagagaagagtgtccatatcatagattaaaaatcattcgttaatcaaaccacaaaatctaacttccacacacaaaacacacatacacaagaaaataaaaataaaaatggaattagttgaagagaccattccaaaagaagggaaaaagatgggagaaagaattgtggtcgacaaagcttatctttaccaagaagacaaaccactcaccgtctgcaagacttctctcttctacaccggcgatggcttcgccgcctatgactgccgtggtgatatcatcttcagggttgattcttatggacctgacacaagagataacgatgagattgtcctcatggacgcgaccgggaagtgtctccttaccgttaaacgaaagagaccaactctacaccaaagatgggaaggttttctcggcgagagatcggaaggtcagaaaccgatattcagcgtccgtagatcgtcgataatcggacggtgtacgatggaagtagaagtttacgacggaacaggagaagagtacattatcgatggagacttctcgcaacgaagctgtctcatatacgacacgaagaaatgtactgtggctgagatcaaacgcaaagtagacgcgtcaacgaacgtgatgcttggtcgagatgtgttcactctagagattaaaccgggttttgatggcgctttcgcgatgggtttggtcgttgtgcttgaccagatcaacggtgatgatccagttgagattggtgatgaacaggtacacccttttgtagaggattagtgtcggtctctctctcacctctctcagcggtcttcacgttaacatatcgaatctaatctttagtttttcaatctttggatttggaccatatgggattatggagatctgtttgtatcattctgtgttaagtcatttaagttgctacgttacataatatttatagactatagtctgtctcgggaaattcgttgactatacgtttgatgttacaaaattatttgtgcgttcc

SEQ ID NO: 2998 - protein, 220 aa, Arabidopsis thaliana
MELVEETIPKEGKKMGERIVVDKAYLYQEDKPLTVCKTSLFYTGDGFAAYDCRGDIIFRVDSYGPDTRDNDEIVLMDATGKCLLTVKRKRPTLHQRWEGFLGERSEGQKPIFSVRRSSIIGRCTMEVEVYDGTGEEYIIDGDFSQRSCLIYDTKKCTVAEIKRKVDASTNVMLGRDVFTLEIKPGFDGAFAMGLVVVLDQINGDDPVEIGDEQVHPFVED

SEQ ID NO: 2999 - protein, 206 aa, Arabidopsis thaliana
MGERIVVDKAYLYQEDKPLTVCKTSLFYTGDGFAAYDCRGDIIFRVDSYGPDTRDNDEIVLMDATGKCLLTVKRKRPTLHQRWEGFLGERSEGQKPIFSVRRSSIIGRCTMEVEVYDGTGEEYIIDGDFSQRSCLIYDTKKCTVAEIKRKVDASTNVMLGRDVFTLEIKPGFDGAFAMGLVVVLDQINGDDPVEIGDEQVHPFVED

SEQ ID NO: 3000 - protein, 145 aa, Arabidopsis thaliana
MDATGKCLLTVKRKRPTLHQRWEGFLGERSEGQKPIFSVRRSSIIGRCTMEVEVYDGTGEEYIIDGDFSQRSCLIYDTKKCTVAEIKRKVDASTNVMLGRDVFTLEIKPGFDGAFAMGLVVVLDQINGDDPVEIGDEQVHPFVED

SEQ ID NO: 3001 - DNA, 1524 bp, Arabidopsis thaliana
aaaatcacatttcacacgaaaaacctcgagtgagtgaagaaacaatggcagctatgaagctcctactctctcaagctcgccgccaaggtctaatcaaacccttttcgtctccatttcaacaaatcccaagactcttctcttcatcttcatcttcatcttcatcttcatcttcatcatccgattcgaatccatctcccgattcaaacgaatctcgcaaaaaggctgttacaatcgagccagtatcgtacgcggccaaacccaaggatcagaaatctgaaccgaaaaatgttgaatcgacggagaaccttcagtctccagaatcagcgaactggactcgtgaagaaatccgatatgtgaaagactctccttcgatcaatccggtttcttacgctcagcgtgtggctccacttccggaggatcgtgtcgccggtgagaatgaaggagatagaactccagaggagatggagagggagaggaagaggattgaattagagaatcgagctagaagaaggtttttaagagctaatgctgttgaagaagatacttcttcacttcctttgccaactttgcttaaaccagagttgaagcatggaaagaaacctattttcgatctcatggaggccattagagagattaagggcaatgccaaggcgaaatttgatgaaactcttgaggcgcatgtgagattgggcattgaaaaaggaagatctgagctgatagttcgtggtactttggctctaccccactctgttaagaaggatgtgaaagtggctttctttgccgagggagctgatgcagaggatgcaaaagctgcaggagctgatgtcgttggtggtcttgagcttattgaagagatcttgaaaagtggcaagattgactttgatagatgtcttgcaactccaaaaatgatgccccgtgtttacaagatatcaagaattcttaacaatcatggtttgatgccaaaccccaaacaaggtagtgtgaccaaggatgttacgaaagcagtcaaagacgcaaaagctggacataccaaatttagaatggataaaacgtctattcttcatgtgccacttggaaagatgagcttttctgaagaggctttacgagagaatgttggtgcgtttatgaacgcccttttgctagcgaagcctgctggattgaaaaagacttcaaaatatgctggttatgtgaatgcattccacttatgcagtacgatgggaaagggttatccagtatcgatacagtcgttatccagagcagcggacctccataccaaattgcagctcaagtgagctagtggagtccaaaagattaatcttaatcatcccgtaaaagttttttttactgttttccaaatgctgaatctttgaaaacattatgatttgttgtctcttaggtagtctattgctcaattgatcgaattggcttctgtccttttctcctttgtttttgttgtttgagagcttatcatccactttccatagaggcccttcacttgaataaaacatcataaatttttgtccg

SEQ ID NO: 3002 - protein, 429 aa, Arabidopsis thaliana
NHISHEKPRVSEETMAAMKLLLSQARRQGLIKPFSSPFQQIPRLFSSSSSSSSSSSSSSDSNPSPDSNESRKKAVTIEPVSYAAKPKDQKSEPKNVESTENLQSPESANWTREEIRYVKDSPSINPVSYAQRVAPLPEDRVAGENEGDRTPEEMERERKRIELENRARRRFLRANAVEEDTSSLPLPTLLKPELKHGKKPIFDLMEAIREIKGNAKAKFDETLEAHVRLGIEKGRSELIVRGTLALPHSVKKDVKVAFFAEGADAEDAKAAGADVVGGLELIEEILKSGKIDFDRCLATPKMMPRVYKISRILNNHGLMPNPKQGSVTKDVTKAVKDAKAGHTKFRMDKTSILHVPLGKMSFSEEALRENVGAFMNALLLAKPAGLKKTSKYAGYVNAFHLCSTMGKGYPVSIQSLSRAADLHTKLQLK

SEQ ID NO: 3003 - protein, 415 aa, Arabidopsis thaliana
MAAMKLLLSQARRQGLIKPFSSPFQQIPRLFSSSSSSSSSSSSSSDSNPSPDSNESRKKAVTIEPVSYAAKPKDQKSEPKNVESTENLQSPESANWTREEIRYVKDSPSINPVSYAQRVAPLPEDRVAGENEGDRTPEEMERERKRIELENRARRRFLRANAVEEDTSSLPLPTLLKPELKHGKKPIFDLMEAIREIKGNAKAKFDETLEAHVRLGIEKGRSELIVRGTLALPHSVKKDVKVAFFAEGADAEDAKAAGADVVGGLELIEEILKSGKIDFDRCLATPKMMPRVYKISRILNNHGLMPNPKQGSVTKDVTKAVKDAKAGHTKFRMDKTSILHVPLGKMSFSEEALRENVGAFMNALLLAKPAGLKKTSKYAGYVNAFHLCSTMGKGYPVSIQSLSRAADLHTKLQLK

SEQ ID NO: 3004 - protein, 412 aa, Arabidopsis thaliana
MKLLLSQARRQGLIKPFSSPFQQIPRLFSSSSSSSSSSSSSSDSNPSPDSNESRKKAVTIEPVSYAAKPKDQKSEPKNVESTENLQSPESANWTREEIRYVKDSPSINPVSYAQRVAPLPEDRVAGENEGDRTPEEMERERKRIELENRARRRFLRANAVEEDTSSLPLPTLLKPELKHGKKPIFDLMEAIREIKGNAKAKFDETLEAHVRLGIEKGRSELIVRGTLALPHSVKKDVKVAFFAEGADAEDAKAAGADVVGGLELIEEILKSGKIDFDRCLATPKMMPRVYKISRILNNHGLMPNPKQGSVTKDVTKAVKDAKAGHTKFRMDKTSILHVPLGKMSFSEEALRENVGAFMNALLLAKPAGLKKTSKYAGYVNAFHLCSTMGKGYPVSIQSLSRAADLHTKLQLK

SEQ ID NO: 3005 - DNA, 719 bp, Arabidopsis thaliana
gagccatttaaatctgattcatatcaaaaaattttcgatttaaaaaaaaaaccctcaaaaggtgttgatacggaaaaagaaaagggaaagaagaagagaatggatctagaatcggtgaaaaagtatctggaaggagatgaagacgaaaaggccaaggaaccaatggtggcgaaattaccacacagattcctcgaacgattcgtaaccaatggtcttaaagtggatctcatcgaacctggccgtatcgtctgctccatgaaaatccctcctcatctcctgaacgcagggaaattcttacacggaggagcaacggcgacgctggtggatttgataggatcagcagtgatctacacagccggagcttcacattccggagtttcagtggagatcaatgtttcataccttgatgctgcttttctcgatgaagagatagagatagaatcaaaggcattgcgtgttggtaaagctgtagcagtagtgagtgtggagctgaggaagaagacgactggtaagattattgctcaaggtcgtcataccaagtactttgctcctcgttccaacctttgatcgttcaaccaacctttcttcttttttacattcaataaacaacatcaaggtgtttttagtctttgtcccatttgcttcttattattattgatactaataaaactacattactatatgtttttctaataatacaaacaaccttactttttcac

SEQ ID NO: 3006 - protein, 188 aa, Arabidopsis thaliana
EPFKSDSYQKIFDLKKKPSKGVDTEKEKGKKKRMDLESVKKYLEGDEDEKAKEPMVAKLPHRFLERFVTNGLKVDLIEPGRIVCSMKIPPHLLNAGKFLHGGATATLVDLIGSAVIYTAGASHSGVSVEINVSYLDAAFLDEEIEIESKALRVGKAVAVVSVELRKKTTGKIIAQGRHTKYFAPRSNL

SEQ ID NO: 3007 - protein, 155 aa, Arabidopsis thaliana
MDLESVKKYLEGDEDEKAKEPMVAKLPHRFLERFVTNGLKVDLIEPGRIVCSMKIPPHLLNAGKFLHGGATATLVDLIGSAVIYTAGASHSGVSVEINVSYLDAAFLDEEIEIESKALRVGKAVAVVSVELRKKTTGKIIAQGRHTKYFAPRSNL

SEQ ID NO: 3008 - protein, 134 aa, Arabidopsis thaliana
MVAKLPHRFLERFVTNGLKVDLIEPGRIVCSMKIPPHLLNAGKFLHGGATATLVDLIGSAVIYTAGASHSGVSVEINVSYLDAAFLDEEIEIESKALRVGKAVAVVSVELRKKTTGKIIAQGRHTKYFAPRSNL

SEQ ID NO: 3009 - DNA, 609 bp, Arabidopsis thaliana
atcaaaaaaagtaataaagtaaagtatttcgccgtgagagaaagaacaatcaccatcgtctagggtttcaattcattgttccagtacttcatcgtagcgccgctcctctcttgtccagactccagaagattcaatggcacccaagaaagacaaagttcctcctccgtcctctaaacccgccaaatccggtggcggcaagcaaaagaaaaagaagtggagcaaaggaaagcaaaaggagaaagtgaacaacatggttttgtttgaccaagcaacttacgacaagcttctctctgaggctcccaagttcaaacttatcactccttctatcctctctgaccgtttgaggatcaatggatcgcttgctagaagggcgatcagagaattgatggctaagggaacaatcaggatggtctctgctcactcaagccagcagatctacactagggcaacccacggctaacttccttcgaatgttttagttgtttccttgtattttactcaatgtctttatgaaccattatctttctagaatgcacctttacttgcaaacattggtctatactacttaacccaatgagaatttggagatgaaaaagatggattttgcgc

SEQ ID NO: 3010 - protein, 108 aa, Arabidopsis thaliana
MAPKKDKVPPPSSKPAKSGGGKQKKKKWSKGKQKEKVNNMVLFDQATYDKLLSEAPKFKLITPSILSDRLRINGSLARRAIRELMAKGTIRMVSAHSSQQIYTRATHG

SEQ ID NO: 3011 - protein, 69 aa, Arabidopsis thaliana
MVLFDQATYDKLLSEAPKFKLITPSILSDRLRINGSLARRAIRELMAKGTIRMVSAHSSQQIYTRATHG

SEQ ID NO: 3012 - DNA, 1061 bp, Arabidopsis thaliana
atggaactttaaaaaagttatgatgttatccaaggaagatggaaaaccctacacactaagcaaaaaataagatctttctctctctgacgacgcaatccctaatttctggttctccgttcgtcggcggagaagatgggattcctttccaataaaatctccagagacgatgtgaaaccaggcgatcacatctattcatggcgtcaagcctacatttacgctcatcacggaatctatgtaggtaatggacaagtcaaccattttactcgtggtgatggtcaagagactggaactgggactttcttggacaacatcattgttagttcatctcataatcatggagacaacccatgtcctgattgtggagatcgatccaatcttggcggtgttatatcttcctgccttgaatgtttccttgccggaggtgatctctatgtctttgagtacagtgtttcccctgctatctttcttgccaaacctcgaggcggcgtatgcactatagcatcttcagatcctccagaagaagtcatctatcgagcaaattttctcttgcaaaatggttttggtgtgtacaatgtcttcaagaacaactgtgaagattttgccatctattgcaaaacgggtttgctagtggcaaacaccgacgtgggaaggagtggtcaagctgcttcaattgttgcagctgccagtgttcttctttcttcaccactcaggtttgtagcaggttttggtggtttggctgtggctggctatggcatgtactgcaccagtcgcttagtttcagatataggcatgcgatgggatgtgagcaaggtgcctgttgagagactagttgctgatgtggcttgtatgtcggacatggaagctaaaccagaagatgagaagactacttaatccaaaactgctcacacctgtattaccatactggttgatctctgattgtaaatgttgtggcggaagtaagagaatctgcttctgctgtatcgtgttgtgcaacatttgtttatgtaattacgaaacttggcttttgattaacactgaactatgatgcttcattttattat

SEQ ID NO: 3013 - protein, 252 aa, Arabidopsis thaliana
MGFLSNKISRDDVKPGDHIYSWRQAYIYAHHGIYVGNGQVNHFTRGDGQETGTGTFLDNIIVSSSHNHGDNPCPDCGDRSNLGGVISSCLECFLAGGDLYVFEYSVSPAIFLAKPRGGVCTIASSDPPEEVIYRANFLLQNGFGVYNVFKNNCEDFAIYCKTGLLVANTDVGRSGQAASIVAAASVLLSSPLRFVAGFGGLAVAGYGMYCTSRLVSDIGMRWDVSKVPVERLVADVACMSDMEAKPEDEKTT

SEQ ID NO: 3014 - DNA, 754 bp, Arabidopsis thaliana
tttttttttgttcccaaaacacatttttctacatcttagagtcttagagaagaaaggcaagataatcaatctcatggcgatgtcgatctccggagctgtgtttaatggtttgggttcttcgttcttgatcagtcgaggcaagagaagcggcgttggacttggcgtagtagctatgagggttggccggaaaaatgtgatcacttcacctaagtgcaagaagtcgtgggttccgacagccgtcaaaggtgatggtaactcaaaactcgaccccaaatggctcgatgatgcctcacagaaagcttccgactacgtgaaggagaagggaagcgaagtgggacatgcgtctgctcagaaagggcaagatgttaatgatcatgtagatagagcaaagtactatatgtttgagaaagctagtgaagcaatcgacaatgtggctgaaattgctcagtttgcttcggagtttgtgacggagaaaggcaaggagacgaagaaagaaactgcttcaatatcggagaaagccaaagacttcattgttgaaaaagccggtgaaattatagatatagcgacggatgtgagcaagaaaacggccaagtacgtcggagataaagccaaggaggttaaagaagctataatgcctccaaaaacttaaagtaaagatttgatgcagccctaaacatatacgaggtcttgaggcaatgtagcaaaaaatatgtattattatgcgagataatgaaactgttataatcagaactct

SEQ ID NO: 3015 - protein, 215 aa, Arabidopsis thaliana
FFLFPKHIFLHLRVLEKKGKIINLMAMSISGAVFNGLGSSFLISRGKRSGVGLGVVAMRVGRKNVITSPKCKKSWVPTAVKGDGNSKLDPKWLDDASQKASDYVKEKGSEVGHASAQKGQDVNDHVDRAKYYMFEKASEAIDNVAEIAQFASEFVTEKGKETKKETASISEKAKDFIVEKAGEIIDIATDVSKKTAKYVGDKAKEVKEAIMPPKT

SEQ ID NO: 3016 - protein, 191 aa, Arabidopsis thaliana
MAMSISGAVFNGLGSSFLISRGKRSGVGLGVVAMRVGRKNVITSPKCKKSWVPTAVKGDGNSKLDPKWLDDASQKASDYVKEKGSEVGHASAQKGQDVNDHVDRAKYYMFEKASEAIDNVAEIAQFASEFVTEKGKETKKETASISEKAKDFIVEKAGEIIDIATDVSKKTAKYVGDKAKEVKEAIMPPKT

SEQ ID NO: 3017 - protein, 189 aa, Arabidopsis thaliana
MSISGAVFNGLGSSFLISRGKRSGVGLGVVAMRVGRKNVITSPKCKKSWVPTAVKGDGNSKLDPKWLDDASQKASDYVKEKGSEVGHASAQKGQDVNDHVDRAKYYMFEKASEAIDNVAEIAQFASEFVTEKGKETKKETASISEKAKDFIVEKAGEIIDIATDVSKKTAKYVGDKAKEVKEAIMPPKT

SEQ ID NO: 3018 - DNA, 544 bp, Arabidopsis thaliana
ggaaagggacgatgagcaacagaagaagaaccggagacgatgacaaaggattgctctggaaacttccccaagttaggatcagagacattggaaaagttggtccagcttttggactcggtgtcggttgcggatttggtttcggcgccggtcttatcggaggtgtaggattcggaccaggagttcctggattacaatttggtcttggatttggagctggttgtggaattggtgtaggttttggctatggtgttggaagaggagctgcttatgatcactctcgttcttattacaacgttggaaaaccatctctgaatgaagttgattcactgattgatgaacttgttgttagcacgaagaagcttgtgaaagctactacaaatgaaatcgacaagtggttaaaatgatgaacttttaggatttgttgcagcttccaagtaaatggtagtgtttggtttgttcttagatcaataatgtagatttggggctagtgataatctcctttctttttgtacaattttacgtatggtataaagatggattcgcg

SEQ ID NO: 3019 - protein, 133 aa, Arabidopsis thaliana
KGTMSNRRRTGDDDKGLLWKLPQVRIRDIGKVGPAFGLGVGCGFGFGAGLIGGVGFGPGVPGLQFGLGFGAGCGIGVGFGYGVGRGAAYDHSRSYYNVGKPSLNEVDSLIDELVVSTKKLVKATTNEIDKWLK

SEQ ID NO: 3020 - protein, 130 aa, Arabidopsis thaliana
MSNRRRTGDDDKGLLWKLPQVRIRDIGKVGPAFGLGVGCGFGFGAGLIGGVGFGPGVPGLQFGLGFGAGCGIGVGFGYGVGRGAAYDHSRSYYNVGKPSLNEVDSLIDELVVSTKKLVKATTNEIDKWLK

SEQ ID NO: 3021 - DNA, 1247 bp, Arabidopsis thaliana
atggtgggatttaagaacagatacatgttaatggaagtttttctggatccggacaaggatcttctcggagaaggaacaccgatcattcttacacaattcaatctctcgaaagcaatcaaagacagtatcctcgtcaatttcggcgagtgtggtctaggttcgtctctcggttccttccaagtgaaatatgtgaatccaatcacgaagctatgcattgtaagatcatcaagagaagaacacagacaagtttggttagcaatcacattggtcaaaagcatcggaaactgtccggtgatcttaaacttgctcgatattagcggttgcatcagagcgtgtagagacacacttttaataaatccaaaatttctaatctggagagaacctatctctgaggtccaaactcttcggtggaggagaagaactgaaacggaaatgagatcccctagaaccttggaggtttggaagctaggcactgtcaactatttgaaatcccttaaactgcaggagaaattagtttcagagagaaaagctcatcagattccagataccctcctctcgcttcagcatccaccaacttatacgctcggaaagcgtagaaccgatcacaatctacttatccctgaatctgaacttacaaaaatcggagctgaacttcattatactcaaagaggaggagacatcaccttccatggccctcatcaagccatcttatatcccatcatttccttacgcagcattggttttggtgctaggaactacgtggagacattggagcggtcaatgatcgagtttgcttcgatttatggcgtgaaagctcgagcaggaaacaaatgtgagactggggtttgggttggggataggaagatcggtgctattggggttaggatatcttctggaatcactagtcatggtttggccttaaatatagatcctgatatgaagtactttgagcacattgtgccttgtgggattgctgataaagaagttacatctttgcgaagagagacggatactctgcttccttcagaagaagtgattcatgaacagttggtttcttgtttagccaaagcgttttcttatgatgatgttgtctggaaggaagatccttcactcattttggacacccaagataaagaataatccggtttgatccggttttgatttattgtctacaaaaaatgttattattttttgacgtgatgtggatttctgatattgtcttattcattctcaaattttcattaaaa

SEQ ID NO: 3022 - protein, 379 aa, Arabidopsis thaliana
MVGFKNRYMLMEVFLDPDKDLLGEGTPIILTQFNLSKAIKDSILVNFGECGLGSSLGSFQVKYVNPITKLCIVRSSREEHRQVWLAITLVKSIGNCPVILNLLDISGCIRACRDTLLINPKFLIWREPISEVQTLRWRRRTETEMRSPRTLEVWKLGTVNYLKSLKLQEKLVSERKAHQIPDTLLSLQHPPTYTLGKRRTDHNLLIPESELTKIGAELHYTQRGGDITFHGPHQAILYPIISLRSIGFGARNYVETLERSMIEFASIYGVKARAGNKCETGVWVGDRKIGAIGVRISSGITSHGLALNIDPDMKYFEHIVPCGIADKEVTSLRRETDTLLPSEEVIHEQLVSCLAKAFSYDDVVWKEDPSLILDTQDKE

SEQ ID NO: 3023 - protein, 371 aa, Arabidopsis thaliana
MLMEVFLDPDKDLLGEGTPIILTQFNLSKAIKDSILVNFGECGLGSSLGSFQVKYVNPITKLCIVRSSREEHRQVWLAITLVKSIGNCPVILNLLDISGCIRACRDTLLINPKFLIWREPISEVQTLRWRRRTETEMRSPRTLEVWKLGTVNYLKSLKLQEKLVSERKAHQIPDTLLSLQHPPTYTLGKRRTDHNLLIPESELTKIGAELHYTQRGGDITFHGPHQAILYPIISLRSIGFGARNYVETLERSMIEFASIYGVKARAGNKCETGVWVGDRKIGAIGVRISSGITSHGLALNIDPDMKYFEHIVPCGIADKEVTSLRRETDTLLPSEEVIHEQLVSCLAKAFSYDDVVWKEDPSLILDTQDKE

SEQ ID NO: 3024 - protein, 369 aa, Arabidopsis thaliana
MEVFLDPDKDLLGEGTPIILTQFNLSKAIKDSILVNFGECGLGSSLGSFQVKYVNPITKLCIVRSSREEHRQVWLAITLVKSIGNCPVILNLLDISGCIRACRDTLLINPKFLIWREPISEVQTLRWRRRTETEMRSPRTLEVWKLGTVNYLKSLKLQEKLVSERKAHQIPDTLLSLQHPPTYTLGKRRTDHNLLIPESELTKIGAELHYTQRGGDITFHGPHQAILYPIISLRSIGFGARNYVETLERSMIEFASIYGVKARAGNKCETGVWVGDRKIGAIGVRISSGITSHGLALNIDPDMKYFEHIVPCGIADKEVTSLRRETDTLLPSEEVIHEQLVSCLAKAFSYDDVVWKEDPSLILDTQDKE

SEQ ID NO: 3025 - DNA, 1000 bp, Arabidopsis thaliana
gctctcgacaaagcagctgagcgacttttgcacatttctagggttccaatcaaaatctatctgcaacaaaaatggctaatcgtttcagatcagggatctccttcttcaagaccatcgccgtaacagattctgtctcctccgttagatccaagtcgcttttcccagcgttgagaacttatgcaactgcttctgctcaaacaaccgctaatgttaaggtgcctattgctttagttggtgaaaatgggaactttgcttcatggctatacattgcagctgtgaaaatgaattccttggaaaagattgagacggatctttctgagatgattgaggcaatgaagacagctcctatttttgctcagtttacaaaggatccctctgttcctagagggacaagattggctgctattagggatgcttgtgatcaagcaaagtttgccgaacccactaagaacttcctctctttgttagctgagaatggaaagctgaagaacctagatgccattgtgaagaaatttatgcagctgacaaacgcacataggggagatgtcaaagttttggttaccacagtcattccgcttccccctgctgaggagaaagaactgactgagacgcttcaggagatcattggagcagggaagaaaatcactgtggaacaaaagattgatccaagtatctacggtggactaatcgtagagttccaacaaaaggtgttggacatgtcaatcaggacaagggcacaacagatggagaggctcctccgtgaacctgttgacttcaacaacctctgaaaatcttgagagaaatttcccccaagaaaacatgcttgtgatgaatgccaccaattgacaaataaatatggaccctcctgggaaacaatataatagctggccacttctctccctttgaattttgtcatttgctttttacatattgttgtttgcttcgaaataaagcttttcgagacatcaaatttcaatgagattgtttttgtttagatttg

SEQ ID NO: 3026 - protein, 238 aa, Arabidopsis thaliana
MANRFRSGISFFKTIAVTDSVSSVRSKSLFPALRTYATASAQTTANVKVPIALVGENGNFASWLYIAAVKMNSLEKIETDLSEMIEAMKTAPIFAQFTKDPSVPRGTRLAAIRDACDQAKFAEPTKNFLSLLAENGKLKNLDAIVKKFMQLTNAHRGDVKVLVTTVIPLPPAEEKELTETLQEIIGAGKKITVEQKIDPSIYGGLIVEFQQKVLDMSIRTRAQQMERLLREPVDFNNL

SEQ ID NO: 3027 - protein, 168 aa, Arabidopsis thaliana
MNSLEKIETDLSEMIEAMKTAPIFAQFTKDPSVPRGTRLAAIRDACDQAKFAEPTKNFLSLLAENGKLKNLDAIVKKFMQLTNAHRGDVKVLVTTVIPLPPAEEKELTETLQEIIGAGKKITVEQKIDPSIYGGLIVEFQQKVLDMSIRTRAQQMERLLREPVDFNNL

SEQ ID NO: 3028 - protein, 155 aa, Arabidopsis thaliana
MIEAMKTAPIFAQFTKDPSVPRGTRLAAIRDACDQAKFAEPTKNFLSLLAENGKLKNLDAIVKKFMQLTNAHRGDVKVLVTTVIPLPPAEEKELTETLQEIIGAGKKITVEQKIDPSIYGGLIVEFQQKVLDMSIRTRAQQMERLLREPVDFNNL

SEQ ID NO: 3029 - DNA, 671 bp, Arabidopsis thaliana
aatcacttataaggcctaaactcacttttcctagttttgccctttttttagctcatcaacagagagagagagagatccatggaaggtcttcaaagatcaacaatctctttccgccgtcagggatcttccggtatagtgtttgacgatcgtctcatcgccgaactcaacaaatcgggaaacaacgagcagaaagacgaaagtcaacgcgacgaacaacctaagcctatgtcggaaagctctgaacaggtcaaaccaatcgatgagaaagacaagcttagaccgattaaaaccggtggaggagcaccaggaggaatagagaggagtcgatctaacggtggaggagctcaacgacatcacagaacaacgggaagagtttctccggcagtggacccgccgtctccgagaatttcgtcatgcggttgttgctctgcgtttgggaagaatccgccggggaagaaagttaatccgaggaaaaggccgccgaaacgtagatcgaggtaggcgtcaggattaataatattcatgaggaaaaaatagtatacactgtctttcatctttcttcttcttcttttttgtatgtgtgtgttctttgttataaaaaactttaaatttgatttttcgatttgatcaacagactctggttatttgtaaattatctgtctttctttgtc

SEQ ID NO: 3030 - protein, 140 aa, Arabidopsis thaliana
MEGLQRSTISFRRQGSSGIVFDDRLIAELNKSGNNEQKDESQRDEQPKPMSESSEQVKPIDEKDKLRPIKTGGGAPGGIERSRSNGGGAQRHHRTTGRVSPAVDPPSPRISSCGCCSAFGKNPPGKKVNPRKRPPKRRSR

SEQ ID NO: 3031 - protein, 91 aa, Arabidopsis thaliana
MSESSEQVKPIDEKDKLRPIKTGGGAPGGIERSRSNGGGAQRHHRTTGRVSPAVDPPSPRISSCGCCSAFGKNPPGKKVNPRKRPPKRRSR

SEQ ID NO: 3032 - DNA, 1047 bp, Arabidopsis thaliana
cccacaaagctgtgaccagaagatcagtgattgttcgatgaacgaagaggagccagacaaagaacacgtggcggattctactatgtcggcggcggcgattgatggtgtggcggctctgagatcggtgtttcagcgggtaaaccaggcggcggagaaagcgggtcgtgggtcggatcagatacgggtcgtagcggtgagtaagacgaaaccagtttctctgattcgccaagtatacgacgctggtcagaggtcttttggagagaattatgtgcaagagatcattgagaaggcacctcagcttccagaagatatagagtggcatttcattgggaatttgcagagcaacaaagtgaagcctttgctatctggtgttcctaaccttgtgaccgtggaaagtgttgatgatgaaaagattgcaaatatgcttgatcgtgtggttggtaatatcggaagaaagcccttgaaggtatttgtccaagtgaataccagtggtgaagactctaaattcggcgtggaaccctcgggatgcgtaggactggcgaaacacgtgaaggaagcttgctcgaatcttgagttttctggtttgatgacaatagggatggctgattacacttcaaccccagagaatttcaagttgcttgcgaaatgcagaagtgaagtgtgtaaggagcttggaataccggaggagcaatgtgagctatctatggggatgtctggtgactttgaactagcattgcagattgaactgggaagcacaaatgtgagaataggatctactattttcggggcgagagagtatcctaagaagtaatgatgtaaactactgagtgatgagattgattctaagtttgaacatcaaaaccagtttcagggaagaataagagcttaggttttaatgttgaaatcatgtagatcttctctcttcttttgttttgcattgtatttggtgatgttgcttgtaagttgtaaccaaggtacattattactatttttctaatttcatggatataaacacatgaaagaagaataaagaatcttgtctttgct

SEQ ID NO: 3033 - protein, 269 aa, Arabidopsis thaliana
PQSCDQKISDCSMNEEEPDKEHVADSTMSAAAIDGVAALRSVFQRVNQAAEKAGRGSDQIRVVAVSKTKPVSLIRQVYDAGQRSFGENYVQEIIEKAPQLPEDIEWHFIGNLQSNKVKPLLSGVPNLVTVESVDDEKIANMLDRVVGNIGRKPLKVFVQVNTSGEDSKFGVEPSGCVGLAKHVKEACSNLEFSGLMTIGMADYTSTPENFKLLAKCRSEVCKELGIPEEQCELSMGMSGDFELALQIELGSTNVRIGSTIFGAREYPKK

SEQ ID NO: 3034 - protein, 257 aa, Arabidopsis thaliana
MNEEEPDKEHVADSTMSAAAIDGVAALRSVFQRVNQAAEKAGRGSDQIRVVAVSKTKPVSLIRQVYDAGQRSFGENYVQEIIEKAPQLPEDIEWHFIGNLQSNKVKPLLSGVPNLVTVESVDDEKIANMLDRVVGNIGRKPLKVFVQVNTSGEDSKFGVEPSGCVGLAKHVKEACSNLEFSGLMTIGMADYTSTPENFKLLAKCRSEVCKELGIPEEQCELSMGMSGDFELALQIELGSTNVRIGSTIFGAREYPKK

SEQ ID NO: 3035 - protein, 242 aa, Arabidopsis thaliana
MSAAAIDGVAALRSVFQRVNQAAEKAGRGSDQIRVVAVSKTKPVSLIRQVYDAGQRSFGENYVQEIIEKAPQLPEDIEWHFIGNLQSNKVKPLLSGVPNLVTVESVDDEKIANMLDRVVGNIGRKPLKVFVQVNTSGEDSKFGVEPSGCVGLAKHVKEACSNLEFSGLMTIGMADYTSTPENFKLLAKCRSEVCKELGIPEEQCELSMGMSGDFELALQIELGSTNVRIGSTIFGAREYPKK

SEQ ID NO: 3036 - DNA, 911 bp, Arabidopsis thaliana
aacaatatactttgaatccgataaattttcgatcttcaaaatccataaaaatctctcctttatttagccctaaaacagagtattagagtttgattcgtaaaagagaatatttttaatctccgccgcaagtcgatgtcgataacgattccctacgatggctcaatctcccgcgagccatcaccgtctccaccgccgccaaaagcgaacacgaagaatctaccgacgaagattctctctaacttcctcataggtctaatcatgatccctgtagctataaccgcttttatctttatcctcacgtctctcggtttcaccttcttcttcgctttctactggtttcttcaacgaaactatcgccaccgtctccgccgccatcgccgtcacgaatactcagatgggttatctccaagatgcgtgaagaggcttcctcaattcaagtattgtgagcctagttcagagtacggaggcgatgattgtgttgtttgtatcgatggatttagacaaggacagtggtgtcggaagctgcctcgatgtggacatgtgtttcaccgaaagtgtgtggacttgtggttgattaaagtctcgacttgtccgatttgtagggatagggtttatagatttgaagaaggaagaagatggagaccacaaggtgaaattttttgatcggtggttttataattagatttgaaagtgtgtttagtttgttatcatatttagcagcaattttggttttcatcaatagtcatgtacagtgtcttttttttttttacacggcttcacaattgaaagcttgtttcttcaccgtttgatgaatttgatccaataagagaatgatgggtttctgtagaatttaacttagtttgaggtttgattatcatgccaattattaaattcaatctagtcaattactg

SEQ ID NO: 3037 - protein, 176 aa, Arabidopsis thaliana
MSITIPYDGSISREPSPSPPPPKANTKNLPTKILSNFLIGLIMIPVAITAFIFILTSLGFTFFFAFYWFLQRNYRHRLRRHRRHEYSDGLSPRCVKRLPQFKYCEPSSEYGGDDCVVCIDGFRQGQWCRKLPRCGHVFHRKCVDLWLIKVSTCPICRDRVYRFEEGRRWRPQGEIF

SEQ ID NO: 3038 - protein, 134 aa, Arabidopsis thaliana
MIPVAITAFIFILTSLGFTFFFAFYWFLQRNYRHRLRRHRRHEYSDGLSPRCVKRLPQFKYCEPSSEYGGDDCVVCIDGFRQGQWCRKLPRCGHVFHRKCVDLWLIKVSTCPICRDRVYRFEEGRRWRPQGEIF

SEQ ID NO: 3039 - DNA, 1242 bp, Arabidopsis thaliana
tgacgacacacaaaaacaacaatggagctactcacaagcttgaccaactggttaactccgacgactctcttcctcctcctcaatttcacgatcgccaccattttcatcaccaaccggttcagttcctgttcaagaaaacacaaccaacatcaagatggttacgggtcgtcgggtcatgaccaaaatcaggcacggtttggcagacctccttcgctcatagacagagtaaagtccatcaacttccatctgtacaattctccttcaccagaatccgagatccactactccgggtcggatcctaacccgaacccacctccttctctcttgcaacgggtcaaatccatcaacatgccttacttcaagttcccacaacacaattctgaaggagattacgctgcttacgagctcatgacccaacccgacgagactaaccgggtcgacccgatcgacaagatcccggaggatgacgtcacgaccgaacctagattcggagctccatcactcttgcagcgggtgaaatccataaagcttccttctttatacagatccgacccagatccaacaccagaagtgcaaacacatacgaggacgaagtcggagtcgagtaaaccggcgacgaagaagaagaagaaagctacaaagaagatgatgaaatctgctagcgagagacacatcggccgggaagaggaggagacagttgaggccgtggagaagagaaggccggagacgatgagagttgagagaacgacgtcgataggagacggaggagaagaaggtgtcgacgataaagcttcaaatttcatcaacaagtttaagcaacagcttaagctacagaggctagattcgtttctaaggtacagagagatgctcaagaacgattaagtgaagattacgcttttaccctttgtcggaatcgtctttccctcgctttccaatttgtactttcgtggtaaatacccctgaatctgaatggcgtttaggtcatttacgatacgtattttctagtttgtgttctagatttggtgatgactggatgacaaaactagtttgtgtcgtgtgcgtaattgctggatctggacgtatgagttccactgcacttttttgtttttactcgatggtaaaagtagtttttatgctgtttttacgtggaaaaaagtatttctaataatattattttctttaaatcgaacattcatcgataattgcgacagaagaaaaacattcatcgatacttctctcgtc

SEQ ID NO: 3040 - protein, 286 aa, Arabidopsis thaliana
MELLTSLTNWLTPTTLFLLLNFTIATIFITNRFSSCSRKHNQHQDGYGSSGHDQNQARFGRPPSLIDRVKSINFHLYNSPSPESEIHYSGSDPNPNPPPSLLQRVKSINMPYFKFPQHNSEGDYAAYELMTQPDETNRVDPIDKIPEDDVTTEPRFGAPSLLQRVKSIKLPSLYRSDPDPTPEVQTHTRTKSESSKPATKKKKKATKKMMKSASERHIGREEEETVEAVEKRRPETMRVERTTSIGDGGEEGVDDKASNFINKFKQQLKLQRLDSFLRYREMLKND

SEQ ID NO: 3041 - protein, 177 aa, Arabidopsis thaliana
MPYFKFPQHNSEGDYAAYELMTQPDETNRVDPIDKIPEDDVTTEPRFGAPSLLQRVKSIKLPSLYRSDPDPTPEVQTHTRTKSESSKPATKKKKKATKKMMKSASERHIGREEEETVEAVEKRRPETMRVERTTSIGDGGEEGVDDKASNFINKFKQQLKLQRLDSFLRYREMLKND

SEQ ID NO: 3042 - protein, 157 aa, Arabidopsis thaliana
MTQPDETNRVDPIDKIPEDDVTTEPRFGAPSLLQRVKSIKLPSLYRSDPDPTPEVQTHTRTKSESSKPATKKKKKATKKMMKSASERHIGREEEETVEAVEKRRPETMRVERTTSIGDGGEEGVDDKASNFINKFKQQLKLQRLDSFLRYREMLKND

SEQ ID NO: 3043 - DNA, 1018 bp, Arabidopsis thaliana
attacttaacccaaaccaaaaaaataaaaagttcatttcgaaagaagaagaagaaaacatcaaatcatgagtgggcaagagaatcatgatcatggccggatctcttctacgcccgccgccgcgtcggagccttccaaggctgctgctcactcctctgactacgctccttaccctaagctcgatcctaccgacgtcactcctcctcctcctcagcctattcccaccggtgccgccgcaaccaccatgccagcggaatccaatccttacgtttctccttcccctgccccaaggaatacgatggattcggtgaaggatacgttagggaaatgggggaaaatggctgccgacgccaccaagaaggcggaggatctcgccggaaatttttggcagcacttgaaaacaggcccaagtgtagcagatgctgctgtttcacgaattgctcaggggacaaaaatacttgcagagggtggatacgagaaggtcttcaagcaaacatttgattgccttcctgatgaaaaacttctcaagacctatgcttgctacttgtctacatctgctggtcctgtcctgggagttatgtatctttcgactcacaagcttgcgttctctagtgacaatcctctctcttacaaagagggtgagcagaccctgtggagctattacaaggtggtacttccggcgaatcagctgaaggcagtgaacccatcaacaagtagagtgaacacatctgataaatacatacaagtgatttccatcgacaaccacgagttctggtttatggggtttgtgacttatgaaagcgctgtgaagagccttcaagaagcggtgcagtcacatggtccgtgaaggtccactggtataaatggcagctcttagtgatattgtgcattaatatatggaacagtgtgttttagtatttgataccatttcaatgtgttctacattttgtcctcttggcgtttactcataaacattgcttttgttcatttccttttgtataaaattatttcttattttt

SEQ ID NO: 3044 - protein, 259 aa, Arabidopsis thaliana
MSGQENHDHGRISSTPAAASEPSKAAAHSSDYAPYPKLDPTDVTPPPPQPIPTGAAATTMPAESNPYVSPSPAPRNTMDSVKDTLGKWGKMAADATKKAEDLAGNFWQHLKTGPSVADAAVSRIAQGTKILAEGGYEKVFKQTFDCLPDEKLLKTYACYLSTSAGPVLGVMYLSTHKLAFSSDNPLSYKEGEQTLWSYYKVVLPANQLKAVNPSTSRVNTSDKYIQVISIDNHEFWFMGFVTYESAVKSLQEAVQSHGP

SEQ ID NO: 3045 - protein, 200 aa, Arabidopsis thaliana
MPAESNPYVSPSPAPRNTMDSVKDTLGKWGKMAADATKKAEDLAGNFWQHLKTGPSVADAAVSRIAQGTKILAEGGYEKVFKQTFDCLPDEKLLKTYACYLSTSAGPVLGVMYLSTHKLAFSSDNPLSYKEGEQTLWSYYKVVLPANQLKAVNPSTSRVNTSDKYIQVISIDNHEFWFMGFVTYESAVKSLQEAVQSHGP

SEQ ID NO: 3046 - protein, 182 aa, Arabidopsis thaliana
MDSVKDTLGKWGKMAADATKKAEDLAGNFWQHLKTGPSVADAAVSRIAQGTKILAEGGYEKVFKQTFDCLPDEKLLKTYACYLSTSAGPVLGVMYLSTHKLAFSSDNPLSYKEGEQTLWSYYKVVLPANQLKAVNPSTSRVNTSDKYIQVISIDNHEFWFMGFVTYESAVKSLQEAVQSHGP

SEQ ID NO: 3047 - DNA, 786 bp, Arabidopsis thaliana
tttcttcgtttctttgcaaaagaccagcgataattatgaacaaaggcggtggatccggtggcggatccggtggaggaagcggtccaacggccgccgccgccgccgcggctttacagaagcaaaaggcgttgttacagagagtggagactgacatcacatctgtcgtcgataacttcacgcagatcgtcaatgtttcaagggtgagtgatccgccggtgaagaactcgcaggagacatacatgatggagatgcgagcttctagaatggttcaagcagctgattctcttttgaaactcgtatcagaacttaagcaaacagcgatattttcaggatttgcatcactaaacgatcatgtagaacaaagaatagaagagtttgatcaagaggccgagaagacaaatcgattgttggctagaattgctgatgatgcatctgccaatcttaaagagctcgagtctcactattactcttctgctcagagattgactctagacatctgatattagaatgcctggagacaccagaggaaacagataaaacaattggttcataaaccagaggaaacggccatcgaaggatatgcagtttgaagtcatggacaacgttttggactatcctttcccacattgatcatatttcctctctcaattcgcatattacttagcaatcttaaatgttccagtctgatgaacaagcgtttgatgttttcatcaatcattagtgatttttttgctgttatcctcttgtatgttttgataattacgtgaaattacattctcttaacct

SEQ ID NO: 3048 - protein, 165 aa, Arabidopsis thaliana
SSFLCKRPAIIMNKGGGSGGGSGGGSGPTAAAAAAALQKQKALLQRVETDITSVVDNFTQIVNVSRVSDPPVKNSQETYMMEMRASRMVQAADSLLKLVSELKQTAIFSGFASLNDHVEQRIEEFDQEAEKTNRLLARIADDASANLKELESHYYSSAQRLTLDI

SEQ ID NO: 3049 - protein, 154 aa, Arabidopsis thaliana
MNKGGGSGGGSGGGSGPTAAAAAAALQKQKALLQRVETDITSVVDNFTQIVNVSRVSDPPVKNSQETYMMEMRASRMVQAADSLLKLVSELKQTAIFSGFASLNDHVEQRIEEFDQEAEKTNRLLARIADDASANLKELESHYYSSAQRLTLDI

SEQ ID NO: 3050 - protein, 86 aa, Arabidopsis thaliana
MMEMRASRMVQAADSLLKLVSELKQTAIFSGFASLNDHVEQRIEEFDQEAEKTNRLLARIADDASANLKELESHYYSSAQRLTLDI

SEQ ID NO: 3051 - DNA, 853 bp, Arabidopsis thaliana
ataagtaatcaaattccaaaaaaaataaaataatacaaatctctctttttctctctaaaaaatcttgatatggatcaaaacgtaccaataagcaagaagctatggaacatcgtacgttttctcttgtacatgatccgcaaaggcgtctcaaaaaacaaactcatcgctgacttcaacgccactctcaaacgtggcaagaacctcatgttccaccaacgtcgtcgtgtccacgccggttccaccgcctcagccgctctaaacgctacttcagccaccgcgtcatcgcgacaagagtacgagtttagctgcagcaacactccaaactattcattccctttctctaatatggctttcatgaggaaaaagagtcacaataatctcttcacgtgtggtcaaacgcctcagacgcttgacgacgacgtagccgccgctagagccgttcttgagcttcttaacggcgttggagagaaaggaaacgtcacgccggcagatttaacggtggctttgtctccttatttccccggttttggacagactccattggttagaccgttaagagtaacggactcaccgtttccgttaacgccggaaaatggtgatgtggctaatggacacgttgacaaagcagctgatgattttataaagaagttttataagaacttgaatcagcagaaaaaaatgattgagttcagctaaatattaatccgaattgtgtgtatcttcgtcatatttctcttcttccttaaatatttttttacccttttttctttctttcttttttttttctctcgttttgtgctgattaaaatccaaagatgtaatgatattttggggggtttttattttcgattcc

SEQ ID NO: 3052 - protein, 208 aa, Arabidopsis thaliana
MDQNVPISKKLWNIVRFLLYMIRKGVSKNKLIADFNATLKRGKNLMFHQRRRVHAGSTASAALNATSATASSRQEYEFSCSNTPNYSFPFSNMAFMRKKSHNNLFTCGQTPQTLDDDVAAARAVLELLNGVGEKGNVTPADLTVALSPYFPGFGQTPLVRPLRVTDSPFPLTPENGDVANGHVDKAADDFIKKFYKNLNQQKKMIEFS

SEQ ID NO: 3053 - protein, 188 aa, Arabidopsis thaliana
MIRKGVSKNKLIADFNATLKRGKNLMFHQRRRVHAGSTASAALNATSATASSRQEYEFSCSNTPNYSFPFSNMAFMRKKSHNNLFTCGQTPQTLDDDVAAARAVLELLNGVGEKGNVTPADLTVALSPYFPGFGQTPLVRPLRVTDSPFPLTPENGDVANGHVDKAADDFIKKFYKNLNQQKKMIEFS

SEQ ID NO: 3054 - protein, 163 aa, Arabidopsis thaliana
MFHQRRRVHAGSTASAALNATSATASSRQEYEFSCSNTPNYSFPFSNMAFMRKKSHNNLFTCGQTPQTLDDDVAAARAVLELLNGVGEKGNVTPADLTVALSPYFPGFGQTPLVRPLRVTDSPFPLTPENGDVANGHVDKAADDFIKKFYKNLNQQKKMIEFS

SEQ ID NO: 3055 - DNA, 897 bp, Arabidopsis thaliana
aaggggaaagagaaattaaattatttatttatttctgtcatcttctccttttctatttcaaaatcccaaatctaaagcactcctcgagaaaagtgtaacaatggcgagaagaccggacgaagaatacgactacttgtttaaagtggttttgatcggagactccggtgtcggcaagtctaatctcctctctagattcactcgcaacgagttctgcttagaatccaaatccaccattggtgtcgaattcgctactcgtactctccaagtggaaggaaggactgtgaaagctcagatatgggacacggctgggcaagaacgatacagagccataactagcgcctattacagaggtgcacttggagctcttttggtctatgatgtcaccaagccaacaacgtttgagaatgtaagcaggtggttaaaagaactaagagaccatgcagattccaatatagtgatcatgttgattgggaacaagacagatctgaagcatctcagagcagttgccacagaggatgctcagagctatgcagagaaagaaggcttatctttcatcgagacatcggctctcgaggcattaaacgtagaaaaggcttttcagacgattctctcggaggtttataggatcatcagcaagaagtcgatatcttcagaccagacaactgcaaatgccaacatcaaggaaggccaaacaattgatgtggctgctacttctgaatcaaacgctaagaagccttgttgctcatcgtcttgaaaggctttgtttgtgttgcacttaaaaaaagccaaatatctatgagactttatttcaaggcttgcgttgtatttgttttctttcttttttctgttgttgataatataactcaaagataattttttatatcaattgtggagttc

SEQ ID NO: 3056 - protein, 217 aa, Arabidopsis thaliana
MARRPDEEYDYLFKVVLIGDSGVGKSNLLSRFTRNEFCLESKSTIGVEFATRTLQVEGRTVKAQIWDTAGQERYRAITSAYYRGALGALLVYDVTKPTTFENVSRWLKELRDHADSNIVIMLIGNKTDLKHLRAVATEDAQSYAEKEGLSFIETSALEALNVEKAFQTILSEVYRIISKKSISSDQTTANANIKEGQTIDVAATSESNAKKPCCSSS

SEQ ID NO: 3057 - DNA, 887 bp, Arabidopsis thaliana
ctttttctggaagtgaattgtcttgagttgaacattgaacttcaattggtcggaatctgcaatttctgaggtttgggctcagtgtcttctctcgcgcgtccctcttcaccttcttatttctacctctttatttgcgaaatcacgtctaaaaccttgtaggtagaggaaaggacaagaatcccaggcagaagcaaccatggtgatggtgtctaattctacccatcaaaataaggaaatacatgtcagaaggagaatctctgagatatacaatagacgggaagaggagtttccatcacttaaagactacaatgactacttggaagaagtggagtgcatggtattcgacttgatagatggaatcaatgtcgaggcgattgagcagaagattaagagatattctaaggagaatgctgaacagataatgattaatagagctcgtaaggcagaagaattgactgcagccttggcagcttgcaaggccaaacccccacagacagatgctgacacgtcgtcgaaccatggggtcacggctggaactacatatggtcaggcttcacgaccaacgggaatgggcccacaacctgtacctatagtaggtggagcagagcgtcaacattacgctatggaagacgaagcgacgaggaggatgaaagcagagagagctggaggattttctttagagataagcaagaggagggctttggaagaagcatttgcaagcatttgggtttgatttctcaagcgatattagttttgtcccttatgatagtgactaggaggtcttgatagcttccattgttgtctcagtttactgtcttttactcttgtggctggtttgttttgtatagttgacaagactattacgggcatcaaggaaaacaaaattt

SEQ ID NO: 3058 - protein, 178 aa, Arabidopsis thaliana
MVMVSNSTHQNKEIHVRRRISEIYNRREEEFPSLKDYNDYLEEVECMVFDLIDGINVEAIEQKIKRYSKENAEQIMINRARKAEELTAALAACKAKPPQTDADTSSNHGVTAGTTYGQASRPTGMGPQPVPIVGGAERQHYAMEDEATRRMKAERAGGFSLEISKRRALEEAFASIWV

SEQ ID NO: 3059 - protein, 176 aa, Arabidopsis thaliana
MVSNSTHQNKEIHVRRRISEIYNRREEEFPSLKDYNDYLEEVECMVFDLIDGINVEAIEQKIKRYSKENAEQIMINRARKAEELTAALAACKAKPPQTDADTSSNHGVTAGTTYGQASRPTGMGPQPVPIVGGAERQHYAMEDEATRRMKAERAGGFSLEISKRRALEEAFASIWV

SEQ ID NO: 3060 - protein, 132 aa, Arabidopsis thaliana
MVFDLIDGINVEAIEQKIKRYSKENAEQIMINRARKAEELTAALAACKAKPPQTDADTSSNHGVTAGTTYGQASRPTGMGPQPVPIVGGAERQHYAMEDEATRRMKAERAGGFSLEISKRRALEEAFASIWV

SEQ ID NO: 3061 - DNA, 2689 bp, Arabidopsis thaliana
gacgaattttggttcgctgctgcataatttttacccatacatcttcctcatcttctctctccgtgttgactcttgaggcgatccaacaaacaacaacaacaacgccgcgattctcgagggaccaatccgttcagagagattaaagctgagctgagcttctccttataaaggaagatactgcttgttctacggaattttgagagatgcctcgggacttgtcaagatcgaggtcaccgtctccatcaccttcacgtcgtagaaagcactcgaggtctcccgtaaggcagaggcatagcaggaggagtagaagagacagaagcccttctccatactcatctcattcgtatagcaggtgatacccctagtgtttgttttttccgctattcgtttgccttagttatcattcgtttatacgaactgtaagaaacattggtggaacacggttatagatagacatgtaaagtttacagactcaagaattgcttttagtaaagttcctacttatagatatattttctacccttctctaaaagagagtgcaatgtctggatgctgctggctctgtatcgtaagcgttttttttgagtgatgctgcgtattggaaatatatcgtgtttatttggctgttgtgattaaatttgttgcaagagaatatgttttatgacctgagctttgtgatttttagaatgaaacctgtatattcggtaaagacataagttaagctgggataatagcactactgatagtctgatctagtttatattttaattgtatctgtagattattagttagaatcagttttaagagcgactatattatgttcttttaaatggagtttgttagcaatagtgatacaaaaccaccactattccttaggtaagataatatagtaatttgttgagaacatggctgagaagctaggaaaatgatacatgcgcttaccattataaaatagctcagtttcttcccgttcccacgggaggggaaatgagcagctgatggattgctcttaggtgttctttcattgatcccttgtctcgttagcttctcttcgtgtgataaaagttggagctgataattctttacagtgtatgaggtaactgcacatacttttgttttctttatgtgtaactgtgggctacctgatgcctagtcttcacgtgcgtggtacttcattagttccatctttttgcttactactttattttgggtaatgttcaggcgaaaaagtcgttctatttctcctaggcgccatcgaagtcgatctgttactcctaagagacgttctccaaccccaaaacgttacaaaagacaaaagagtaggagttcaactccatctcctgcaaaaagatctcccgccgcaacccttgagtcagccaaaaataggaatggagaaaaacttaaaagagaagaggaagaacgaaaaaggtaaatcaatacaaaattttgaagtaagatggatgttatggtgaaattaaggttttttgttctcaaatgttattttagtgtagtgtggaagtccttgattgttagtctcaaaagtgcgacaggttttatggtattctctcacaggctttgcttatggaagataagctatatttcgatttgtttatatttgatcctctggcacaaatgttcgtactatctcgatttgatgagttaccgtttgtcattacatggatcatgattgacttagagatgtaaatatgtccaaagcacaagaataatcttggtgaaggtttgcttgtgttatggtgacaaaaaagaaatttcttcacgaaatttaccattggtattgggaggagtgaaaatggaaacgatctcaacattttttacggatttgcaataaaattttggtcttttgctgttcaagattgaagacatcaggaaatgagaaagttcaggtgatattcaatattctgaacctgctgtggatgtcctctaatttttcactgtatttgctaccaggcgacagcgtgaagcagaactgaagctaatagaggaagaaactgtgaaacgggttgaagaagctattcgaaagaaggtcgaagaaagcttacagtctgagaaaatcaaaatggaaattctaacgctgttggaggaagggcgaaagagacttaatgaagaagtcgcggctcaacttgaggaggagaaagaggcttctcttattgaggctaaagaaaaagagggtgttatgcggtgtttgtcacaggaaagagagcaacaagagaaagaagagagggagagaatagcagaggagaacctaaagagagtggaagaagctcagagaaaagaagcaatggagaggcaaaggaaagaggaggaacggtatcgagagctagaggagctgcaacgacagaaagaagaagcgatgcgaaggaagaaagctgaagaggaagaagaacgtctcaaacagatgaaactgttgggtaaaaacaaatcacggcctaaattatcctttgccttaagctccaagtaaatgcgtgcatgcatgaagataaaaggattgatgtgatggatgatgatatgcatcttcttcctctcaaagatgctttatgattattgttattagtgcttcttgttggagcttaaactcttttatggcttttaattttttgtaattctatttttctcgttttgtaattttacgttaggttaatggtgatgaatgataatatagcaatgatcc

SEQ ID NO: 3062 - protein, 133 aa, Arabidopsis thaliana
MEILTLLEEGRKRLNEEVAAQLEEEKEASLIEAKEKEGVMRCLSQEREQQEKEERERIAEENLKRVEEAQRKEAMERQRKEEERYRELEELQRQKEEAMRRKKAEEEEERLKQMKLLGKNKSRPKLSFALSSK

SEQ ID NO: 3063 - protein, 94 aa, Arabidopsis thaliana
MRCLSQEREQQEKEERERIAEENLKRVEEAQRKEAMERQRKEEERYRELEELQRQKEEAMRRKKAEEEEERLKQMKLLGKNKSRPKLSFALSSK

SEQ ID NO: 3064 - protein, 76 aa, Arabidopsis thaliana
MDVMVKLRFFVLKCYFSVVWKSLIVSLKSATGFMVFSHRLCLWKISYISICLYLILWHKCSYYLDLMSYRLSLHGS

SEQ ID NO: 3065 - DNA, 1594 bp, Arabidopsis thaliana
tgcaaattacttacctggacggggtcaactcgtgatcaagaagacgagtggcctaggctagtgaattccattgcacataacggaagggtgcttagcttaaggtcttcccttgtggaagagcctgcgtcattatttgtggcagagggggtttgcgttcgcgcagcccctaccattcccagtagttcaatcttttgttcatgaatacccatggcctaggctagtggcttcctgcacttgaggtgcgctaagcctaaggtttccccaaatggccaagtgggagatcctgcgtcattatttgttgccttggggggctgcgttcgcgcggcccattccatccgcaatagttcaatctttttagctctctggtaactgttataacatctgaggtctttctttaattgttcacgtttttggtggagctattttattgaaggttgttaatttgactttggagatgcaatcttctaatcaaatctccacgtgagaagcgaggattctctcctcgtcattatttatccttcccaattagaaacaaaaaaagctgaaagatgtggttttttggatcgaaaggagcatctggattctcgtctcgttcaactgcagaggaagtcacacatggtgttgatgggactggtctcactgccatagtcacaggagcatcaagtggtataggagtagagacagcgcgtgttctttcactgcgtggtgtgcatgtggttatggcggtgaggaacactgactctggtgctaaagttaaggaagatattgtcaagcaagtccctggagctaaactcgatgtcatggagttagatctcagctcaatgcaatctgtcaggaaatttgcgtctgagtacaaatctactggtcttccactcaacctcttgatcaacaatgccgggattatggcatgtccttttatgctctctaaggacaacatcgagctgcaattcgcaaccaatcatttagatacaatgaagagcacatcacgtgaaagcaaacgagaaggaagaattgttaacctatcatcagaagctcatcggttctcgtatccagaaggagttcgttttgataagatcaatgacaagtcaagttacagtagtatgcgagcttatggacaatctaaactctgcaatgtgttgcacgccaacgagcttacaaagcaactgaaggaagatggagtcaatataacagcaaattcgcttcatccaggagccattatgactaacctcgggcgctacttcaacccctatttggctgtagcggttggtgcagtggctaaatatatactcaagtctgttccacagggagcggcaacaacttgctatgtggcattgaatcctcaagttgcaggagtttcaggggaatacttccaagatagcaacattgctaaaccattaccacttgtcaaagatacagaattggccaagaaggtttgggatttcagcaccaagcttaccgattcacaatcaggagaaagcagttcttgaaagtaaatgatgttcagtgaatctttactaatggtttcatgtttcaacgtctcttatctctactgtgacaatacttatttcagtctttatcaaaggaaataaaaacg

SEQ ID NO: 3066 - protein, 312 aa, Arabidopsis thaliana
MWFFGSKGASGFSSRSTAEEVTHGVDGTGLTAIVTGASSGIGVETARVLSLRGVHVVMAVRNTDSGAKVKEDIVKQVPGAKLDVMELDLSSMQSVRKFASEYKSTGLPLNLLINNAGIMACPFMLSKDNIELQFATNHLDTMKSTSRESKREGRIVNLSSEAHRFSYPEGVRFDKINDKSSYSSMRAYGQSKLCNVLHANELTKQLKEDGVNITANSLHPGAIMTNLGRYFNPYLAVAVGAVAKYILKSVPQGAATTCYVALNPQVAGVSGEYFQDSNIAKPLPLVKDTELAKKVWDFSTKLTDSQSGESSS

SEQ ID NO: 3067 - protein, 255 aa, Arabidopsis thaliana
MAVRNTDSGAKVKEDIVKQVPGAKLDVMELDLSSMQSVRKFASEYKSTGLPLNLLINNAGIMACPFMLSKDNIELQFATNHLDTMKSTSRESKREGRIVNLSSEAHRFSYPEGVRFDKINDKSSYSSMRAYGQSKLCNVLHANELTKQLKEDGVNITANSLHPGAIMTNLGRYFNPYLAVAVGAVAKYILKSVPQGAATTCYVALNPQVAGVSGEYFQDSNIAKPLPLVKDTELAKKVWDFSTKLTDSQSGESSS

SEQ ID NO: 3068 - protein, 228 aa, Arabidopsis thaliana
MELDLSSMQSVRKFASEYKSTGLPLNLLINNAGIMACPFMLSKDNIELQFATNHLDTMKSTSRESKREGRIVNLSSEAHRFSYPEGVRFDKINDKSSYSSMRAYGQSKLCNVLHANELTKQLKEDGVNITANSLHPGAIMTNLGRYFNPYLAVAVGAVAKYILKSVPQGAATTCYVALNPQVAGVSGEYFQDSNIAKPLPLVKDTELAKKVWDFSTKLTDSQSGESSS

SEQ ID NO: 3069 - DNA, 737 bp, Arabidopsis thaliana
aggttacatctatcgccgtcaaaggttccatctatcgccgccgctgagaccgccactttaggccgtctcgtccgcaatctccgtaaccaacaccacccgcatcgcctgcgaattgatcggtgaggtggaagatggagttttgtcccacatgtgggaatctgttgcgctacgagggaggtgggagttcgagattcttctgttccacatgtccatacgttgccaatatcgaaagacgggttgagataaagaagaagcaacttctggttaagaaatctatagaacctgttgttactaaagatgatatacccacagctgctgaaacagaagctccatgtccaaggtgtggccacgacaaggcgtacttcaaatcaatgcagattcgttcagcagatgagccagaatcaagattttatagatgcttgaagtgcgagttcacttggcgtgaggaatgaaccgatgatcatcaccttctctgtacccgctaattttgcaatcttctttgagtttgttttaccattacaaagtttgtagttcctctatgtactctggttctttctgtctcagagctcaagagtttctgtatttaaaacaatcgataaaattttggaatattgtgcaaagttttaatttttgaggtgaagaatgtaagcaaattgatctgttttgagatttttagtatcaagactgcgatgtatttgttattgcattggtatttgacttcttcctcttcctctgtt

SEQ ID NO: 3070 - protein, 106 aa, Arabidopsis thaliana
MEFCPTCGNLLRYEGGGSSRFFCSTCPYVANIERRVEIKKKQLLVKKSIEPVVTKDDIPTAAETEAPCPRCGHDKAYFKSMQIRSADEPESRFYRCLKCEFTWREE

SEQ ID NO: 3071 - DNA, 1041 bp, Arabidopsis thaliana
ctattttataaaattttagtaaaaagaagaaaaaaaaggaagaagaagaccaagaaattgaggtgcatgtgaggatgagtagtaaaaattaggaagactctagtctgggagagactttcagcagctatttctttgtcttctttctctttaaagaacctcactctctctctctttagtcaaaaatccccaattcgtgaacaaattagggtttttgaagtttgaagaaggagagaaagatgagtgcttcaaggtttatcaagtgtgtcactgtcggcgacggtgctgttggaaagacttgtcttctcatctcctacactagcaacactttccccacggattatgtgccaactgtgttcgataatttcagtgccaatgtgattgttgatggcaacactatcaacttgggattgtgggatactgcagggcaagaggactacaatagactaagacctttgagctatcgcggtgcagatgtcttcttacttgcattctcacttgtcagcaaagctagctatgaaaatgtttctaaaaagtgggttcctgaactgagacattatgctcctggtgttcccatcatcctcgttggaacaaagcttgatcttcgagatgataagcaattctttgccgagcaccctggtgctgtgcctatctctaccgctcagggtgaagaactaaagaagctgattggggcgcctgcttatatcgaatgcagtgcaaaaactcaacagaatgtgaaagcagtgtttgatgcggctatcaaggtcgttctccagccaccaaaaaacaagaagaagaagaagagaaaatctcagaaaggttgttctatactctgattcaacaagaagaaaggaatcaacaggagaattagagctataagtatttgttttctcctttttcataacttgtttacccaaggaatcaaaaatctgttgtttgtagtctgaaaatgacaaaagttgaagaactagtaacaagtatttgtattcttgtttgcattttgatctgtaaatataccacgaatccttgatttctctgtttcct

SEQ ID NO: 3072 - protein, 198 aa, Arabidopsis thaliana
MSASRFIKCVTVGDGAVGKTCLLISYTSNTFPTDYVPTVFDNFSANVIVDGNTINLGLWDTAGQEDYNRLRPLSYRGADVFLLAFSLVSKASYENVSKKWVPELRHYAPGVPIILVGTKLDLRDDKQFFAEHPGAVPISTAQGEELKKLIGAPAYIECSAKTQQNVKAVFDAAIKVVLQPPKNKKKKKRKSQKGCSIL

SEQ ID NO: 3073 - DNA, 663 bp, Arabidopsis thaliana
aaaatcaataacaacgataaaaaaacaaaccttccttaaccagaaccaaatttcagatttttaaacaacataagctctaatggcgtcaccaaagtcacccacaagaccaacccaacaaaacccacaacccaatttccacgattttcttcctaccatggccggaaacctaggcggtgaaggtctgatcggagagctatgcaacggcttcgagcttttgatggacagagagaaaggtgtcatcacgttcgagagtctccgacgtaacgctgcggcggttctgggtttaggagatttgactgatgaagatgtccggtgtatgattaaagaaggtgattttgactgcgacggtgcgttgaatcagatggagttttgtgtgttgatgtttaggcttagccctgatttgatggaagcgtcgcggtgtctcgtcacggaggtcattgaggaggagtttggcttcacgcgccggcattgacactggagagatttgggatcccttcctcttttatttaattcgattcatttgttacctttttcttaatttttccattaatgttaccattcacataattcttttaatcatagtacttgatactatttttacacttcagtttatatctttgatcagatgtgttgaacatatataaaataaagaaaaaaattcat

SEQ ID NO: 3074 - protein, 130 aa, Arabidopsis thaliana
MASPKSPTRPTQQNPQPNFHDFLPTMAGNLGGEGLIGELCNGFELLMDREKGVITFESLRRNAAAVLGLGDLTDEDVRCMIKEGDFDCDGALNQMEFCVLMFRLSPDLMEASRCLVTEVIEEEFGFTRRH

SEQ ID NO: 3075 - protein, 105 aa, Arabidopsis thaliana
MAGNLGGEGLIGELCNGFELLMDREKGVITFESLRRNAAAVLGLGDLTDEDVRCMIKEGDFDCDGALNQMEFCVLMFRLSPDLMEASRCLVTEVIEEEFGFTRRH

SEQ ID NO: 3076 - protein, 84 aa, Arabidopsis thaliana
MDREKGVITFESLRRNAAAVLGLGDLTDEDVRCMIKEGDFDCDGALNQMEFCVLMFRLSPDLMEASRCLVTEVIEEEFGFTRRH

SEQ ID NO: 3077 - DNA, 809 bp, Arabidopsis thaliana
agcattcctgtttgcaagagaatcacaaatctttgcttacggttcacgctttaaaaacacaactctcattctccttctcttcacaaaccactcatattttttttcacatacttctttgtagtgctactttccattatatcaaacactcagcaacctgatggcaacgagacggatattgaaagaattgaaggagttgcaaagagaccctcctgtatcatgcagtgcaggtccaacaggagaagatatgttccactggcaagctactataatgggtccgaatgaaagtccttactccggaggtgttttccttgtcaatattcatttccctcctgattatccttttaaacctcccaaggttgtattcagaaccaaagtgtttcacccaaacatcaacagtaatggaaacatatgtttggacattctcaaagaccaatggagccctgcccttaccatttctaaggtgcttctctctatatgctctcttctaacagatccaaaccctgacgaccctctggtgccagagatagctcacatatacaaaactgacaagaccaaatatgaagccatggctcgaagctggacccagaagtatgccttgttttaaagctcacaattcctctttttttcctttttattttggtttggtcttatttgtaataaaaaaagaagaagaagaaattgttataattttaatacaaacatatataatatataaagtagagttttcaaagttgttaactcatatgattgatgagatatcgacatgtattaaatctaattttgttaatatataaaaaatcttctaactc

SEQ ID NO: 3078 - protein, 148 aa, Arabidopsis thaliana
MATRRILKELKELQRDPPVSCSAGPTGEDMFHWQATIMGPNESPYSGGVFLVNIHFPPDYPFKPPKVVFRTKVFHPNINSNGNICLDILKDQWSPALTISKVLLSICSLLTDPNPDDPLVPEIAHIYKTDKTKYEAMARSWTQKYALF

SEQ ID NO: 3079 - protein, 119 aa, Arabidopsis thaliana
MFHWQATIMGPNESPYSGGVFLVNIHFPPDYPFKPPKVVFRTKVFHPNINSNGNICLDILKDQWSPALTISKVLLSICSLLTDPNPDDPLVPEIAHIYKTDKTKYEAMARSWTQKYALF

SEQ ID NO: 3080 - protein, 111 aa, Arabidopsis thaliana
MGPNESPYSGGVFLVNIHFPPDYPFKPPKVVFRTKVFHPNINSNGNICLDILKDQWSPALTISKVLLSICSLLTDPNPDDPLVPEIAHIYKTDKTKYEAMARSWTQKYALF

SEQ ID NO: 3081 - DNA, 1536 bp, Arabidopsis thaliana
aaaacagactttttctcttcttcttctttttggggctacgacaatctgaatttgatcccaaatcaaaactttcttcttcttcgtcttcctctaatcaaaactgtctcctaccaaaggtctttcctttctccagccagatatgtgatgtgagaaaaccaagcttctcgtacaacttcatcacctacttccttttgacgttttcaaatcttgagagagatgggtatatatctaagtactccaaaaacagacaagttctcagaagatggcgaaaatcataaactcagatatggtttatcctctatgcaaggttggcgtgcgtccatggaagatgctcatgctgcaatacttgatctcgatgataacacttccttcttgggtgtctatgatggtcatggaggtaaagttgtttctaagttctgtgccaagtatctacaccagcaggttcttagtgatgaggcgtatgcagctggagacgtagggacttctcttcaaaaagcatttttcagaatggatgagatgatgcaaggacaaagagggtggcgagagttagcagtacttggtgacaaaatcaataagttcagtgggatgattgaagggcttatatggtcaccaagaagtggggacagtgctaataaacctgatgcttgggcgtttgaggaaggtcctcattctgattttgctggacctaattctgggagcacggcatgcgtagctgttgttagagacaagcagctatttgttgcaaatgcaggtgactcacgttgtgtgatatccagaaagaatcaggcttataatctttctagagatcacaaaccagatcttgaagctgagaaagaaaggatattgaaagctggtggctttatacatgcagggcgagtcaatggaagcttaaatctatcacgagctatcggtgacatggaattcaagcagaataagtttttgccatctgaaaagcaaatagttaccgctagtccagatgttaacactgttgaactctgtgatgatgatgatttccttgttcttgcctgcgatggaatttgggattgcatgacaagccaacaactcgttgatttcatacatgaacaattgaattcagagaccaaactctcggtggtatgtgaaaaagttctcgatagatgtctggctccaaacacttcaggtggtgaaggctgtgataacatgaccatgatattggttcgattcaagaaccctactccatcagagaccgaactaaaaccagaagcaagccaggcagaaggaaaccacgatgagccgagctcatcaaactaggcccatcctcagagtcacggaagatccctctagatctagtattttggttcagattgtaaatcattttgaaagacagttatatatctcaacctgacgttgatttcagtatatcaccatttcctccgtgtgcagacttttgtctcatgagctcccataatgtagaaaggaataattggtgtaaaaatgttgttggccttaaaagaacatatcatcatgtaaataaacaaaacaataagacatttacac

SEQ ID NO: 3082 - protein, 357 aa, Arabidopsis thaliana
MGIYLSTPKTDKFSEDGENHKLRYGLSSMQGWRASMEDAHAAILDLDDNTSFLGVYDGHGGKVVSKFCAKYLHQQVLSDEAYAAGDVGTSLQKAFFRMDEMMQGQRGWRELAVLGDKINKFSGMIEGLIWSPRSGDSANKPDAWAFEEGPHSDFAGPNSGSTACVAVVRDKQLFVANAGDSRCVISRKNQAYNLSRDHKPDLEAEKERILKAGGFIHAGRVNGSLNLSRAIGDMEFKQNKFLPSEKQIVTASPDVNTVELCDDDDFLVLACDGIWDCMTSQQLVDFIHEQLNSETKLSVVCEKVLDRCLAPNTSGGEGCDNMTMILVRFKNPTPSETELKPEASQAEGNHDEPSSSN

SEQ ID NO: 3083 - protein, 329 aa, Arabidopsis thaliana
MQGWRASMEDAHAAILDLDDNTSFLGVYDGHGGKVVSKFCAKYLHQQVLSDEAYAAGDVGTSLQKAFFRMDEMMQGQRGWRELAVLGDKINKFSGMIEGLIWSPRSGDSANKPDAWAFEEGPHSDFAGPNSGSTACVAVVRDKQLFVANAGDSRCVISRKNQAYNLSRDHKPDLEAEKERILKAGGFIHAGRVNGSLNLSRAIGDMEFKQNKFLPSEKQIVTASPDVNTVELCDDDDFLVLACDGIWDCMTSQQLVDFIHEQLNSETKLSVVCEKVLDRCLAPNTSGGEGCDNMTMILVRFKNPTPSETELKPEASQAEGNHDEPSSSN

SEQ ID NO: 3084 - protein, 322 aa, Arabidopsis thaliana
MEDAHAAILDLDDNTSFLGVYDGHGGKVVSKFCAKYLHQQVLSDEAYAAGDVGTSLQKAFFRMDEMMQGQRGWRELAVLGDKINKFSGMIEGLIWSPRSGDSANKPDAWAFEEGPHSDFAGPNSGSTACVAVVRDKQLFVANAGDSRCVISRKNQAYNLSRDHKPDLEAEKERILKAGGFIHAGRVNGSLNLSRAIGDMEFKQNKFLPSEKQIVTASPDVNTVELCDDDDFLVLACDGIWDCMTSQQLVDFIHEQLNSETKLSVVCEKVLDRCLAPNTSGGEGCDNMTMILVRFKNPTPSETELKPEASQAEGNHDEPSSSN

SEQ ID NO: 3085 - DNA, 506 bp, Arabidopsis thaliana
aaaattctaattgttggcccattttcgcctcttcttcttcgatcacgagatcgagaatcgtttctctcaattatctcaagctctaagatctcacttcttctctctcaaactcgacgccgttcgttttctccgtcgattaatcgagtattatgaatcaggaagcagctgaaacagcgagagagtcactggagctggtgtttcggatgtcgaacatcttggagacaggtcttgatcgacatactttgtctgttcttatagctctttgcgatattggtcttaaccctgaggctctcgctactctcgtcaaggagcttcgtagggattctgctacaacaacaactacggttgattaagaagatgcctaatcaaatagtatcattcatgcttgttttctaagtttcaatttcattatgctattgatgtgtaaattagggttggtaaggtaattgaatagagagtttcagagacaaattggtaataagtatgagtcatacgcactcaatcct

SEQ ID NO: 3086 - protein, 67 aa, Arabidopsis thaliana
MNQEAAETARESLELVFRMSNILETGLDRHTLSVLIALCDIGLNPEALATLVKELRRDSATTTTTVD

SEQ ID NO: 3087 - protein, 50 aa, Arabidopsis thaliana
KILIVGPFSPLLLRSRDRESFLSIISSSKISLLLSQTRRRSFSPSINRVL

SEQ ID NO: 3088 - protein, 49 aa, Arabidopsis thaliana
MSNILETGLDRHTLSVLIALCDIGLNPEALATLVKELRRDSATTTTTVD

SEQ ID NO: 3089 - DNA, 1460 bp, Arabidopsis thaliana
atatcatacgtcaatttataaacgtttcttctcattcgtcatctagtcccattctctgtccataacaatgaatatcaattgttctccattagggtttctaatttcactcttcttcattgttacttttcttgcaccacaagtcaaatctagggctttctttgtctttggtgactctctcgtcgacaatggaaacaacgactacctcgtcaccactgcccgtgccgacaattacccgtatggtatcgactacccgacccgtagacccaccggacgtttctctaacggccttaacattcccgacattatcagtgaggctataggcatgccgtcgactttgccgtaccttagcccgcatctcaccggagaaaatcttctagtcggtgctaattttgcctccgcaggaattggaatcctcaacgacactggaattcaattcgtaaacataattagaatttctaaacagatggaatacttcgaacagtaccagctacgagtgagtgcattgatcggaccagaagctacacaacagctagttaaccaagctcttgtcctaattacactcggtggtaatgatttcgtcaacaattattatctaattccgttttcagctcgttctcgccaatacgcgttaccagactacgttgtgtatctcatttccgaatacggaaagattctcagaaaactctacgaactgggtgcaagacgagttttggtaactggaactggtgcaatgggatgtgctcccgcggagctggctcagcatagccgcaatggcgagtgctatggcgccctccaaacagcagccgctttgttcaatccgcaattagttgatttgatcgcatcagtcaatgctgaaattggtcaagacgtgtttgtagcagccaatgcctatcaaatgaacatggattatctatctaatcctgaacaatttgggtttgtgacatcgaaggtggcatgttgtggacaaggaccgtacaatggcataggactatgcacaccagtctcgaatttgtgtccgaatagagacttatatgcgttttgggatgcgtttcatccgacagagaaagccaataggatcatcgttaatcagatcctgactggttcctccaagtatatgcaccctatgaatcttagcacggccatgctattggattcttctaaaatctagtttaagtgatttctgtcaactaaatgtcaggtcattccttctgtactttgcattgttgttaatgtgttgattaataagttcaatggctacaattagtttaagcatgcaagagagtttttattgtcggtcgtctagtttgatgtctttgcttgttgtatcttgttattttttttattttataaaagaaccgttgtatcttggttagcttagtttagtcttttttggtttgtatgccaattatatcatgtaatatttgaaaacttgtagtgattgatatatgattttcttttct

SEQ ID NO: 3090 - protein, 366 aa, Arabidopsis thaliana
MNINCSPLGFLISLFFIVTFLAPQVKSRAFFVFGDSLVDNGNNDYLVTTARADNYPYGIDYPTRRPTGRFSNGLNIPDIISEAIGMPSTLPYLSPHLTGENLLVGANFASAGIGILNDTGIQFVNIIRISKQMEYFEQYQLRVSALIGPEATQQLVNQALVLITLGGNDFVNNYYLIPFSARSRQYALPDYVVYLISEYGKILRKLYELGARRVLVTGTGAMGCAPAELAQHSRNGECYGALQTAAALFNPQLVDLIASVNAEIGQDVFVAANAYQMNMDYLSNPEQFGFVTSKVACCGQGPYNGIGLCTPVSNLCPNRDLYAFWDAFHPTEKANRIIVNQILTGSSKYMHPMNLSTAMLLDSSKI

SEQ ID NO: 3091 - protein, 281 aa, Arabidopsis thaliana
MPSTLPYLSPHLTGENLLVGANFASAGIGILNDTGIQFVNIIRISKQMEYFEQYQLRVSALIGPEATQQLVNQALVLITLGGNDFVNNYYLIPFSARSRQYALPDYVVYLISEYGKILRKLYELGARRVLVTGTGAMGCAPAELAQHSRNGECYGALQTAAALFNPQLVDLIASVNAEIGQDVFVAANAYQMNMDYLSNPEQFGFVTSKVACCGQGPYNGIGLCTPVSNLCPNRDLYAFWDAFHPTEKANRIIVNQILTGSSKYMHPMNLSTAMLLDSSKI

SEQ ID NO: 3092 - protein, 234 aa, Arabidopsis thaliana
MEYFEQYQLRVSALIGPEATQQLVNQALVLITLGGNDFVNNYYLIPFSARSRQYALPDYVVYLISEYGKILRKLYELGARRVLVTGTGAMGCAPAELAQHSRNGECYGALQTAAALFNPQLVDLIASVNAEIGQDVFVAANAYQMNMDYLSNPEQFGFVTSKVACCGQGPYNGIGLCTPVSNLCPNRDLYAFWDAFHPTEKANRIIVNQILTGSSKYMHPMNLSTAMLLDSSKI

SEQ ID NO: 3093 - DNA, 2207 bp, Arabidopsis thaliana
acacaatcgaagtcgaactctcaggattcaatcttgataccaaagagaaacagaaataaactaacatcatcgctactgtcgcctataatcttgtgagctctttatcgtcttcaatggaagttcgatgatgtaaaaactcaaataagagtgattctagaatgggaaattttctatagaaaggaaaggttttccaaaactttaatgtagtacagagctgctaccgacaaaataagcagtttaagacacgataccaaagagaacctgacctgttcatgtctactttacttccctgtccaagagagaagatggcatttaacctcaactcttccatgcgtgcccacactttgtctaaataccagtttgttctttcaaagcaaagaactttttactgcaatgctacttcgtcaagtgctactgtgccatctcttgacaaaaatgattttctgaagctccaaaacggcagtgatattcggggtgtagcggtcactggggttgagggggaacctgtaagccttcctgaaccagtgactgaagccatagctgctgcttttgggcaatggctgttacacaagaagaaggctgaatcccggcgtttgagagtatctgttggccatgactctcgcatctctgcacaaactttgctggaggcggtttctcgaggtcttggtgtttctggattagatgttgttcagtttggattagcatcaacaccagcaatgtttaatagcacattgactgaagatgagtcattcttgtgcccagctgatggggctattatgataacagcaagccatcttccttacaacaggaacggtttcaagttctttaccagtgatggaggacttgggaaggttgatatcaagaacattttggagcgagctgcagatatttacaagaagctttctgatgaaaatttgaggaaatcacaaagagaaagttcttctattacaaaggttgactacatgtcagtatacacctctggtcttgtaaaggcagtccggaaagcagcaggagatttggagaagcctctagagggatttcatatagttgttgatgctggaaatggagctggaggattttttgctgccaaggtgcttgagcctttaggagcaattacttctggcagtcaatttctggaaccagatggtatgttcccaaatcatatccctaatccggaagataaggcggcaatggaagctataaccaaggctgttcttgataataaggctgatttgggtatcatctttgatactgatgttgataggtctgctgctgtggattcatctggccgtgaattcaaccgtaatcgtcttattgccttgctatcagccattgttctagaggaacaccctggcacaactatagttacggatagtgtcacttcggacggtctgacctcatttattgagaagaagcttggcggaaagcatcacaggttcaaaagaggttacaagaatgtcattgacgaagctattcgcttgaactcggttggggaagaatcacatctggctatagaaaccagtggtcatggagctctaaaggaaaaccattggctcgacgatggggcctatctcatggtaaaaatcctgaacaaactagctgcggcccgagctgctggtcaagggagtggcagcaaagttttaacagatcttgttgaaggtctggaagagcccaaagtggctttagaactgaggcttaaaatcgacaagaatcaccctgaccttgaaggaagtgatttccgggagtatggagagaaggtcctgcaacacgtgtcgaactcaatagaaacaaatccaaatcttataatagctccagttaactacgaagggatccgcgtttcgggctttggtggatggtttcttctcagactttctctccatgatcctgttcttccccttaacatcgaggcacagagtgaggatgatgctgtgaaattaggccttgtggttgctacgacagtgaaggagttcaatgctttggacacctgtgccttgtccaacctcactcactcctcctaagattggcatggaacaatgtaacaaatgcaaacaaatacagagagttcgagtttctttactaagacaatcattgcattgaagttatcaataaggtagtttttacagagaagacatgatcaatttattagagcttttgcttcctctattgaatacaacttgaccattaaacacgccttcaagctcttccac

SEQ ID NO: 3094 - protein, 581 aa, Arabidopsis thaliana
MSTLLPCPREKMAFNLNSSMRAHTLSKYQFVLSKQRTFYCNATSSSATVPSLDKNDFLKLQNGSDIRGVAVTGVEGEPVSLPEPVTEAIAAAFGQWLLHKKKAESRRLRVSVGHDSRISAQTLLEAVSRGLGVSGLDVVQFGLASTPAMFNSTLTEDESFLCPADGAIMITASHLPYNRNGFKFFTSDGGLGKVDIKNILERAADIYKKLSDENLRKSQRESSSITKVDYMSVYTSGLVKAVRKAAGDLEKPLEGFHIVVDAGNGAGGFFAAKVLEPLGAITSGSQFLEPDGMFPNHIPNPEDKAAMEAITKAVLDNKADLGIIFDTDVDRSAAVDSSGREFNRNRLIALLSAIVLEEHPGTTIVTDSVTSDGLTSFIEKKLGGKHHRFKRGYKNVIDEAIRLNSVGEESHLAIETSGHGALKENHWLDDGAYLMVKILNKLAAARAAGQGSGSKVLTDLVEGLEEPKVALELRLKIDKNHPDLEGSDFREYGEKVLQHVSNSIETNPNLIIAPVNYEGIRVSGFGGWFLLRLSLHDPVLPLNIEAQSEDDAVKLGLVVATTVKEFNALDTCALSNLTHSS

SEQ ID NO: 3095 - protein, 570 aa, Arabidopsis thaliana
MAFNLNSSMRAHTLSKYQFVLSKQRTFYCNATSSSATVPSLDKNDFLKLQNGSDIRGVAVTGVEGEPVSLPEPVTEAIAAAFGQWLLHKKKAESRRLRVSVGHDSRISAQTLLEAVSRGLGVSGLDVVQFGLASTPAMFNSTLTEDESFLCPADGAIMITASHLPYNRNGFKFFTSDGGLGKVDIKNILERAADIYKKLSDENLRKSQRESSSITKVDYMSVYTSGLVKAVRKAAGDLEKPLEGFHIVVDAGNGAGGFFAAKVLEPLGAITSGSQFLEPDGMFPNHIPNPEDKAAMEAITKAVLDNKADLGIIFDTDVDRSAAVDSSGREFNRNRLIALLSAIVLEEHPGTTIVTDSVTSDGLTSFIEKKLGGKHHRFKRGYKNVIDEAIRLNSVGEESHLAIETSGHGALKENHWLDDGAYLMVKILNKLAAARAAGQGSGSKVLTDLVEGLEEPKVALELRLKIDKNHPDLEGSDFREYGEKVLQHVSNSIETNPNLIIAPVNYEGIRVSGFGGWFLLRLSLHDPVLPLNIEAQSEDDAVKLGLVVATTVKEFNALDTCALSNLTHSS

SEQ ID NO: 3096 - protein, 562 aa, Arabidopsis thaliana
MRAHTLSKYQFVLSKQRTFYCNATSSSATVPSLDKNDFLKLQNGSDIRGVAVTGVEGEPVSLPEPVTEAIAAAFGQWLLHKKKAESRRLRVSVGHDSRISAQTLLEAVSRGLGVSGLDVVQFGLASTPAMFNSTLTEDESFLCPADGAIMITASHLPYNRNGFKFFTSDGGLGKVDIKNILERAADIYKKLSDENLRKSQRESSSITKVDYMSVYTSGLVKAVRKAAGDLEKPLEGFHIVVDAGNGAGGFFAAKVLEPLGAITSGSQFLEPDGMFPNHIPNPEDKAAMEAITKAVLDNKADLGIIFDTDVDRSAAVDSSGREFNRNRLIALLSAIVLEEHPGTTIVTDSVTSDGLTSFIEKKLGGKHHRFKRGYKNVIDEAIRLNSVGEESHLAIETSGHGALKENHWLDDGAYLMVKILNKLAAARAAGQGSGSKVLTDLVEGLEEPKVALELRLKIDKNHPDLEGSDFREYGEKVLQHVSNSIETNPNLIIAPVNYEGIRVSGFGGWFLLRLSLHDPVLPLNIEAQSEDDAVKLGLVVATTVKEFNALDTCALSNLTHSS

SEQ ID NO: 3097 - DNA, 731 bp, Arabidopsis thaliana
atccaccgttaaaagcccctttatatcccaagaaataggtgaacttgttacagaacaagcaaagatcaaagagaaaaatatcccaaaaccaaaaacagaggaagaaagaagaagaaaagatgccttcaagcacattctccgggactgttagcacgccgaagctgtcggtggcagtggacatgggaaacccttttctcaatctcaccgttgatgccttcctcaagatcggagctgttggagtcactaaatctcttgcagaagacacttacaaggccatcgacaaagggagtctctccaagagcactttggagcatgcgcttaagaagttgtgtaaagaaggtgtttactggggagctgctggtggagtgtacattggaacagaatacggaatcgaacgtatccgtggcagcagagattggaaaaacgcaatgttagcaggcgcggcgacaggagcagtgctctcagcggttggtaagaaaggcaaagacactattgtgatcgatgccattcttggtggcgcgcttgcaaccgcttctcagttcgttaacaatcattatttctactgattctccatcttcctttagggaccaatttggttcatatggtgtggattcctttgtttactctttaaataataataaaaaacaatgtagtgtttttgaaatgaatacattcgagtattgttgacgttaaatatgcaatttagctattttcaatatgagaaatgcctc

SEQ ID NO: 3098 - protein, 148 aa, Arabidopsis thaliana
MPSSTFSGTVSTPKLSVAVDMGNPFLNLTVDAFLKIGAVGVTKSLAEDTYKAIDKGSLSKSTLEHALKKLCKEGVYWGAAGGVYIGTEYGIERIRGSRDWKNAMLAGAATGAVLSAVGKKGKDTIVIDAILGGALATASQFVNNHYFY

SEQ ID NO: 3099 - protein, 128 aa, Arabidopsis thaliana
MGNPFLNLTVDAFLKIGAVGVTKSLAEDTYKAIDKGSLSKSTLEHALKKLCKEGVYWGAAGGVYIGTEYGIERIRGSRDWKNAMLAGAATGAVLSAVGKKGKDTIVIDAILGGALATASQFVNNHYFY

SEQ ID NO: 3100 - protein, 74 aa, Arabidopsis thaliana
MPSSRSELLESLNLLQKTLTRPSTKGVSPRALWSMRLRSCVKKVFTGELLVECTLEQNTESNVSVAAEIGKTQC

SEQ ID NO: 3101 - DNA, 766 bp, Arabidopsis thaliana
atcaaaggaactacgaactcaaagccaaggtaatcactcattctcatcacaagtccattaaggtgatgtaagcaaacacaaaaaaagtaggagaaaacatgatagaagaggagattgaggtagacgtcgatattaaaaccagggctgacaagttccacaagttcatcagaagatcacaacatgtgcccaaagccactcactacattaagggatgtgatctgctcgaaggcgagtggggaaaagttggaagcatactcttgtggaaattagtttttgatggagagccacgagtgtcaaaggatatgatcgaggtaatagatgaggagaagaatgtgattcagttgagggtgttagagggacctctgaagaaagaatacaagagcttcctgaaaacgatgaaagtgatgagccctaagcatggagggcccggaagtgtggtgaagtggaacatgaaatatgagaggattgatcagaacgtggatcacccaaacaggcttctccagttcttcgtcgaagtgactaaagagattgaccaatacctcttgtctaaggattaattaggggacagttctgcttggcttatgtgtgggagagttttgtatgcctatgtgtgaaagttgctagttgtaacattttgagtaattgagcttctcgtatttataagtacatgtacatataatatgatatgtgtttatatattcataaaatcatatcatattgtagtttaagccttcttaagaaaaagtgaaatttcccaatttttatc

SEQ ID NO: 3102 - protein, 152 aa, Arabidopsis thaliana
MIEEEIEVDVDIKTRADKFHKFIRRSQHVPKATHYIKGCDLLEGEWGKVGSILLWKLVFDGEPRVSKDMIEVIDEEKNVIQLRVLEGPLKKEYKSFLKTMKVMSPKHGGPGSVVKWNMKYERIDQNVDHPNRLLQFFVEVTKEIDQYLLSKD

SEQ ID NO: 3103 - protein, 84 aa, Arabidopsis thaliana
MIEVIDEEKNVIQLRVLEGPLKKEYKSFLKTMKVMSPKHGGPGSVVKWNMKYERIDQNVDHPNRLLQFFVEVTKEIDQYLLSKD

SEQ ID NO: 3104 - DNA, 1028 bp, Arabidopsis thaliana
gaaatcatgatatgtggtcattataacaagcgaatcaatcacacgcttcttccttcctcttccatcttcttcatatctcccttagtcacctctactctactctgcaggcaaaaatagttatggcgacttcttcgatcactatcccgaccattagaactccgattcatcgatcaaaatttctaggccaaacacatcaattttcaactgtaaaccggtcggttttcccgcctccaaaacagcagtcaaaactgtatcaagtaaaggccatgggtaaattcaatctatgggaagtgatgggaggaagaggattatgcaacggagagaaaggtattgagaaggagctccagaggaacattgaagacgagcaagagacatcaaaggctgagaacaacgagacagagagagagagcgatgacagtaacttgtcttttaaagtacctgaagatggtttcgagaaagagatgatgggtctcacaggaggatttcccggtggcgaaaagggtttaaaaacgtttatcgaaaaaaatccaccacctcctccaccaccaccacctgcaaaacaaggaagcgatgcatccgcggttgctacagataagaagccgaaagcgcccaagctaccccttctcatgccggggatgattgctatagtcaagaaccagaacagtccgtatcacatgtattgtggaattgtgcagaggatcactgatggaaaagctggtgtcttgttcgaaggaggaaactgggaccgtctcattactttcaggcttgaagagcttgaacgaagagaaaaaggtccaccgggtaagaatccaaagtcttgtattctcgagcctcttatcgaacagatgcaaaaggaagaggcagcaccataagtgatcttctcttctctgtatgtaagttcctgtgaatgtatatgtaacgtacctttgcgttttaggctacaatatttctgactggttctaaaagagcttcatcatgtgatataaaaaaaagaataaacgatgaatttcaatcataaagcacttaat

SEQ ID NO: 3105 - protein, 250 aa, Arabidopsis thaliana
MATSSITIPTIRTPIHRSKFLGQTHQFSTVNRSVFPPPKQQSKLYQVKAMGKFNLWEVMGGRGLCNGEKGIEKELQRNIEDEQETSKAENNETERESDDSNLSFKVPEDGFEKEMMGLTGGFPGGEKGLKTFIEKNPPPPPPPPPAKQGSDASAVATDKKPKAPKLPLLMPGMIAIVKNQNSPYHMYCGIVQRITDGKAGVLFEGGNWDRLITFRLEELERREKGPPGKNPKSCILEPLIEQMQKEEAAP

SEQ ID NO: 3106 - protein, 201 aa, Arabidopsis thaliana
MGKFNLWEVMGGRGLCNGEKGIEKELQRNIEDEQETSKAENNETERESDDSNLSFKVPEDGFEKEMMGLTGGFPGGEKGLKTFIEKNPPPPPPPPPAKQGSDASAVATDKKPKAPKLPLLMPGMIAIVKNQNSPYHMYCGIVQRITDGKAGVLFEGGNWDRLITFRLEELERREKGPPGKNPKSCILEPLIEQMQKEEAAP

SEQ ID NO: 3107 - protein, 192 aa, Arabidopsis thaliana
MGGRGLCNGEKGIEKELQRNIEDEQETSKAENNETERESDDSNLSFKVPEDGFEKEMMGLTGGFPGGEKGLKTFIEKNPPPPPPPPPAKQGSDASAVATDKKPKAPKLPLLMPGMIAIVKNQNSPYHMYCGIVQRITDGKAGVLFEGGNWDRLITFRLEELERREKGPPGKNPKSCILEPLIEQMQKEEAAP

SEQ ID NO: 3108 - DNA, 676 bp, Arabidopsis thaliana
tgaacaacaacaaagcaaaaacactcccaaaccaaaaaaagaagaagaagaagctaaattcgaatctctctcttttttgaaatatggctttttccaaatctctagtgtttgttcttctcgctgctcttttgatttcttccgcagtggctcaatctccggctccagctccatctaacgtcggaggtagacggatctcaccggctccttcacctaagaagatgactgctcctgctcctgcacctgaagtttctccttctccttctccggcagccgcattgactccagaatcctctgcttcaccaccatcgccgcctctagctgattctcctaccgctgactccccggctttgtctccatctgcgatctccgattctccgactgaagctcctggtcctgctcagggcggcgccgtttcgaacaaattcgccagtttcggatctgtggcggttatgttaactgctgccgttttggttatctaggttgttccgatcaatgaagcttctttgattttatttatttattttagatatattagagttttgtgagagagatgatgattcattatttttctcttctttctattattttctttgaatatttttctttcttcggctgatcctatgcgcgtttgtatctatccaatatttatctatctatatgatttatcagattttcc

SEQ ID NO: 3109 - protein, 131 aa, Arabidopsis thaliana
MAFSKSLVFVLLAALLISSAVAQSPAPAPSNVGGRRISPAPSPKKMTAPAPAPEVSPSPSPAAALTPESSASPPSPPLADSPTADSPALSPSAISDSPTEAPGPAQGGAVSNKFASFGSVAVMLTAAVLVI

SEQ ID NO: 3110 - protein, 86 aa, Arabidopsis thaliana
MTAPAPAPEVSPSPSPAAALTPESSASPPSPPLADSPTADSPALSPSAISDSPTEAPGPAQGGAVSNKFASFGSVAVMLTAAVLVI

SEQ ID NO: 3111 - DNA, 663 bp, Arabidopsis thaliana
ctatctctccgtaaacagttgctcaaaaccttcttcctgaaatggcttcttctctcatcttcctcctcctcgttaccctaaccttttcagcatcaaccctaatctcagccaaatccaacacaacaacaataatcgaatcaacttgcaaaaccacaaactactacaaattctgcgtctcagctctcaaatccgacccaagaagtcccacagccgacacaaaaggtctcgcctccattatggtcggcgttggtatgacaaacgccacctccaccgcaaattacatcgctggaaacctatccgccaccgtaaaagacaccgttctcaaaaaggtcttacaagattgctccgagaagtatgctctcgccgctgattctctccggctgacgattcaagatcttgatgatgaagcttatgactatgcctccatgcatgtgttggcggcgcaggattatcctaatgtttgccggaatatttttaggcgggttaaagggttggcttatccggtggagattcgccggcgtgaagctagtctgagacgtatttgtggtgttgtctccgggattcttgatcgccttgttgaatgatttacatttgcattaactactttcgtaaaatctctatttaaattatcgtatttcatgaatttaatatgaccgttacttt

SEQ ID NO: 3112 - protein, 180 aa, Arabidopsis thaliana
MASSLIFLLLVTLTFSASTLISAKSNTTTIIESTCKTTNYYKFCVSALKSDPRSPTADTKGLASIMVGVGMTNATSTANYIAGNLSATVKDTVLKKVLQDCSEKYALAADSLRLTIQDLDDEAYDYASMHVLAAQDYPNVCRNIFRRVKGLAYPVEIRRREASLRRICGVVSGILDRLVE

SEQ ID NO: 3113 - protein, 115 aa, Arabidopsis thaliana
MVGVGMTNATSTANYIAGNLSATVKDTVLKKVLQDCSEKYALAADSLRLTIQDLDDEAYDYASMHVLAAQDYPNVCRNIFRRVKGLAYPVEIRRREASLRRICGVVSGILDRLVE

SEQ ID NO: 3114 - protein, 110 aa, Arabidopsis thaliana
MTNATSTANYIAGNLSATVKDTVLKKVLQDCSEKYALAADSLRLTIQDLDDEAYDYASMHVLAAQDYPNVCRNIFRRVKGLAYPVEIRRREASLRRICGVVSGILDRLVE

SEQ ID NO: 3115 - DNA, 853 bp, Arabidopsis thaliana
gacattcctctctttcttctgctctcggaattggtgttgcagaagttgcaaatttggaagaaaagttaacaggactggtgaagtatcaaaatttggggttttgctacgatgacgctaggtgctcggcttgttgctcccatgattatacttctcctttttataccgattgaattagttaaagcggaagtcattacactgacaccagaaaccttttctgacaagataaaggagaaggatactgcgtggttcgtaaagttttgtgttccttggtgtaaacactgcaagaaactggggaatttgtgggaagacttgggaaaagcaatggagggagacgatgaaattgaggttggtgaagtagactgtggtactagcagagctgtttgcaccaaagttgaaattcactcgtatccaacatttatgctattttacaatggagaagaagtttcgaaatataaaggaaaaagagacgttgaatcgctcaaggcttttgttgtagaggaaactgaaaaggcagcagaaaaagcacagcttgaagacaaggaactgtgatacaactagtcggtgattattagaacctgatacattgttccctttggttttcattttgcctatgcagttgtgtgactcttaccgttagttagataggcatggttttcagcacgatggaggatcatctttgggtttaaaggtttttcacaccactgttttgctaaaatattcagtttccattttattcagagtcagataagcaaagacgtaagtgtagttagtcgagatttcttacaagtttgtgttgtatgttcgttttaagagcagctgcagaccaaagttcttgctttaaaatttcatatcc

SEQ ID NO: 3116 - protein, 146 aa, Arabidopsis thaliana
MTLGARLVAPMIILLLFIPIELVKAEVITLTPETFSDKIKEKDTAWFVKFCVPWCKHCKKLGNLWEDLGKAMEGDDEIEVGEVDCGTSRAVCTKVEIHSYPTFMLFYNGEEVSKYKGKRDVESLKAFVVEETEKAAEKAQLEDKEL

SEQ ID NO: 3117 - protein, 136 aa, Arabidopsis thaliana
MIILLLFIPIELVKAEVITLTPETFSDKIKEKDTAWFVKFCVPWCKHCKKLGNLWEDLGKAMEGDDEIEVGEVDCGTSRAVCTKVEIHSYPTFMLFYNGEEVSKYKGKRDVESLKAFVVEETEKAAEKAQLEDKEL

SEQ ID NO: 3118 - protein, 75 aa, Arabidopsis thaliana
MEGDDEIEVGEVDCGTSRAVCTKVEIHSYPTFMLFYNGEEVSKYKGKRDVESLKAFVVEETEKAAEKAQLEDKEL

SEQ ID NO: 3119 - DNA, 787 bp, Arabidopsis thaliana
aaatcttccagtcactcaaatcattctctcatggcagcttcttcctcaattccgccgtcaaccgccgtaacctccgtcgttcgcaaatctctcctcctctcaaccaccttctccttccccgcttcttcattgtctccctccacgaaactaccacaaagacacattcaaagattgctcctagcttcctcctccgcatccgcatccaccgttccttccgattccaaaccggcgaagaaagaaacagtctacttcgacggcggagctcattacggagatctattagccaatctcattctaggtctaaccatcctttggctcccactaaccttagctgcagtgtctcgagcttttaaccttcgttacaggttcactaacctccgcgtgacggttatttcgggactcaccggagatgatcggagcgatttctcgtacaaagtgataaaagacgttcaagttgtgccgaggttcatcggagaatggggagatatcatcattactttgaaagatggaactaaagtggatttgagaagtgtccctaagttcagagagattgctaagtactgtttatctatggctgatcaacctgctgttttgaaagaatctggtgctaaaggcttttgattatttctcatttctgggcaaaattgattcttcttgttgtgatttcttcagtacaaatcgaatcctttccatgttctttcatttgttattgatttcttcatctctgtattgttaagacgatcgtatctaaacggcgcgcgattttagctctacaataagaaacggc

SEQ ID NO: 3120 - protein, 206 aa, Arabidopsis thaliana
KSSSHSNHSLMAASSSIPPSTAVTSVVRKSLLLSTTFSFPASSLSPSTKLPQRHIQRLLLASSSASASTVPSDSKPAKKETVYFDGGAHYGDLLANLILGLTILWLPLTLAAVSRAFNLRYRFTNLRVTVISGLTGDDRSDFSYKVIKDVQVVPRFIGEWGDIIITLKDGTKVDLRSVPKFREIAKYCLSMADQPAVLKESGAKGF

SEQ ID NO: 3121 - protein, 196 aa, Arabidopsis thaliana
MAASSSIPPSTAVTSVVRKSLLLSTTFSFPASSLSPSTKLPQRHIQRLLLASSSASASTVPSDSKPAKKETVYFDGGAHYGDLLANLILGLTILWLPLTLAAVSRAFNLRYRFTNLRVTVISGLTGDDRSDFSYKVIKDVQVVPRFIGEWGDIIITLKDGTKVDLRSVPKFREIAKYCLSMADQPAVLKESGAKGF

SEQ ID NO: 3122 - protein, 116 aa, Arabidopsis thaliana
IFQSLKSFSHGSFFLNSAVNRRNLRRSQISPPLNHLLLPRFFIVSLHETTTKTHSKIAPSFLLRIRIHRSFRFQTGEERNSLLRRRSSLRRSISQSHSRSNHPLAPTNLSCSVSSF

SEQ ID NO: 3123 - DNA, 1726 bp, Arabidopsis thaliana
aaaaatggcactcaaagcgattctctttttgggtttatttctcgtcgtgatagtttctccgatcaccgtctacggtggagctgtgtgtccggcgagttccacgtttggtcgtggaagctttcctgatggtttcttgttcggtgctacaacttctgctttccagcatgaaggtgcagcagaagaaggaggccgaggttccagcatttgggactcattcactcttaaacaacattcagaaagcaacaacaatcttgacggcaggctcggagttgatttctatcatcattacaaggaagatgttcaactattgaaaaaactgaatatggatgcctttaggttctctatatcttggtcaagaatatttccccatgggaaaaaagacaagggagtgagtgaaacaggagttaaattctacaatgatcttatcaacgagctcattgcaaatggtgtaacgcctcttgtcacattgtttcaatgggatgtacctcaggctcttgaagatgaatacggcggtttcttgagtgaccgtattttggaggatttccgtgattttgcacagtttgctttcaataaatatggtgatagagtgaagcattgggttactataaacgaaccttatgaatttagtcgtggtggatacgagactggagagaaagcaccaggaagatgttctaaatatgtcaatgagaaatgtgttgcaggcaagagtggccatgaagtttacactgttagtcacaatctgctgttggctcatgccgaagctgtggaagaattcaggaaatgtggaaagtgcacaggtggaaagatcggaattgttcaaagtccaatgtggtttgagccttatgataagaaatccacctcgagtccttcagaggagatagtgaagagagctatggatttcactctaggctggcatatggagccaataacacatggagattaccctcaggccatgaaagatgttgttggtagtcgattaccatcttttacgcccgagcagaaggagaaactgaagggttcttatgattttgtcggtatcaattacttcacttctacatttgttgctcatacggacaatgttaatccagagaaaccgagttgggaagctgattctcgcttgcagttacattcgaataacgttgatgggttcaagattggttctcagcctgctactgcgaagtatcctgtttgcgctgacgggttaagaaaagttttgaaatacatcaaagagaactacaatgacccagaaatcatagtcactggaaacgggtacaaggagacacttgaagagaaagatgtacttccagatgccctcagcgatagtaacaggaagtattatcatatgagacatctcatggcattacatggagcagtctgcgaggacaaggttaatgttaaaggttactttgtgtcgtcgcttatggatggactagagtgggaagatggatacaagacgaggtctggactgtactatgtagactatggacacaatatgggacggcatgagaaacaatctgccaagtggctctccaagctccttgagaaagtcccggacacgattcagtcgaaggtagattcggattcaaggaaagagttataaatgatcagagatccttttcgcaactctgtttaatcgatcatatgatgttatgtgtgtttttatcttaaaagagtgtaatccacgatctatgtagtttatataataaataaagaagtaacttatatc

SEQ ID NO: 3124 - protein, 532 aa, Arabidopsis thaliana
KMALKAILFLGLFLVVIVSPITVYGGAVCPASSTFGRGSFPDGFLFGATTSAFQHEGAAEEGGRGSSIWDSFTLKQHSESNNNLDGRLGVDFYHHYKEDVQLLKKLNMDAFRFSISWSRIFPHGKKDKGVSETGVKFYNDLINELIANGVTPLVTLFQWDVPQALEDEYGGFLSDRILEDFRDFAQFAFNKYGDRVKHWVTINEPYEFSRGGYETGEKAPGRCSKYVNEKCVAGKSGHEVYTVSHNLLLAHAEAVEEFRKCGKCTGGKIGIVQSPMWFEPYDKKSTSSPSEEIVKRAMDFTLGWHMEPITHGDYPQAMKDVVGSRLPSFTPEQKEKLKGSYDFVGINYFTSTFVAHTDNVNPEKPSWEADSRLQLHSNNVDGFKIGSQPATAKYPVCADGLRKVLKYIKENYNDPEIIVTGNGYKETLEEKDVLPDALSDSNRKYYHMRHLMALHGAVCEDKVNVKGYFVSSLMDGLEWEDGYKTRSGLYYVDYGHNMGRHEKQSAKWLSKLLEKVPDTIQSKVDSDSRKEL

SEQ ID NO: 3125 - protein, 531 aa, Arabidopsis thaliana
MALKAILFLGLFLVVIVSPITVYGGAVCPASSTFGRGSFPDGFLFGATTSAFQHEGAAEEGGRGSSIWDSFTLKQHSESNNNLDGRLGVDFYHHYKEDVQLLKKLNMDAFRFSISWSRIFPHGKKDKGVSETGVKFYNDLINELIANGVTPLVTLFQWDVPQALEDEYGGFLSDRILEDFRDFAQFAFNKYGDRVKHWVTINEPYEFSRGGYETGEKAPGRCSKYVNEKCVAGKSGHEVYTVSHNLLLAHAEAVEEFRKCGKCTGGKIGIVQSPMWFEPYDKKSTSSPSEEIVKRAMDFTLGWHMEPITHGDYPQAMKDVVGSRLPSFTPEQKEKLKGSYDFVGINYFTSTFVAHTDNVNPEKPSWEADSRLQLHSNNVDGFKIGSQPATAKYPVCADGLRKVLKYIKENYNDPEIIVTGNGYKETLEEKDVLPDALSDSNRKYYHMRHLMALHGAVCEDKVNVKGYFVSSLMDGLEWEDGYKTRSGLYYVDYGHNMGRHEKQSAKWLSKLLEKVPDTIQSKVDSDSRKEL

SEQ ID NO: 3126 - protein, 425 aa, Arabidopsis thaliana
MDAFRFSISWSRIFPHGKKDKGVSETGVKFYNDLINELIANGVTPLVTLFQWDVPQALEDEYGGFLSDRILEDFRDFAQFAFNKYGDRVKHWVTINEPYEFSRGGYETGEKAPGRCSKYVNEKCVAGKSGHEVYTVSHNLLLAHAEAVEEFRKCGKCTGGKIGIVQSPMWFEPYDKKSTSSPSEEIVKRAMDFTLGWHMEPITHGDYPQAMKDVVGSRLPSFTPEQKEKLKGSYDFVGINYFTSTFVAHTDNVNPEKPSWEADSRLQLHSNNVDGFKIGSQPATAKYPVCADGLRKVLKYIKENYNDPEIIVTGNGYKETLEEKDVLPDALSDSNRKYYHMRHLMALHGAVCEDKVNVKGYFVSSLMDGLEWEDGYKTRSGLYYVDYGHNMGRHEKQSAKWLSKLLEKVPDTIQSKVDSDSRKEL

SEQ ID NO: 3127 - DNA, 894 bp, Arabidopsis thaliana
agagagtaagtaagtacaaccaaaaaaatctttatttctcttctccaaaagagttattataaaaagaaaaaaagaaagataagaacatttatatatattcccctcaaatctctctctgtctcaaactgtttgtctacagacgacaagtagattccttttcctttgctttctcagcatccaataattgtcatattatttctccattaagattcttgtttctttatttcccgagattattttcttgatttcctcctctgcttcctcttcccggagcttgttttttcaaagaatcaagatttgagatttgatggaatcaagaatggaaggagatgtgtattctggatttggagagagataccaaatggatggtaagttgttgcagaatttccagaagagctttgttcaagttcaagacattcttgatcagaaccggcttttgatcaacgagatcaatcagaaccatgagtcgaaacaagctgatcacttgggaagaaatgttggtttgataagagagctcaataacaatatcagaactgttgcaagtctttatggagatctctctcattcttttgctagatcggttgatgcttcatcggaaggcgaatctaccgggacattgaaatctgacggtaaggccaacaaccagaagagatttagatccgggtaatataaccaaaaacatcttgattttgtagattcaaagctaatttgattgtggattaaggtgtgtcatgtttttgttgttgttgttgtggaacagttatgacattaatattgtgttttcttcttaagggtcttcaacagttttgcttatgtaatttctgttgaaatgttatctacataatgtttatgtctttgattctgagataataaataaaagagttcctcttttgc

SEQ ID NO: 3128 - protein, 119 aa, Arabidopsis thaliana
MESRMEGDVYSGFGERYQMDGKLLQNFQKSFVQVQDILDQNRLLINEINQNHESKQADHLGRNVGLIRELNNNIRTVASLYGDLSHSFARSVDASSEGESTGTLKSDGKANNQKRFRSG

SEQ ID NO: 3129 - protein, 115 aa, Arabidopsis thaliana
MEGDVYSGFGERYQMDGKLLQNFQKSFVQVQDILDQNRLLINEINQNHESKQADHLGRNVGLIRELNNNIRTVASLYGDLSHSFARSVDASSEGESTGTLKSDGKANNQKRFRSG

SEQ ID NO: 3130 - protein, 101 aa, Arabidopsis thaliana
MDGKLLQNFQKSFVQVQDILDQNRLLINEINQNHESKQADHLGRNVGLIRELNNNIRTVASLYGDLSHSFARSVDASSEGESTGTLKSDGKANNQKRFRSG

SEQ ID NO: 3131 - DNA, 701 bp, Arabidopsis thaliana
gttgatgaaacagagagagatggcgaagatggttgttttatcagcgatgatgattttgatattggcatcgacgatctcagcaaaagagcagctcagcactaaagaatgtgaggatctagggtttagcggtcttgcactctgctccgattgccactcactctctgaatacgttaaggaccaagagttggtatctgattgcttgaaatgttgtgctgatgattctgaggattccatgagcaaggttacctattctggcgctatattagaggtgtgtatgaggaagttggttttctatcctgaaattgttggtttcattgaagaagagaaagaaaagttccctagcgtcaaagttcagtacattttcaactcaccacccaagttgatcatgctcgacgaagacggtgaacataaggaatcaattagaatcgacaactggaaacgcgaacatctactgcagtatatgcgagagaaggtcaagcctactgcagcaagttagttttatcccatgtagagctgaagaggatgatcctccctgtcacatttacatatgccaaagcattgcaatctagtagttaaaaacacattatgaccgacttatcttatctttgtccaagctatttggtcccttggtatcaacagtctgtatgttctgaacctttgcaattctcagtggtaatgtatttaatccaatgttcttatgg

SEQ ID NO: 3132 - protein, 164 aa, Arabidopsis thaliana
LMKQREMAKMVVLSAMMILILASTISAKEQLSTKECEDLGFSGLALCSDCHSLSEYVKDQELVSDCLKCCADDSEDSMSKVTYSGAILEVCMRKLVFYPEIVGFIEEEKEKFPSVKVQYIFNSPPKLIMLDEDGEHKESIRIDNWKREHLLQYMREKVKPTAAS

SEQ ID NO: 3133 - protein, 163 aa, Arabidopsis thaliana
MKQREMAKMVVLSAMMILILASTISAKEQLSTKECEDLGFSGLALCSDCHSLSEYVKDQELVSDCLKCCADDSEDSMSKVTYSGAILEVCMRKLVFYPEIVGFIEEEKEKFPSVKVQYIFNSPPKLIMLDEDGEHKESIRIDNWKREHLLQYMREKVKPTAAS

SEQ ID NO: 3134 - protein, 158 aa, Arabidopsis thaliana
MAKMVVLSAMMILILASTISAKEQLSTKECEDLGFSGLALCSDCHSLSEYVKDQELVSDCLKCCADDSEDSMSKVTYSGAILEVCMRKLVFYPEIVGFIEEEKEKFPSVKVQYIFNSPPKLIMLDEDGEHKESIRIDNWKREHLLQYMREKVKPTAAS

SEQ ID NO: 3135 - DNA, 722 bp, Arabidopsis thaliana
gctgactcaaatctccaaactcctagaaaatctccaaattcccaagtttgtttctttaatctctctattcctcacaaactcatcaatttccaacgaacccacaagatcaaatatttatccttttttcctcgttgagatcgatcacacacacacaaatctgaaatctgagatctttaacatcaatggcgtcatcgtctagcctgactcgatcgggaagcgtccacctagacgagaagtggaaactgtcaaagaaagacggcggcgcgtcgaggatcacgcgctcttcatcgacctcatcttcttccttcaacggcaagaaacaggggagatgtgcttttacgagaaagtgtgcaagattggttaaagaacagagagctcgtttctacatcatgcgtcgatgcgtaatcatgcttatttgctggagagataattactctgattcttaaaaaaaaaaaaaaaaaccaaatctctctctgtttcttgatttctctgtttctatgtttctgaaaccaaagtagatagttataatacatgtacataaagggttctgttttctgttggtttctacttctttagatgaactttagattttgtttatgattctggttagagaagctttgtttaagatcagttccagtgtgaaggaaaataaaaaaaaaacgaagaacagacaaattgtaaaatattttaatcaagtataaaatagtgaattagattcgtct

SEQ ID NO: 3136 - protein, 87 aa, Arabidopsis thaliana
MASSSSLTRSGSVHLDEKWKLSKKDGGASRITRSSSTSSSSFNGKKQGRCAFTRKCARLVKEQRARFYIMRRCVIMLICWRDNYSDS

SEQ ID NO: 3137 - protein, 65 aa, Arabidopsis thaliana
LTQISKLLENLQIPKFVSLISLFLTNSSISNEPTRSNIYPFFLVEIDHTHTNLKSEIFNINGVIV

SEQ ID NO: 3138 - protein, 44 aa, Arabidopsis thaliana
ADSNLQTPRKSPNSQVCFFNLSIPHKLINFQRTHKIKYLSFFPR

SEQ ID NO: 3139 - DNA, 1282 bp, Arabidopsis thaliana
agatcaaccaaaggaagcgaagaagaagaagactttatacactctcgacgctattgatttcgtctgtgcagttttgtttctctatcagttagttttaaagatgagttcttcagagagtgtggaaaacgagtgcatgtgttgggctgcaagagatccatctggtcttctttctcctcatactatcactcgcaggtctgttacaactgacgatgtttcactcacaatcactcattgtggagtgtgttacgctgatgttatctggagtagaaaccaacatggagactccaagtaccctttggttcctgggcatgagattgctggaatagtgactaaggttgggcctaatgttcaacgattcaaagttggagaccatgttggtgttggaacgtatgttaactcctgcagggagtgtgaatattgtaatgaaggacaagaagttaattgtgcgaaaggagtttttactttcaatggcattgatcatgatggctctgttactaaaggaggctactctagtcacattgttgttcatgaaaggtactgctacaagatacctgtggactatcccttggaatcagctgcaccattactctgtgctggaatcacggtttatgctcctatgatgcgtcacaatatgaatcaacctggtaaatctcttggggtgatcgggctaggtggtcttggacacatggcggttaagtttggcaaggcttttggacttagtgttacggtttttagcaccagcatttccaagaaagaagaagctttgaatctgctaggagctgagaatttcgttatctcatctgaccatgaccagatgaaggcactagagaaatctctagactttctagttgacacagcatctggtgatcacgcgtttgatccttacatgtctctcttgaagattgctggaacttatgtattggttggtttcccaagtgaaattaaaatcagtcctgccaatctcaatcttggtatgagaatgctcgctggaagtgtaaccggggggaccaaaataacacagcaaatgttagatttctgtgcagctcataagatttatccaaacatagaggtgattcccattcaaaagataaacgaagctctcgaaagagtggtgaagaaggacatcaagtaccgtttcgtgattgacatcaagaactccctcaaatagatgttgctcaaaggaaggaataatggagtctgtaataagagaataatactcactgctacaatctttattacgtattttctcgtttttcattagtaaagcaaataaattaagact

SEQ ID NO: 3140 - protein, 388 aa, Arabidopsis thaliana
DQPKEAKKKKTLYTLDAIDFVCAVLFLYQLVLKMSSSESVENECMCWAARDPSGLLSPHTITRRSVTTDDVSLTITHCGVCYADVIWSRNQHGDSKYPLVPGHEIAGIVTKVGPNVQRFKVGDHVGVGTYVNSCRECEYCNEGQEVNCAKGVFTFNGIDHDGSVTKGGYSSHIVVHERYCYKIPVDYPLESAAPLLCAGITVYAPMMRHNMNQPGKSLGVIGLGGLGHMAVKFGKAFGLSVTVFSTSISKKEEALNLLGAENFVISSDHDQMKALEKSLDFLVDTASGDHAFDPYMSLLKIAGTYVLVGFPSEIKISPANLNLGMRMLAGSVTGGTKITQQMLDFCAAHKIYPNIEVIPIQKINEALERVVKKDIKYRFVIDIKNSLK

SEQ ID NO: 3141 - protein, 355 aa, Arabidopsis thaliana
MSSSESVENECMCWAARDPSGLLSPHTITRRSVTTDDVSLTITHCGVCYADVIWSRNQHGDSKYPLVPGHEIAGIVTKVGPNVQRFKVGDHVGVGTYVNSCRECEYCNEGQEVNCAKGVFTFNGIDHDGSVTKGGYSSHIVVHERYCYKIPVDYPLESAAPLLCAGITVYAPMMRHNMNQPGKSLGVIGLGGLGHMAVKFGKAFGLSVTVFSTSISKKEEALNLLGAENFVISSDHDQMKALEKSLDFLVDTASGDHAFDPYMSLLKIAGTYVLVGFPSEIKISPANLNLGMRMLAGSVTGGTKITQQMLDFCAAHKIYPNIEVIPIQKINEALERVVKKDIKYRFVIDIKNSLK

SEQ ID NO: 3142 - protein, 344 aa, Arabidopsis thaliana
MCWAARDPSGLLSPHTITRRSVTTDDVSLTITHCGVCYADVIWSRNQHGDSKYPLVPGHEIAGIVTKVGPNVQRFKVGDHVGVGTYVNSCRECEYCNEGQEVNCAKGVFTFNGIDHDGSVTKGGYSSHIVVHERYCYKIPVDYPLESAAPLLCAGITVYAPMMRHNMNQPGKSLGVIGLGGLGHMAVKFGKAFGLSVTVFSTSISKKEEALNLLGAENFVISSDHDQMKALEKSLDFLVDTASGDHAFDPYMSLLKIAGTYVLVGFPSEIKISPANLNLGMRMLAGSVTGGTKITQQMLDFCAAHKIYPNIEVIPIQKINEALERVVKKDIKYRFVIDIKNSLK

SEQ ID NO: 3143 - DNA, 901 bp, Arabidopsis thaliana
agtcgtcgtcctcatcaacaattcgaatctgaaatctgcaattcacgagaagaagctttttttttttgtaacaatggcaaatccaattcaagagattattgagaaacaagttctgacggtagcgagagctatggaggataagatagacgacgagatagcgtctttggaaaagcttgacgaagatgatttggaagttttgagagagaggagattgaagcagatgacgaaaatggcggagaagaagaaacggtggatgagtattggacatggtgaatactctgagattcattctgagaaagatttcttctccgttgttaaatctagtgaacgcgtcgtttgtcacttctaccgtgagaattggccctgtaaagtgatggataaacacatgagcatattggcaaagcaacacattgagacacgtttcgtgaagatccaagctgagaaaagtccattcttggctgagaggcttaagattgttgttcttcccactcttgccctcattaagaacactaaagtcgatgattatgtggttgggttcaatgaactgggagggaaagatgattttagcacagaagatcttgaagagagaatagccagagcgcaagtggtccattacgagggagaatcatctcttaaacaaaagtctacaacacaagtcagaaggaacgtgaggcagagtgctcgttcagattctgactccgaataaatcccttttcttatcaaaggtttgttcgtttgtatcctcttgttagttgtaatactatgttgcaattcatcgttttgatgatcaaaatcaatgttgatcgttagattgatgaacatgcaatatctagaatactacattgatgttttatatgttacctagtgagagtgttggaatgaccaaagtctttttgagttt

SEQ ID NO: 3144 - protein, 234 aa, Arabidopsis thaliana
VVVLINNSNLKSAIHEKKLFFFVTMANPIQEIIEKQVLTVARAMEDKIDDEIASLEKLDEDDLEVLRERRLKQMTKMAEKKKRWMSIGHGEYSEIHSEKDFFSVVKSSERVVCHFYRENWPCKVMDKHMSILAKQHIETRFVKIQAEKSPFLAERLKIVVLPTLALIKNTKVDDYVVGFNELGGKDDFSTEDLEERIARAQVVHYEGESSLKQKSTTQVRRNVRQSARSDSDSE

SEQ ID NO: 3145 - protein, 210 aa, Arabidopsis thaliana
MANPIQEIIEKQVLTVARAMEDKIDDEIASLEKLDEDDLEVLRERRLKQMTKMAEKKKRWMSIGHGEYSEIHSEKDFFSVVKSSERVVCHFYRENWPCKVMDKHMSILAKQHIETRFVKIQAEKSPFLAERLKIVVLPTLALIKNTKVDDYVVGFNELGGKDDFSTEDLEERIARAQVVHYEGESSLKQKSTTQVRRNVRQSARSDSDSE

SEQ ID NO: 3146 - protein, 191 aa, Arabidopsis thaliana
MEDKIDDEIASLEKLDEDDLEVLRERRLKQMTKMAEKKKRWMSIGHGEYSEIHSEKDFFSVVKSSERVVCHFYRENWPCKVMDKHMSILAKQHIETRFVKIQAEKSPFLAERLKIVVLPTLALIKNTKVDDYVVGFNELGGKDDFSTEDLEERIARAQVVHYEGESSLKQKSTTQVRRNVRQSARSDSDSE

SEQ ID NO: 3147 - DNA, 1474 bp, Arabidopsis thaliana
ctttgtctttctcattcgtcgttgatccatctttttcccccaaattcatatccttccttagatatttttctccttcttcttcttctagattccagctactccagaagattcttcgacttaatctgatgtgattaggaagagcaatagaggaagagaagaatcagaaaaaatggatccggcgactaattcaccgattatgccgattgatttaccgattatgcacgacagtgatcgttacgacttcgttaaagatattggctctggtaatttcggcgttgctcgtctcatgaccgatagagtcaccaaggagcttgttgctgttaaatacatcgagagaggagaaaagattgatgaaaatgttcagagggagattatcaatcatagatcattgagacatcctaatattgttaggtttaaagaggtgattttgacgccttcccatttggctattgttatggaatatgctgctggtggagaactttatgagcggatttgtaatgccggacggtttagtgaagatgaggctcggttcttctttcagcagcttatatctggagttagctattgtcatgcaatgcaaatatgccatcgggatctgaagctggaaaatacattgttagatggaagtccggcacctcgtttgaaaatatgtgattttggttattccaagtcttctgtttcttcattcccaaccaaagtcaactgttggtactcctgcatacattgcaccagagattcttcttcgacaggaatatgatggcaagcttgcagatgtatggtcttgcggtgtaacattatatgtaatgttggttggagcttatccattcgaggatccacaggagccacgagattatcgaaagacaatacaaagaatccttagtgtcacatactcgatcccagaggacttacacctctcaccagaatgtcgccatctaatatcgaggatcttcgtggctgatccggcaacaagaatcactattccggagatcacatccgataaatggttcttgaagaatctaccaggtgatttgatggatgagaaccgaatgggaagtcagtttcaagagcctgagcagccaatgcagagccttgacacgattatgcagataatatcggaggctacgattccgactgttcgtaatcgttgcctcgatgatttcatggcggataatcttgatctagacgatgacatggatgactttgattccgaatctgagattgatgttgacagtagtggagagatagtttatgctctctgagattcctgaggacaaagtctgttttgtccgtactgttgagacacaccactggagttttgtcttagctccacgcactccatcgttcatttttggatcgtttgttgttttttactctacaagctttggattcacatacatatatatgtattgtaatgtaatatgtaatatattctatgtatttctctttgtttaataactattggcacattttatac

SEQ ID NO: 3148 - protein, 195 aa, Arabidopsis thaliana
MDPATNSPIMPIDLPIMHDSDRYDFVKDIGSGNFGVARLMTDRVTKELVAVKYIERGEKIDENVQREIINHRSLRHPNIVRFKEVILTPSHLAIVMEYAAGGELYERICNAGRFSEDEARFFFQQLISGVSYCHAMQICHRDLKLENTLLDGSPAPRLKICDFGYSKSSVSSFPTKVNCWYSCIHCTRDSSSTGI

SEQ ID NO: 3149 - protein, 186 aa, Arabidopsis thaliana
MPIDLPIMHDSDRYDFVKDIGSGNFGVARLMTDRVTKELVAVKYIERGEKIDENVQREIINHRSLRHPNIVRFKEVILTPSHLAIVMEYAAGGELYERICNAGRFSEDEARFFFQQLISGVSYCHAMQICHRDLKLENTLLDGSPAPRLKICDFGYSKSSVSSFPTKVNCWYSCIHCTRDSSSTGI

SEQ ID NO: 3150 - protein, 179 aa, Arabidopsis thaliana
MHDSDRYDFVKDIGSGNFGVARLMTDRVTKELVAVKYIERGEKIDENVQREIINHRSLRHPNIVRFKEVILTPSHLAIVMEYAAGGELYERICNAGRFSEDEARFFFQQLISGVSYCHAMQICHRDLKLENTLLDGSPAPRLKICDFGYSKSSVSSFPTKVNCWYSCIHCTRDSSSTGI

SEQ ID NO: 3151 - DNA, 1202 bp, Arabidopsis thaliana
gaaatttcaattttatttccgatgaacggagaaatctctcgtccgccggagctaatatcgtcccggaatccttgcaagagttttgaaaatgcaatacacaaagcagttgaggcagagctcgccgagctagcgaaaagcgactcgaacggcggcggaaagagtaaagtgaaaggaccttggttgccggagcaagatgaggctctcacgaggcttgtgaaaatgtgtgggccgaggaactggaatctaatctcccgtggaatcccaggtcgctctggtaaatcttgccgattacgttggtgtaatcagctcgatcctatcctcaaacgaaaacctttctctgatgaggaggagcatatgataatgtctgcacaggcggttcttgggaacaaatggtctgtgattgctaaactcttacctgggagaacagataatgccattaagaatcattggaactctaatcttagacgtaaaccagcagaacaatggaagattcctctattgatgtctaatacagagatagtatatcaaatgtatccatcaatggtcagaaggatatcaaacgcatcccccaaagaacatctacctcaagaagaagaaaccggtgtattaagtgatgataaaatggatgatgaagcaaaggagcctcctcgggagcaaaatagtaaaactggtgtttatcgtccagtggctagaatgggtgctttcagtgtctgtaaaccaggatacatggctccatgtgagggacctttggttcaagcatcaagacctgactcattggctggtaaatttcttcagtctctttgttatgatcctattatcccttcaaaatgcggtcacggttgctgcaaccatcaagacagcacaacactgtcatcatcgtcggtgctgggatcagagtttgtggattatgaggaacattcttctgcagagttagataaagaattgatctctatatcaaatgacctgaacaatactgcttggattaggagtgggaaggaagctgaacagagtttgaaggctgatgatcagtttcgtcgtgagtatgctcactcgaaatttagtggaatggtaaacaatggtgtatcaagtcagatggtgagacaagatttaagggctttgagctaacgttagagacaaaacattcattcaatatctctttgttaattatattcttaccagatcataaagattgaaactttact

SEQ ID NO: 3152 - protein, 374 aa, Arabidopsis thaliana
EISILFPMNGEISRPPELISSRNPCKSFENAIHKAVEAELAELAKSDSNGGGKSKVKGPWLPEQDEALTRLVKMCGPRNWNLISRGIPGRSGKSCRLRWCNQLDPILKRKPFSDEEEHMIMSAQAVLGNKWSVIAKLLPGRTDNAIKNHWNSNLRRKPAEQWKIPLLMSNTEIVYQMYPSMVRRISNASPKEHLPQEEETGVLSDDKMDDEAKEPPREQNSKTGVYRPVARMGAFSVCKPGYMAPCEGPLVQASRPDSLAGKFLQSLCYDPIIPSKCGHGCCNHQDSTTLSSSSVLGSEFVDYEEHSSAELDKELISISNDLNNTAWIRSGKEAEQSLKADDQFRREYAHSKFSGMVNNGVSSQMVRQDLRALS

SEQ ID NO: 3153 - protein, 367 aa, Arabidopsis thaliana
MNGEISRPPELISSRNPCKSFENAIHKAVEAELAELAKSDSNGGGKSKVKGPWLPEQDEALTRLVKMCGPRNWNLISRGIPGRSGKSCRLRWCNQLDPILKRKPFSDEEEHMIMSAQAVLGNKWSVIAKLLPGRTDNAIKNHWNSNLRRKPAEQWKIPLLMSNTEIVYQMYPSMVRRISNASPKEHLPQEEETGVLSDDKMDDEAKEPPREQNSKTGVYRPVARMGAFSVCKPGYMAPCEGPLVQASRPDSLAGKFLQSLCYDPIIPSKCGHGCCNHQDSTTLSSSSVLGSEFVDYEEHSSAELDKELISISNDLNNTAWIRSGKEAEQSLKADDQFRREYAHSKFSGMVNNGVSSQMVRQDLRALS

SEQ ID NO: 3154 - protein, 301 aa, Arabidopsis thaliana
MCGPRNWNLISRGIPGRSGKSCRLRWCNQLDPILKRKPFSDEEEHMIMSAQAVLGNKWSVIAKLLPGRTDNAIKNHWNSNLRRKPAEQWKIPLLMSNTEIVYQMYPSMVRRISNASPKEHLPQEEETGVLSDDKMDDEAKEPPREQNSKTGVYRPVARMGAFSVCKPGYMAPCEGPLVQASRPDSLAGKFLQSLCYDPIIPSKCGHGCCNHQDSTTLSSSSVLGSEFVDYEEHSSAELDKELISISNDLNNTAWIRSGKEAEQSLKADDQFRREYAHSKFSGMVNNGVSSQMVRQDLRALS

SEQ ID NO: 3155 - DNA, 1309 bp, Arabidopsis thaliana
gtcccatcaccaaacattaagtagcactctttttcctctctatatctctcactcacactttttctctatatcttctcctcaacttggatatgggtgaagccgtagaggtcatgttcggaaatgggttcccggagattcacaaagccacatcacccactcaaaccctccactctaaccagcaagactgccattggtatgaagaaaccatcgatgatgatctcaagtggtcttttgccctcaacagtgttctccatcaaggaactagtgagtaccaagatattgctctgttggacaccaaacgttttggaaaggtgcttgtgattgatgggaaaatgcaaagtgctgagagagatgagtttatctaccatgaatgtttgatccatcccgctctccttttccatcccaaccccaagactgtgtttataatgggaggaggtgaaggctctgctgcaagagaaatactaaaacacacgacgatcgagaaagttgttatgtgtgatattgatcaggaagttgttgatttttgcagaagatttctgaccgttaacagcgatgctttctgtaacaaaaagcttgaacttgtgatcaaagatgcaaaggctgaattagagaaaagggaagagaagtttgatatcatagtgggagatttagctgatccagtggaaggtggaccttgttatcagctctacaccaaatccttctaccaaaacattctcaaacccaagcttagccctaatggcatttttgtcacccaggctggaccagcaggaatattcactcataaggaagtcttcacatcaatctacaacaccatgaagcaagtcttcaagtacgtgaaggcttacacagcacatgtgccatcatttgcggacacatggggatgggtgatggcatcggaccacgagtttgacgttgaagttgatgaaatggatcgaagaatcgaagagagagttaacggagaattgatgtatctaaacgctccttctttcgtctctgctgctactctcaacaaaaccatctctctcgcgctagagaaggagactgaagtttatagtgaagagaatgcgagattcattcatggtcatggtgtggcgtaccggcatatttaaagacgaaccggtttcagtttcagtgttattaccaaacccatgtcacaaaaacaaaaggccggtttcttttctccgcacagaaccgggtgttgtcttgaatcttgattactttggttcggttttattttctacattgctttttgttttcttgttcttccctcaagttattccggtttaacaagactatattgcttactaac

SEQ ID NO: 3156 - protein, 339 aa, Arabidopsis thaliana
MGEAVEVMFGNGFPEIHKATSPTQTLHSNQQDCHWYEETIDDDLKWSFALNSVLHQGTSEYQDIALLDTKRFGKVLVIDGKMQSAERDEFIYHECLIHPALLFHPNPKTVFIMGGGEGSAAREILKHTTIEKVVMCDIDQEVVDFCRRFLTVNSDAFCNKKLELVIKDAKAELEKREEKFDIIVGDLADPVEGGPCYQLYTKSFYQNILKPKLSPNGIFVTQAGPAGIFTHKEVFTSIYNTMKQVFKYVKAYTAHVPSFADTWGWVMASDHEFDVEVDEMDRRIEERVNGELMYLNAPSFVSAATLNKTISLALEKETEVYSEENARFIHGHGVAYRHI

SEQ ID NO: 3157 - protein, 332 aa, Arabidopsis thaliana
MFGNGFPEIHKATSPTQTLHSNQQDCHWYEETIDDDLKWSFALNSVLHQGTSEYQDIALLDTKRFGKVLVIDGKMQSAERDEFIYHECLIHPALLFHPNPKTVFIMGGGEGSAAREILKHTTIEKVVMCDIDQEVVDFCRRFLTVNSDAFCNKKLELVIKDAKAELEKREEKFDIIVGDLADPVEGGPCYQLYTKSFYQNILKPKLSPNGIFVTQAGPAGIFTHKEVFTSIYNTMKQVFKYVKAYTAHVPSFADTWGWVMASDHEFDVEVDEMDRRIEERVNGELMYLNAPSFVSAATLNKTISLALEKETEVYSEENARFIHGHGVAYRHI

SEQ ID NO: 3158 - protein, 258 aa, Arabidopsis thaliana
MQSAERDEFIYHECLIHPALLFHPNPKTVFIMGGGEGSAAREILKHTTIEKVVMCDIDQEVVDFCRRFLTVNSDAFCNKKLELVIKDAKAELEKREEKFDIIVGDLADPVEGGPCYQLYTKSFYQNILKPKLSPNGIFVTQAGPAGIFTHKEVFTSIYNTMKQVFKYVKAYTAHVPSFADTWGWVMASDHEFDVEVDEMDRRIEERVNGELMYLNAPSFVSAATLNKTISLALEKETEVYSEENARFIHGHGVAYRHI

SEQ ID NO: 3159 - DNA, 1409 bp, Arabidopsis thaliana
aacatttcatagtattacaaaacaacgccaaaagtcaaaaggtttcgctttctagatcatgtccacatttctcctaacatggattattatgaccgtcgcgttaagcgtaacgctttttcttatgccgcaacaaacaaatgcggctagagcgttcttcgtgtttggcgactcactcgtggacagtggtaataacaattacttagtcaccactgctcgtgccgattctccaccgtatggaatcgattatccgactggtcgaccaaccggtcgtttctccaacggcttgaacctccctgacatcatcagtgaacaaattggatctgagcctacattaccaattcttagccctgaactcactggagagaagctattgatcggagctaactttgcctctgccggcattggaattctcaacgatactggcgttcaatttttgaacatactaaggatcggtaggcaattcgagctgttccaagagtatcaagagagagtgagtgagattataggttcagacaaaacgcaacagcttgtaaatggggctctcgtcctcatgactctcggcggcaatgatttcgtcaacaactacttcttccccatctctactagaagacgccaatcatctctcggtgaatttagccagcttctcatctccgaatacaagaaaatcctgacgagtctttatgagttgggagcaaggagggtgatggtgacgggaacaggacctttgggttgcgtaccagcggagcttgcctcatcgggaagtgtgaatggagaatgtgcacccgaggcgcaacaggctgcagcaatcttcaatcctcttttagttcaaatgcttcaaggacttaaccgtgagattggttctgatgttttcatcggggctaatgcctttaacacgaatgcggatttcatcaacaatccccaaagatttggttttgtgacgtcaaaagtagcatgttgtggacaaggagcatacaacgggcaaggcgtttgcaccccattgtcgactttatgctctgaccgcaatgcctatgctttctgggaccctttccacccgaccgagaaagccacccgactcatcgtccaacaaatcatgactggttcggttgagtacatgaaccccatgaaccttagtactattatggctttagactccagaatataattaaggatgcaatcttttacagaatctatttccagtttttctcgtatgataaaatatcgcgagtctgccaaacaatggtaaggaactaaggattctatttttccaaattatggttttcttagtttctctctaatgctaatggggagtctctgtctcggctctgtcttttctgttatgtttcaattttgtggttagttgccacttctttcttacgaaggctttataaaactttgtcaattttacaccc

SEQ ID NO: 3160 - protein, 367 aa, Arabidopsis thaliana
MSTFLLTWIIMTVALSVTLFLMPQQTNAARAFFVFGDSLVDSGNNNYLVTTARADSPPYGIDYPTGRPTGRFSNGLNLPDIISEQIGSEPTLPILSPELTGEKLLIGANFASAGIGILNDTGVQFLNILRIGRQFELFQEYQERVSEIIGSDKTQQLVNGALVLMTLGGNDFVNNYFFPISTRRRQSSLGEFSQLLISEYKKILTSLYELGARRVMVTGTGPLGCVPAELASSGSVNGECAPEAQQAAAIFNPLLVQMLQGLNREIGSDVFIGANAFNTNADFINNPQRFGFVTSKVACCGQGAYNGQGVCTPLSTLCSDRNAYAFWDPFHPTEKATRLIVQQIMTGSVEYMNPMNLSTIMALDSRI

SEQ ID NO: 3161 - protein, 357 aa, Arabidopsis thaliana
MTVALSVTLFLMPQQTNAARAFFVFGDSLVDSGNNNYLVTTARADSPPYGIDYPTGRPTGRFSNGLNLPDIISEQIGSEPTLPILSPELTGEKLLIGANFASAGIGILNDTGVQFLNILRIGRQFELFQEYQERVSEIIGSDKTQQLVNGALVLMTLGGNDFVNNYFFPISTRRRQSSLGEFSQLLISEYKKILTSLYELGARRVMVTGTGPLGCVPAELASSGSVNGECAPEAQQAAAIFNPLLVQMLQGLNREIGSDVFIGANAFNTNADFINNPQRFGFVTSKVACCGQGAYNGQGVCTPLSTLCSDRNAYAFWDPFHPTEKATRLIVQQIMTGSVEYMNPMNLSTIMALDSRI

SEQ ID NO: 3162 - protein, 346 aa, Arabidopsis thaliana
MPQQTNAARAFFVFGDSLVDSGNNNYLVTTARADSPPYGIDYPTGRPTGRFSNGLNLPDIISEQIGSEPTLPILSPELTGEKLLIGANFASAGIGILNDTGVQFLNILRIGRQFELFQEYQERVSEIIGSDKTQQLVNGALVLMTLGGNDFVNNYFFPISTRRRQSSLGEFSQLLISEYKKILTSLYELGARRVMVTGTGPLGCVPAELASSGSVNGECAPEAQQAAAIFNPLLVQMLQGLNREIGSDVFIGANAFNTNADFINNPQRFGFVTSKVACCGQGAYNGQGVCTPLSTLCSDRNAYAFWDPFHPTEKATRLIVQQIMTGSVEYMNPMNLSTIMALDSRI

SEQ ID NO: 3163 - DNA, 1219 bp, Arabidopsis thaliana
acaattcgaaccaaaatggaaaccaaaatccctaagtcaatgatcgccggagtacagactgtcatgccggtggaagtgacgcaacaccgggaaatccgctccgtatccgtcgtagatcccgtcggagtaggaatattccggcgaacggttaacatagttacgtattacaaagaagcaggtgatagtggtggtgagagagggtggttagtcgccgggtggatcaaggaatctttagggagagccttgacggagcagccgatgctttccggtaggctacggaggaggaagacggcggggaatgatggtttggagttagtggccaatgatagtggtgtgaggatggtggaggctaagtttccggcgagtctgccggagtttcttgaaatggcgaagagagacaaaagcagagctgaagcagagactgttttctggaaagacattgatgaagatgaacctcaatactctccattgttctatgttcaggtgactaattttgagagtggtgggtactcaattgggataagctgcagcatcctaatagctgatctcttccttgagacaggtttcttaaccaaatgggctcaaatccaaagctctttagctcaaaccacactcaaaccagtattccacctcccttctctcaagcaagactttggtaatttcctcactgaattttttaggtcagcctcggttctcgaccgcggcgaacctattgcttttcgggccaaaacatgcctgaaaatatcaccagcctgcattgtaactagcaaaagaacgagtggggatgttttcttattcatcaaggaacaaagcagtggcgaaaatagtactggatgtgatggtacgaaggtagagatacattcgagtgatgaagtgattaagggttgcgattgcggtcgtgattcagaggagacaaatgatggagtacttgataagagtttatcgtttggggaaagacttgaagttacttcatgttgggttgggtgtgtctcaaaaggggtagtatttgttttcccatctacttttggggatgccaagtcgctagccaaatttattgttgcactgccaaaagagtaactcattaatatcagtgacatgcatggtttgtataatgttttgagtaatgttatcaattttaatgtagatgtactacgctactattataatgtttgttgggtattgattgtgaagttgttaatttttatggtgttattgatgt

SEQ ID NO: 3164 - protein, 358 aa, Arabidopsis thaliana
TIRTKMETKIPKSMIAGVQTVMPVEVTQHREIRSVSVVDPVGVGIFRRTVNIVTYYKEAGDSGGERGWLVAGWIKESLGRALTEQPMLSGRLRRRKTAGNDGLELVANDSGVRMVEAKFPASLPEFLEMAKRDKSRAEAETVFWKDIDEDEPQYSPLFYVQVTNFESGGYSIGISCSILIADLFLETGFLTKWAQIQSSLAQTTLKPVFHLPSLKQDFGNFLTEFFRSASVLDRGEPIAFRAKTCLKISPACIVTSKRTSGDVFLFIKEQSSGENSTGCDGTKVEIHSSDEVIKGCDCGRDSEETNDGVLDKSLSFGERLEVTSCWVGCVSKGVVFVFPSTFGDAKSLAKFIVALPKE

SEQ ID NO: 3165 - protein, 353 aa, Arabidopsis thaliana
METKIPKSMIAGVQTVMPVEVTQHREIRSVSVVDPVGVGIFRRTVNIVTYYKEAGDSGGERGWLVAGWIKESLGRALTEQPMLSGRLRRRKTAGNDGLELVANDSGVRMVEAKFPASLPEFLEMAKRDKSRAEAETVFWKDIDEDEPQYSPLFYVQVTNFESGGYSIGISCSILIADLFLETGFLTKWAQIQSSLAQTTLKPVFHLPSLKQDFGNFLTEFFRSASVLDRGEPIAFRAKTCLKISPACIVTSKRTSGDVFLFIKEQSSGENSTGCDGTKVEIHSSDEVIKGCDCGRDSEETNDGVLDKSLSFGERLEVTSCWVGCVSKGVVFVFPSTFGDAKSLAKFIVALPKE

SEQ ID NO: 3166 - protein, 345 aa, Arabidopsis thaliana
MIAGVQTVMPVEVTQHREIRSVSVVDPVGVGIFRRTVNIVTYYKEAGDSGGERGWLVAGWIKESLGRALTEQPMLSGRLRRRKTAGNDGLELVANDSGVRMVEAKFPASLPEFLEMAKRDKSRAEAETVFWKDIDEDEPQYSPLFYVQVTNFESGGYSIGISCSILIADLFLETGFLTKWAQIQSSLAQTTLKPVFHLPSLKQDFGNFLTEFFRSASVLDRGEPIAFRAKTCLKISPACIVTSKRTSGDVFLFIKEQSSGENSTGCDGTKVEIHSSDEVIKGCDCGRDSEETNDGVLDKSLSFGERLEVTSCWVGCVSKGVVFVFPSTFGDAKSLAKFIVALPKE

SEQ ID NO: 3167 - DNA, 691 bp, Arabidopsis thaliana
aagtccaagcaaaccaggaaatagctaaaaccctaatcctcaaattgatcgacaaaatcgaacactgaagagttgtttcctatcagatcagatcgtgtttattttcagtacactgtctagctcaaatcctctacaacaatggttgcagcgataattgcaggcgctgctgttgctgctgctgcttatgctggtaaatatggaatagaggcatggcaagcgtttaagctgagaccagttaggcctagaatgcgaaaattctatgaaggtggtttccaagctactatgaatcgaagagaagctgctctaattctcggtgttagggagagtgtagcggcagagaaggtgaaggaagctcaccgtagagtgatggtggctaatcatccagatgcaggaggaagccattaccttgcgtctaagatcaatgaagccaaagacatgatgcttggaaaaaccaagaactctggttctgcgttttgaaaccctttgggtgaggtcgattgatcccaaccacaaagccatgtggcctagtttcgagtagttagtctagatcgttctctttaagcaataaccattagattgattgatcctatcaagccatgtagttccaagttattggtctagttcatttttttatcatgatgatgtataacgtgggtatttaactttttcagcgtgagaaatatataaaccg

SEQ ID NO: 3168 - protein, 112 aa, Arabidopsis thaliana
MVAAIIAGAAVAAAAYAGKYGIEAWQAFKLRPVRPRMRKFYEGGFQATMNRREAALILGVRESVAAEKVKEAHRRVMVANHPDAGGSHYLASKINEAKDMMLGKTKNSGSAF

SEQ ID NO: 3169 - protein, 76 aa, Arabidopsis thaliana
MRKFYEGGFQATMNRREAALILGVRESVAAEKVKEAHRRVMVANHPDAGGSHYLASKINEAKDMMLGKTKNSGSAF

SEQ ID NO: 3170 - protein, 64 aa, Arabidopsis thaliana
MNRREAALILGVRESVAAEKVKEAHRRVMVANHPDAGGSHYLASKINEAKDMMLGKTKNSGSAF

SEQ ID NO: 3171 - DNA, 956 bp, Arabidopsis thaliana
ttgggagaagaagcttcgtcctttgcgtgacagggaatctctccgttggggttttgtggctgcctacgatttctgcaagcaaaaccacagaactcaatctaattaattagccgagtcgactcaatccgagtttctacagccgcacgagggaatcatgaatcggctgagaggccgaggtacaccgattctgggttccgcactcgtgcctcagctgaagaaaaaagccctaaattcattggtcgccgtccaggattcatatctatccaccaaggacttgttcgagaggcacagggtcgtgtttacagttggaacttctatagcatctgttgctacggcttggattggttactcattacgacattacaatgaaactagaattaatcagaggctggagtccattgagaatgcgatgaaaaacacccaagagttagaacgaggagaactgaagaagctcgttgatccagtcggttccaggttcactacaacaattgccacagcgggaaccactttgatcctcgggtatgggttgggttggcgaggcgggatatggtatgcaaataggaagtttagaagggagcaaatgagattggccgggcagttaaaaccgagagaatggaagttactagggaggataaaacctcgagcttggccaacaacaaagtttctcagacgaccattcccaagacagaacaaaacaacagaaaatgctttgaaggcaccagaatgtggaggttgaaaaattgaagaacaatctaaagaagtagctgatcggaacataaaagtgcacatgggttttgtcttgaagccaaaggctcttctgtctttttattcctttatgaggaaattgagataacctaattcgaaaatcaaatagatttgtgttataaattgactctagtagtgtggactatgaaatgtgattcagctaatctttatatcgagatcaaaatttaagg

SEQ ID NO: 3172 - protein, 193 aa, Arabidopsis thaliana
MNRLRGRGTPILGSALVPQLKKKALNSLVAVQDSYLSTKDLFERHRVVFTVGTSIASVATAWIGYSLRHYNETRINQRLESIENAMKNTQELERGELKKLVDPVGSRFTTTIATAGTTLILGYGLGWRGGIWYANRKFRREQMRLAGQLKPREWKLLGRIKPRAWPTTKFLRRPFPRQNKTTENALKAPECGG

SEQ ID NO: 3173 - protein, 108 aa, Arabidopsis thaliana
MKNTQELERGELKKLVDPVGSRFTTTIATAGTTLILGYGLGWRGGIWYANRKFRREQMRLAGQLKPREWKLLGRIKPRAWPTTKFLRRPFPRQNKTTENALKAPECGG

SEQ ID NO: 3174 - DNA, 1090 bp, Arabidopsis thaliana
cttcacaatcctcataatcactttcgaaattacatttacgctttcttgcaatcaaattttccgatcttaagttcagaagacgatgtcagaggtggaaatagagaacgctgctacgatcgaaggaaacaccgctgcggatgcgccggtgacggatgcggccgttgagaagaagcctgcagcgaaaggacgaaagacgaagaatgttaaggaagtgaaggagaagaagactgttgctgccgctccgaagaagagaactgtttcatctcatcctacttacgaagagatgattaaggatgcgattgttacgttgaaagagagaactggatctagccaatacgcgattcagaagttcatcgaggagaagcgtaaggagcttcctccaacattcagaaagctgttgcttctcaatctgaagagactcgttgcttctgggaagcttgtgaaggtcaaagcctcgtttaaactcccatcggcgtcggctaaagcatcatcccctaaggcggcagcggagaaatctgctcctgcgaagaagaaaccggcgactgtggcggttaccaaggcgaagagaaaggtcgctgcggcttccaaggctaagaaaacaatcgccgttaaacctaagactgctgctgctaagaaagtgaccgcgaaggctaaggctaagcccgttcctcgtgccactgctgctgcaactaagaggaaagctgttgatgcgaagcccaaggctaaggctagaccagccaaggcagccaaaacggccaaggttacatctccggctaagaaagctgttgctgccacgaagaaagttgctacggtggccacaaagaagaagactccggttaagaaggttgtgaagccaaagacggttaagtctccagcaaagagggcttcttctagggttaagaagtgaagttagggtttgtaggtagaagaatggttaacgatagtttagacttgtataattcaatcatctttatgcgactttgtttgcttttcttctttcagtgttcttgttattcacagttcctttggactaccccttaaatcatatatagatttcatcaatgaagcaaactcgagtttctttgcagct

SEQ ID NO: 3175 - protein, 274 aa, Arabidopsis thaliana
MSEVEIENAATIEGNTAADAPVTDAAVEKKPAAKGRKTKNVKEVKEKKTVAAAPKKRTVSSHPTYEEMIKDAIVTLKERTGSSQYAIQKFIEEKRKELPPTFRKLLLLNLKRLVASGKLVKVKASFKLPSASAKASSPKAAAEKSAPAKKKPATVAVTKAKRKVAAASKAKKTIAVKPKTAAAKKVTAKAKAKPVPRATAAATKRKAVDAKPKAKARPAKAAKTAKVTSPAKKAVAATKKVATVATKKKTPVKKVVKPKTVKSPAKRASSRVKK

SEQ ID NO: 3176 - protein, 207 aa, Arabidopsis thaliana
MIKDAIVTLKERTGSSQYAIQKFIEEKRKELPPTFRKLLLLNLKRLVASGKLVKVKASFKLPSASAKASSPKAAAEKSAPAKKKPATVAVTKAKRKVAAASKAKKTIAVKPKTAAAKKVTAKAKAKPVPRATAAATKRKAVDAKPKAKARPAKAAKTAKVTSPAKKAVAATKKVATVATKKKTPVKKVVKPKTVKSPAKRASSRVKK

SEQ ID NO: 3177 - DNA, 1564 bp, Arabidopsis thaliana
atgcaaacgcttctctgtcagccatgtaagtctcttcctatactcactgcttcgtcgtcgtcgtcgttgattcgtagctccggtgatgtgcgagaatgtatcgattttagagcgtcggagaaagtctcgaagtttcaatttcatgtaaccctaagcccctttgcctttcgtggtttctcaatatgtcgcgaatttgctgttcgtggagcttatgggattagattttgctcacgagaagatgtttccggtgttggaaatggaggaatcgtggcggaggaggagattgagctattgaacaagccgaatcctttaccaaaatcagaaaatgaggagagtggtaaagcagacgatgacgcgattctggagccgtttttgaaattctttaaaccggaagaagaaggggaaggaattgaatcggaagtttcggatgagacggatagagtcagcgtagagtattatgatcctaaaccaggtgattttgtggttggtgttgtggtttcgggtaatgagaataagcttgatgtgaatattggtgcagatatgttgggaactatgttgacgaaagagatacttcctttgtatgataaagagttggattatttgttgtgtgatttgaagtatgatgctgaagagtttttggttaatgggaaaatggggattgttaaggatgatgatgaaggtgttgagattgcggagtttgctcggcaaggtaggccggtggtggagattgggacggttgttttcgcggaggttttagggaggacgttgagtggaagacctttgctttcttctagacggtattttcggagaatcgcttggcaccgagtgaggcagatcaaacaacttaatgagcctattgaagttaagataacagagtggaatactggagggcttctcaccagaattgagggcttgagagcttttattccgaagcaggaactggtgggtcgtagattccttgtgcagataacgcgattgaacgaagacaaaaacgacttgatactgagtgaaaaagtagcctgggagaagctgtaccttcgagaaggaacactcttagaaggaacagttgtcaaaatcttaccatatggagctcaagtcaaacttggggatagtagcagaagtggactgctacacatttcaaacataactcgaagaagaattggatcggtgagcgatgtgcttcaggtggacgaaagtgtaaaggttctggttgtgaaatctctatttccagacaagatctctcttagcattgctgatcttgaaagcgaaccaggattgttcatctcagacagagagaaagtgtttacggaagctgaagagatggcgaagaagtacagagaaaaaatgcctttggtggctacaagtccaatttctgatcgtcctccgatcacaagcagtttcccacagggcaaggatgaagaaatctatgctaactgggagtggttcaagttcgagagtcagtgacaaattcacaaatccagttaataacatgttgtacaatgactttctgtatttgaaattttgatactatgtactattatgagtaaatgtctaagttctttct

SEQ ID NO: 3178 - protein, 487 aa, Arabidopsis thaliana
MQTLLCQPCKSLPILTASSSSSLIRSSGDVRECIDFRASEKVSKFQFHVTLSPFAFRGFSICREFAVRGAYGIRFCSREDVSGVGNGGIVAEEEIELLNKPNPLPKSENEESGKADDDAILEPFLKFFKPEEEGEGIESEVSDETDRVSVEYYDPKPGDFVVGVVVSGNENKLDVNIGADMLGTMLTKEILPLYDKELDYLLCDLKYDAEEFLVNGKMGIVKDDDEGVEIAEFARQGRPVVEIGTVVFAEVLGRTLSGRPLLSSRRYFRRIAWHRVRQIKQLNEPIEVKITEWNTGGLLTRIEGLRAFIPKQELVGRRFLVQITRLNEDKNDLILSEKVAWEKLYLREGTLLEGTVVKILPYGAQVKLGDSSRSGLLHISNITRRRIGSVSDVLQVDESVKVLVVKSLFPDKISLSIADLESEPGLFISDREKVFTEAEEMAKKYREKMPLVATSPISDRPPITSSFPQGKDEEIYANWEWFKFESQ

SEQ ID NO: 3179 - protein, 307 aa, Arabidopsis thaliana
MLGTMLTKEILPLYDKELDYLLCDLKYDAEEFLVNGKMGIVKDDDEGVEIAEFARQGRPVVEIGTVVFAEVLGRTLSGRPLLSSRRYFRRIAWHRVRQIKQLNEPIEVKITEWNTGGLLTRIEGLRAFIPKQELVGRRFLVQITRLNEDKNDLILSEKVAWEKLYLREGTLLEGTVVKILPYGAQVKLGDSSRSGLLHISNITRRRIGSVSDVLQVDESVKVLVVKSLFPDKISLSIADLESEPGLFISDREKVFTEAEEMAKKYREKMPLVATSPISDRPPITSSFPQGKDEEIYANWEWFKFESQ

SEQ ID NO: 3180 - protein, 303 aa, Arabidopsis thaliana
MLTKEILPLYDKELDYLLCDLKYDAEEFLVNGKMGIVKDDDEGVEIAEFARQGRPVVEIGTVVFAEVLGRTLSGRPLLSSRRYFRRIAWHRVRQIKQLNEPIEVKITEWNTGGLLTRIEGLRAFIPKQELVGRRFLVQITRLNEDKNDLILSEKVAWEKLYLREGTLLEGTVVKILPYGAQVKLGDSSRSGLLHISNITRRRIGSVSDVLQVDESVKVLVVKSLFPDKISLSIADLESEPGLFISDREKVFTEAEEMAKKYREKMPLVATSPISDRPPITSSFPQGKDEEIYANWEWFKFESQ

SEQ ID NO: 3181 - DNA, 634 bp, Arabidopsis thaliana
gggacagagacaacatttgacccttaaaattcacaaactatagatctctccagtccctttcgcaaaccctagcagtcgaaagatcgaaatcgaaaacccctaaaacgatgaaggtgattgctgcatttctcctcgcgaaactcggtggaaacgagaatccaacctcaaatgatctgaagaagatcttggaatctgttggtgctgaaatcgatgaaacgaagatagatctgttgttttctctcatcaaggatcatgatgtgacggagcttattgctgctgggagagaaaagatgtctgctttgtcttctggtggtccagctgttgctatggtggctggaggtggtggtggtggtgctgcttcggcggctgagccggttgctgaatctaagaagaaggttgaagaagtgaaggatgaatcttctgacgatgcaggcatgatgggtctctttgattgatcatttggttagaagtttcgtttaaaggtcaagactttatgtttctgatgttggttttattgatggatctttgtttaatgttgagacttgtgtttctgatgttggtttaatgatctttggtggtgatgactctatgttgggttttacttgtgatttgagaattgtggatgatgatgatg

SEQ ID NO: 3182 - protein, 115 aa, Arabidopsis thaliana
MKVIAAFLLAKLGGNENPTSNDLKKILESVGAEIDETKIDLLFSLIKDHDVTELIAAGREKMSALSSGGPAVAMVAGGGGGGAASAAEPVAESKKKVEEVKDESSDDAGMMGLFD

SEQ ID NO: 3183 - DNA, 1758 bp, Arabidopsis thaliana
tggtctccgacttcaaacataacacaaatcgttcatcgtcttccttctctctctctgattctctcattcgcgaatttcaaagctatggcggatacggtagagaaagttcccaccgttgttgagtcatcttcatcatccaccgttgaagcatctaatagcgccgagaagactgagcccacgacggagaagaaaaagtggggcgatgttgaagatgatgatgatgaagaagaagctgtatcggagcttaattcattgagcattaaggaagaagagaaacctgattctattcttgaggaacctgaagattctaacatcaaagctgttacttctggtgacacaccatatacatcagcaagtagatttgaagacttgaacttgtcacctgaattgatgaaaggcttgtacgttgagatgaaattcgaaaagcctagcaagatccaagctattagtttgcctatgataatgacgccgccacacaagcatctgattgcccaggctcataacggatctggaaagacgacttgtttcgttcttggaatgttgagtcgtgttgatcccacattgagagagcctcaagctctctgtatttgtcccactagagaattagctaatcagaatatggaagttcttcagaagatggggaagtttactgggatcactgctgagttggctgtgcctgactcaacgagaggtgcaccggcggcaacaagaggagctcctgtttctgctcatgttgtgattggcacccctggaacgcttaagaaatggatggcatttaagagactaggtctaaatcatttgaagattctggtttttgatgaggctgaccatatgcttgctacggatgggtttagggatgattccttgaagataatgaaagacattgggagagttaatcccaatttccaggttcttcttttctcggcaacttttaacgaaactgtcaaagattttgttgcgcggacagtcaaagatcccaaccaattgtttgtcaaaagagaggatctggctttggactcggtgaagcagtataaagttgtttgcccgaaggagcaaaacaagatcgaagtcatcaaggatcagattatggagcttggggatattgggcaaaccattatctttgtgaaaacaaaagcgtctgctcaaaaggtgcacaaagcccttgcggaaatgggatatgacgttaccagtgtccatggtaatctgactgaatcggacagggataagatagttaaagagtttaaagaatgccttactcaagtgctcattgctaccgatgtcattgcaagaggttttgaccaacagcgggtgaatttggttgtcaattataatcttcccactaaatatgaaactggagagccagattatgaggtgtaccttcacagggttgggagagctggccggtttggtcgcaaaggagcggttttcaacttgctgcttgatgatggctgggataaagaggtgatggagaagatcgagaagtattttgaagcaaatgttaaggagatcaagtcgtggaactcagaggaagagtataagagtgcattaaaggaagctggcctgctggacgagtgaggaagagagacagcatgtgttcaaaccatcttaaaagactatgtcgtctgttttcttgagattgttttaagaaagaaacttgtatacctctttgaggttttcttgtaatctttttatctgattgctgagagtttcagactttgtagattttttgttaagggaaaaggaaaacattttttatgt

SEQ ID NO: 3184 - protein, 524 aa, Arabidopsis thaliana
WSPTSNITQIVHRLPSLSLILSFANFKAMADTVEKVPTVVESSSSSTVEASNSAEKTEPTTEKKKWGDVEDDDDEEEAVSELNSLSIKEEEKPDSILEEPEDSNIKAVTSGDTPYTSASRFEDLNLSPELMKGLYVEMKFEKPSKIQAISLPMIMTPPHKHLIAQAHNGSGKTTCFVLGMLSRVDPTLREPQALCICPTRELANQNMEVLQKMGKFTGITAELAVPDSTRGAPAATRGAPVSAHVVIGTPGTLKKWMAFKRLGLNHLKILVFDEADHMLATDGFRDDSLKIMKDIGRVNPNFQVLLFSATFNETVKDFVARTVKDPNQLFVKREDLALDSVKQYKVVCPKEQNKIEVIKDQIMELGDIGQTIIFVKTKASAQKVHKALAEMGYDVTSVHGNLTESDRDKIVKEFKECLTQVLIATDVIARGFDQQRVNLVVNYNLPTKYETGEPDYEVYLHRVGRAGRFGRKGAVFNLLLDDGWDKEVMEKIEKYFEANVKEIKSWNSEEEYKSALKEAGLLDE

SEQ ID NO: 3185 - protein, 496 aa, Arabidopsis thaliana
MADTVEKVPTVVESSSSSTVEASNSAEKTEPTTEKKKWGDVEDDDDEEEAVSELNSLSIKEEEKPDSILEEPEDSNIKAVTSGDTPYTSASRFEDLNLSPELMKGLYVEMKFEKPSKIQAISLPMIMTPPHKHLIAQAHNGSGKTTCFVLGMLSRVDPTLREPQALCICPTRELANQNMEVLQKMGKFTGITAELAVPDSTRGAPAATRGAPVSAHVVIGTPGTLKKWMAFKRLGLNHLKILVFDEADHMLATDGFRDDSLKIMKDIGRVNPNFQVLLFSATFNETVKDFVARTVKDPNQLFVKREDLALDSVKQYKVVCPKEQNKIEVIKDQIMELGDIGQTIIFVKTKASAQKVHKALAEMGYDVTSVHGNLTESDRDKIVKEFKECLTQVLIATDVIARGFDQQRVNLVVNYNLPTKYETGEPDYEVYLHRVGRAGRFGRKGAVFNLLLDDGWDKEVMEKIEKYFEANVKEIKSWNSEEEYKSALKEAGLLDE

SEQ ID NO: 3186 - protein, 394 aa, Arabidopsis thaliana
MKGLYVEMKFEKPSKIQAISLPMIMTPPHKHLIAQAHNGSGKTTCFVLGMLSRVDPTLREPQALCICPTRELANQNMEVLQKMGKFTGITAELAVPDSTRGAPAATRGAPVSAHVVIGTPGTLKKWMAFKRLGLNHLKILVFDEADHMLATDGFRDDSLKIMKDIGRVNPNFQVLLFSATFNETVKDFVARTVKDPNQLFVKREDLALDSVKQYKVVCPKEQNKIEVIKDQIMELGDIGQTIIFVKTKASAQKVHKALAEMGYDVTSVHGNLTESDRDKIVKEFKECLTQVLIATDVIARGFDQQRVNLVVNYNLPTKYETGEPDYEVYLHRVGRAGRFGRKGAVFNLLLDDGWDKEVMEKIEKYFEANVKEIKSWNSEEEYKSALKEAGLLDE

SEQ ID NO: 3187 - DNA, 794 bp, Arabidopsis thaliana
actaccaacaacacttagagaacaagcagaggaatataactttttttttctttttcctttttgcttttttacaaccaaaaaaataaagcaagccgtagagagcaagagacggtgtaaagatgcactacacacgcatctcgccggctttagtaccatctctatcaccaaccgccgcggctgaatctagcggtggtgggacgatgatagctactgttttcatggcccttctcctcccctgcgtcggcatgtgcatcgtcttcctaatctatctattcctcttgtggtgctccacacggcgtcgtatcgaacgccttcgatttgctgaaccggttaaaccggtcacaggtaaaggcctttcggtgttggagctcgagaaaatccctaaactcaccggaagagagctagccgtaatagctagatcaacggaatgtgctgtttgccttgaagatatagagagtggtcaatcgactcgtctagttcccggttgcaaccatgggtttcaccaattatgtgctgatacgtggctatctaaccacacggtttgtccagtttgccgcgccgagctggctccgaacctacctcaatgtaatgaaaatcaaagtccatgttagaaacagaattttcaaaaacattctttccttcttttttactcgttttgtgtacttctcttgtttttcccttttcttagttttgtgtaagcgttatagagagagaagtttccaggttgtaactagccttgttgtttttttttgtacatgaaattagttttagagtaaattacgaaatttacagcc

SEQ ID NO: 3188 - protein, 163 aa, Arabidopsis thaliana
MHYTRISPALVPSLSPTAAAESSGGGTMIATVFMALLLPCVGMCIVFLIYLFLLWCSTRRRIERLRFAEPVKPVTGKGLSVLELEKIPKLTGRELAVIARSTECAVCLEDIESGQSTRLVPGCNHGFHQLCADTWLSNHTVCPVCRAELAPNLPQCNENQSPC

SEQ ID NO: 3189 - protein, 136 aa, Arabidopsis thaliana
MIATVFMALLLPCVGMCIVFLIYLFLLWCSTRRRIERLRFAEPVKPVTGKGLSVLELEKIPKLTGRELAVIARSTECAVCLEDIESGQSTRLVPGCNHGFHQLCADTWLSNHTVCPVCRAELAPNLPQCNENQSPC

SEQ ID NO: 3190 - protein, 130 aa, Arabidopsis thaliana
MALLLPCVGMCIVFLIYLFLLWCSTRRRIERLRFAEPVKPVTGKGLSVLELEKIPKLTGRELAVIARSTECAVCLEDIESGQSTRLVPGCNHGFHQLCADTWLSNHTVCPVCRAELAPNLPQCNENQSPC

SEQ ID NO: 3191 - DNA, 931 bp, Arabidopsis thaliana
aaaatttctctgccggtgttgacttcaaactctctttgattagatcggcgccaacttctaaacgcaaatgggaatcacgagaaacttgatcctgggtttggcttgtttagcctttgtctccattgctaaagctctgcctcatgaaccagaacttggctcggctcgtgtcgtcttccagactagttatggagatatcgaatttgggttctatcccactgtggcacccaagacagtggatcacatcttcaagcttgttcgtttaggaggatacaacactaatcatttcttcagggttgataaaggttttgttgctcaagttgcggatgtggcgagtggacgatcagctccaatgaatgaggagcaaaggaaagaagctgagaagaaaattgtgggagagttcagtgatgttaagcatgtcagaggtactctttccatgggaagatatgacgatccaaacagtgcacaatcttcattttcgatgcttcttggcaatgctcctcatcttgatcgccagtatgctgtgtttggtaaagttactaaaggagatgaaacattgagtaagctagaagaagttcccactcgccgcgaggggatttttgttatgccgacggagcggatcacgattttgtcgacatactattacgacactaaaatggagagctgtgaagaagagagatctgtcctgaaaagaaggcttcaagcatcttttgtggaggtcgaaagacagagaatgaagtgcttcccgtgaatgaagttaacacataagaaactgttcaacaaaagccttaaaacgccagggaacacaaaggtaaatgtatgtctagtaaaaaaactcagaatgctagacagtttatgagtggtttatcagtgtgagagattgtagttaacagtgtaaacagtttgagacattgaatcatggattgtttccttc

SEQ ID NO: 3192 - protein, 226 aa, Arabidopsis thaliana
MGITRNLILGLACLAFVSIAKALPHEPELGSARVVFQTSYGDIEFGFYPTVAPKTVDHIFKLVRLGGYNTNHFFRVDKGFVAQVADVASGRSAPMNEEQRKEAEKKIVGEFSDVKHVRGTLSMGRYDDPNSAQSSFSMLLGNAPHLDRQYAVFGKVTKGDETLSKLEEVPTRREGIFVMPTERITILSTYYYDTKMESCEEERSVLKRRLQASFVEVERQRMKCFP

SEQ ID NO: 3193 - protein, 132 aa, Arabidopsis thaliana
MNEEQRKEAEKKIVGEFSDVKHVRGTLSMGRYDDPNSAQSSFSMLLGNAPHLDRQYAVFGKVTKGDETLSKLEEVPTRREGIFVMPTERITILSTYYYDTKMESCEEERSVLKRRLQASFVEVERQRMKCFP

SEQ ID NO: 3194 - DNA, 1496 bp, Arabidopsis thaliana
atatagcaaatcctcttttgctttaaacccaccaaataactcagagcttttttgattttttcccattctctattttgttttgtacttttggtctcactttaaaagatcataagttgaaagatttctgcagagaacaatatgttggaaggtcttgtctctcaagaaagcttgtccttaaactctatggacatgtctgtacttgaaaggcttaaatgggtacaacagcaacaacagcaactgcaacaagttgtgtcccatagcagtaataattcacctgaacttcttcagatacttcagttccatggaagcaacaatgatgagttgttggagagtagtttcagccaatttcaaatgcttggatctggttttggaccaaactataacatgggttttggtcctccacatgaatccatttcaagaacaagtagctgccatatggaacctgtggatacaatggaggttttgttgaagaccggtgaagaaaccagagccgttgccttgaagaacaagagaaaaccagaggttaagacaagggaagagcaaaagacagagaagaagatcaaagtagaggctgagacagagtcaagcatgaaaggaaaatcaaacatgggaaacactgaagcatcttcagacacttcaaaggagacatcgaaaggagcttcagagaatcagaaattagattatatccacgtgagagctcgtcgaggccaagccactgacagacacagcttagcagaaagggcgagaagagaaaagatcagcaagaaaatgaaatatctgcaagatattgtgcctggatgcaataaggtcacaggaaaagctggtatgcttgatgagatcatcaattatgttcaatgtctccaaagacaagtcgagttcctgtcgatgaaacttgctgtcttgaacccggaactagagcttgccgtggaagatgtatccgtaaaacagtttcaggcttactttacaaatgtagttgcttcaaagcaatcaataatggttgatgtgccattgtttccgttagaccagcaaggatctttagattcgtttgcgataaacccgaaccaaacgacatctatcgaagctccatttggaagctgggaaactcaatcacagagtctttacaacacatctagcctcggttttcattactaagcaagattcattgaaacaacatggttgacatcaatcaatcatcaaaatcagaagcaaattctattacatttgctcatcaaagtagtaatttcgaaatttggttaatgcattatcctttgatccttgttttctgatatttaaaccagaagaactggagatagcaatccaatgatcttgtcaccatcaatctttgtgtatagattatatagagagatagataaatatgttttagaggagttatagatatatatcatatttgtagaagaaagagagaaaactcttgtggtaattacaattcttgtttgtttttttggatatataaatatctaagaaaattataaaac

SEQ ID NO: 3195 - protein, 337 aa, Arabidopsis thaliana
MLEGLVSQESLSLNSMDMSVLERLKWVQQQQQQLQQVVSHSSNNSPELLQILQFHGSNNDELLESSFSQFQMLGSGFGPNYNMGFGPPHESISRTSSCHMEPVDTMEVLLKTGEETRAVALKNKRKPEVKTREEQKTEKKIKVEAETESSMKGKSNMGNTEASSDTSKETSKGASENQKLDYIHVRARRGQATDRHSLAERARREKISKKMKYLQDIVPGCNKVTGKAGMLDEIINYVQCLQRQVEFLSMKLAVLNPELELAVEDVSVKQFQAYFTNVVASKQSIMVDVPLFPLDQQGSLDSFAINPNQTTSIEAPFGSWETQSQSLYNTSSLGFHY

SEQ ID NO: 3196 - protein, 322 aa, Arabidopsis thaliana
MDMSVLERLKWVQQQQQQLQQVVSHSSNNSPELLQILQFHGSNNDELLESSFSQFQMLGSGFGPNYNMGFGPPHESISRTSSCHMEPVDTMEVLLKTGEETRAVALKNKRKPEVKTREEQKTEKKIKVEAETESSMKGKSNMGNTEASSDTSKETSKGASENQKLDYIHVRARRGQATDRHSLAERARREKISKKMKYLQDIVPGCNKVTGKAGMLDEIINYVQCLQRQVEFLSMKLAVLNPELELAVEDVSVKQFQAYFTNVVASKQSIMVDVPLFPLDQQGSLDSFAINPNQTTSIEAPFGSWETQSQSLYNTSSLGFHY

SEQ ID NO: 3197 - protein, 320 aa, Arabidopsis thaliana
MSVLERLKWVQQQQQQLQQVVSHSSNNSPELLQILQFHGSNNDELLESSFSQFQMLGSGFGPNYNMGFGPPHESISRTSSCHMEPVDTMEVLLKTGEETRAVALKNKRKPEVKTREEQKTEKKIKVEAETESSMKGKSNMGNTEASSDTSKETSKGASENQKLDYIHVRARRGQATDRHSLAERARREKISKKMKYLQDIVPGCNKVTGKAGMLDEIINYVQCLQRQVEFLSMKLAVLNPELELAVEDVSVKQFQAYFTNVVASKQSIMVDVPLFPLDQQGSLDSFAINPNQTTSIEAPFGSWETQSQSLYNTSSLGFHY

SEQ ID NO: 3198 - DNA, 1171 bp, Arabidopsis thaliana
aaaggtcagaagatttgatttttcttattcctcttcaaaggcaaacaatttacacagctatatatatatttttagggtttttgagtatctcgcgaggttttacatagatttctccattatggattcgatgatgaatcagaagactgttttggctgtgacggatgatgtggtgttacctgttagctctgttttagctataatgaaagagcttggaaaggaagtgattgagagttttgatcctctgattattactcaagcatccacaataaatcagtttcctttggatgcttcctctgtggaggcggtattagccatttccaaaacatctgatttcccaagtgataaaatatgtggtgagttctcaagaatcttgaagcctggcggcacggtttctgtgtgcaaagttttggagggtgaaacgggagaaattcaacagaccattcaaaggagagtgacattggctggttttcttgagccacagtgtcttgatttgaaatcaattaaattgtctacgttcagtttatcctttgggattaaggcaaagaaaccttcttggaagattggttcatcatttgctctcaaaaagcctgtaacaaatctctttaagattgatctagatgacgacgtggatcttattgatgaagattctcttttaacagaggaggacttgatgaagccacagcttcctgttgccagcggttgtgagaccactaaaaaagcttgcaagaactgcgtctgtggtagagctgaaattgaggagaaagctgtgaagctgggcctcacagaggatcaaatcgagaatccacaatcatcatgcggcagctgtgggctcggtgatgccttccgctgcggtacatgcccttacaagggtctgccacccttcaaattaggcgagaaggtaaccctatctcaaaacttccttgaagctgacatataagcatgtgaaaggcatcttcatacatgggtgtttctcgccgaggccaaaaccttttgctaatcgcagagtagtttcatcatttactttgtgccctttcgtataatttgtttgttggtacttcttttattttgtggctctaaaagcttgtagaatattgtttgggttgcccacaaagcacacaccttagtatcaatgaagaacggttttgcattggttaaataattatttctctgt

SEQ ID NO: 3199 - protein, 311 aa, Arabidopsis thaliana
KVRRFDFSYSSSKANNLHSYIYIFRVFEYLARFYIDFSIMDSMMNQKTVLAVTDDVVLPVSSVLAIMKELGKEVIESFDPLIITQASTINQFPLDASSVEAVLAISKTSDFPSDKICGEFSRILKPGGTVSVCKVLEGETGEIQQTIQRRVTLAGFLEPQCLDLKSIKLSTFSLSFGIKAKKPSWKIGSSFALKKPVTNLFKIDLDDDVDLIDEDSLLTEEDLMKPQLPVASGCETTKKACKNCVCGRAEIEEKAVKLGLTEDQIENPQSSCGSCGLGDAFRCGTCPYKGLPPFKLGEKVTLSQNFLEADI

SEQ ID NO: 3200 - protein, 272 aa, Arabidopsis thaliana
MDSMMNQKTVLAVTDDVVLPVSSVLAIMKELGKEVIESFDPLIITQASTINQFPLDASSVEAVLAISKTSDFPSDKICGEFSRILKPGGTVSVCKVLEGETGEIQQTIQRRVTLAGFLEPQCLDLKSIKLSTFSLSFGIKAKKPSWKIGSSFALKKPVTNLFKIDLDDDVDLIDEDSLLTEEDLMKPQLPVASGCETTKKACKNCVCGRAEIEEKAVKLGLTEDQIENPQSSCGSCGLGDAFRCGTCPYKGLPPFKLGEKVTLSQNFLEADI

SEQ ID NO: 3201 - protein, 269 aa, Arabidopsis thaliana
MMNQKTVLAVTDDVVLPVSSVLAIMKELGKEVIESFDPLIITQASTINQFPLDASSVEAVLAISKTSDFPSDKICGEFSRILKPGGTVSVCKVLEGETGEIQQTIQRRVTLAGFLEPQCLDLKSIKLSTFSLSFGIKAKKPSWKIGSSFALKKPVTNLFKIDLDDDVDLIDEDSLLTEEDLMKPQLPVASGCETTKKACKNCVCGRAEIEEKAVKLGLTEDQIENPQSSCGSCGLGDAFRCGTCPYKGLPPFKLGEKVTLSQNFLEADI

SEQ ID NO: 3202 - DNA, 828 bp, Arabidopsis thaliana
agattataaaatagcagacttgcatagaaacataacatgtattacaaacttgtttagtcaaacttgaagaagaaaaaaaaatctttttaaagagctttgaagatccatggcgatgtctcatgtccagcctatgctactcctcctcgtatcactcttcttcttaccggctttgcttggcgccatagatttcgaatactgcgccaaaaatggaaacgattacggaaccgtcactagcattgtggtctctccatctgttgggcctcacgaaaacccaaccatcactataaatttattcggttctgcaagcaaaaacatccccgcgggaacccttgtgtacgtagcctttagagatggggaatttaccggccttttaaaaacttacaacctttgtgatgtgagtgcatgtaacaatgaagctgagattgaagctggcaccaactttgagttaactctttccgacgttctttatgttggttatgatgaggaaatcaagtactcggtatctttgcgccaaaagaccttagaggaggaggatccaataataaaaatgtgtgtcgacttcaaagtacctgccccagctcctgcatttgtctctatttagtcaagttggcagatgaaaagatgtttccaagtctttgattatatgagtctctctcgcaactttgcttttccttttccctttttgtgttgtccaacaaataaattaaaatcttggaccgatgtcgatatttctttgttgtaattttggcttggttaatatgaaccagcaaaccagcacgtcttttctttgaattactggttgatattaatcaaaaataaagttttttt

SEQ ID NO: 3203 - protein, 164 aa, Arabidopsis thaliana
MAMSHVQPMLLLLVSLFFLPALLGAIDFEYCAKNGNDYGTVTSIVVSPSVGPHENPTITINLFGSASKNIPAGTLVYVAFRDGEFTGLLKTYNLCDVSACNNEAEIEAGTNFELTLSDVLYVGYDEEIKYSVSLRQKTLEEEDPIIKMCVDFKVPAPAPAFVSI

SEQ ID NO: 3204 - protein, 162 aa, Arabidopsis thaliana
MSHVQPMLLLLVSLFFLPALLGAIDFEYCAKNGNDYGTVTSIVVSPSVGPHENPTITINLFGSASKNIPAGTLVYVAFRDGEFTGLLKTYNLCDVSACNNEAEIEAGTNFELTLSDVLYVGYDEEIKYSVSLRQKTLEEEDPIIKMCVDFKVPAPAPAFVSI

SEQ ID NO: 3205 - protein, 156 aa, Arabidopsis thaliana
MLLLLVSLFFLPALLGAIDFEYCAKNGNDYGTVTSIVVSPSVGPHENPTITINLFGSASKNIPAGTLVYVAFRDGEFTGLLKTYNLCDVSACNNEAEIEAGTNFELTLSDVLYVGYDEEIKYSVSLRQKTLEEEDPIIKMCVDFKVPAPAPAFVSI

SEQ ID NO: 3206 - DNA, 565 bp, Arabidopsis thaliana
agagtcgacgacgactcttcttcgttcagaccaaaactctcaaactcagccatggcgaattattacgaaccgccagcttctggaaaccgtcgagacgcagtgaaaggttacaacagcgggagcttcgacgattcagccggcgatcagagtcaaacgaacgattaccagttaaagataaagaaaagcaaaagcgttccaaacgcggatcgtgcggcgtcaagaagctggagtttcagcgatccagaatcgcggaggaagagaagagtcgctggctacaaagtttattccgttgaacagaagatgaagggatccattcgaaagagcttcaaatggttcaaagacattatcggtatttcttgatataccttctctcaactttcttaaaatctcttctttgtgctgtgagagttaaatatatctgtaacgaacaaaaaattgatagtattttctttctcttgcaactatatgtagaagaagagtctttgaacttgaatgagacagataatgaatgaaatcagttttcatatctacatgtgaatatgaccatacttcttcagttacaacc

SEQ ID NO: 3207 - protein, 119 aa, Arabidopsis thaliana
RVDDDSSSFRPKLSNSAMANYYEPPASGNRRDAVKGYNSGSFDDSAGDQSQTNDYQLKIKKSKSVPNADRAASRSWSFSDPESRRKRRVAGYKVYSVEQKMKGSIRKSFKWFKDIIGIS

SEQ ID NO: 3208 - protein, 102 aa, Arabidopsis thaliana
MANYYEPPASGNRRDAVKGYNSGSFDDSAGDQSQTNDYQLKIKKSKSVPNADRAASRSWSFSDPESRRKRRVAGYKVYSVEQKMKGSIRKSFKWFKDIIGIS

SEQ ID NO: 3209 - protein, 96 aa, Arabidopsis thaliana
SRRRLFFVQTKTLKLSHGELLRTASFWKPSRRSERLQQRELRRFSRRSESNERLPVKDKEKQKRSKRGSCGVKKLEFQRSRIAEEEKSRWLQSLFR

SEQ ID NO: 3210 - DNA, 940 bp, Arabidopsis thaliana
atggcaagaagaggaaaattaagagaaaaaaaaaaaaaaatcaacaaagcttctcggagatttttgccggcgacttctgaaacatcgtctccgatgaggtcttcaagtggtctaaatgggatgagggaaaacaacagttttccggataacacaaggaacccacaaattcttgaagtgactccattgaacagtatgccttacattggtccagtaactcatgcatccatgtcgagtaacaggatgaatgatagtgtagagaaagtaggagggcctgcgatgatatttctgccttctgactcaagttcagagttttctaaccttatcagtcaaacgaaaaccggagttgctctcacgggaagtgctgcaatggggaagattggactaacgattgggttggttgatattgctgaatccgaagactcatattactttcgtgttgcattgcctggtgtttcaagggatgagaaggaattcagctgcgaaatagaaccagacggtaagattatgataaagggagcaacaacgacgggggagcagacagtttgcaaacacaatcagatcttcaaaatgctaacacagaacttatgcccaccaggccacttcaccatcaactttcagcttcctggtcctgtgagcaatgaagaatttaacggtaattttgggtcagatggtgtacttgaaggcgtagtgaagaaggtgtactacgaagactgaacagaaacaacaaatggagatggatttgttgagttttaaagtaagctagaatcactgcagcttaagtaggattttctttttgttggaagctacattgtcatcacaaagattgttgattagtttatgttactttgtaaaaacttaactatttgatacttgatatgcctgatgaaaaaagaattggagatgatatggtaagggaattatgataggaaatcaattacct

SEQ ID NO: 3211 - protein, 237 aa, Arabidopsis thaliana
MARRGKLREKKKKINKASRRFLPATSETSSPMRSSSGLNGMRENNSFPDNTRNPQILEVTPLNSMPYIGPVTHASMSSNRMNDSVEKVGGPAMIFLPSDSSSEFSNLISQTKTGVALTGSAAMGKIGLTIGLVDIAESEDSYYFRVALPGVSRDEKEFSCEIEPDGKIMIKGATTTGEQTVCKHNQIFKMLTQNLCPPGHFTINFQLPGPVSNEEFNGNFGSDGVLEGVVKKVYYED

SEQ ID NO: 3212 - protein, 206 aa, Arabidopsis thaliana
MRSSSGLNGMRENNSFPDNTRNPQILEVTPLNSMPYIGPVTHASMSSNRMNDSVEKVGGPAMIFLPSDSSSEFSNLISQTKTGVALTGSAAMGKIGLTIGLVDIAESEDSYYFRVALPGVSRDEKEFSCEIEPDGKIMIKGATTTGEQTVCKHNQIFKMLTQNLCPPGHFTINFQLPGPVSNEEFNGNFGSDGVLEGVVKKVYYED

SEQ ID NO: 3213 - protein, 197 aa, Arabidopsis thaliana
MRENNSFPDNTRNPQILEVTPLNSMPYIGPVTHASMSSNRMNDSVEKVGGPAMIFLPSDSSSEFSNLISQTKTGVALTGSAAMGKIGLTIGLVDIAESEDSYYFRVALPGVSRDEKEFSCEIEPDGKIMIKGATTTGEQTVCKHNQIFKMLTQNLCPPGHFTINFQLPGPVSNEEFNGNFGSDGVLEGVVKKVYYED

SEQ ID NO: 3214 - DNA, 775 bp, Arabidopsis thaliana
atagatacaagtgattgctatacatataacaaacacaagaaaacaccaaaagaccacatatccttccaatggccccccttcaacgcaccatctcggatatttcacaccaaatttcaatagacaacactctaacaaaagaaccatctccaaccgcaaccgcaacaactttgttatccttatcagcgatatccgaagtggaagatgcaaagtgtgagtgttgtggcatgtctgaagagtgcacgccggagtacatacaccgtgtgcgttcaaaattctcagggaagctgatttgcgggctgtgcgaaaaagcggtggagggggagatggagaagatgaacaacagtgaagtgctgatggagaagcggcgagaagaggcagtgaaggtacacatgagcgcatgttcccggttcaacaggctaggccggagttatccagtgttgtaccaagcagaagcggttaaggaaatgctgaaaaagaggtctaagaagatggttggagccaccaagcctgaaaaaggtggcctcgctaggagctctagctgcatgccggctttagctaaggagcttaaagatcgtaccttggttaattagcttatttgtatactcacgtacacgtatgttatgttcatatatagatttgaatttacatgcagacggagatgtgtattaagtgagttatatatgtagttaaaaaccgatggaagttttacgtgtgtaaattgtaatgtataatattttttcgtcaagtttattatcaatcaaacgtccgttttctc

SEQ ID NO: 3215 - protein, 173 aa, Arabidopsis thaliana
MAPLQRTISDISHQISIDNTLTKEPSPTATATTLLSLSAISEVEDAKCECCGMSEECTPEYIHRVRSKFSGKLICGLCEKAVEGEMEKMNNSEVLMEKRREEAVKVHMSACSRFNRLGRSYPVLYQAEAVKEMLKKRSKKMVGATKPEKGGLARSSSCMPALAKELKDRTLVN

SEQ ID NO: 3216 - protein, 121 aa, Arabidopsis thaliana
MSEECTPEYIHRVRSKFSGKLICGLCEKAVEGEMEKMNNSEVLMEKRREEAVKVHMSACSRFNRLGRSYPVLYQAEAVKEMLKKRSKKMVGATKPEKGGLARSSSCMPALAKELKDRTLVN

SEQ ID NO: 3217 - protein, 88 aa, Arabidopsis thaliana
MEKMNNSEVLMEKRREEAVKVHMSACSRFNRLGRSYPVLYQAEAVKEMLKKRSKKMVGATKPEKGGLARSSSCMPALAKELKDRTLVN

SEQ ID NO: 3218 - DNA, 1028 bp, Arabidopsis thaliana
tggagcctcggaaactcaatccttgtatattcaacggagagagatctgcgagagaaagagagatcagattccggtgttccaaggaagcacatattttaagatccagaatcgcctgagagatgtctaccttcagtggcgatgagaccgctcctttcttcggcttccttggcgctgccgctgcgctcgtcttctcatgtatgggagctgcgtacgggacagcaaagagtggtgtgggagtggcatctatgggtgtgatgaggccggagttggtgatgaagtctattgtcccagttgttatggctggtgtgttgggtatctatggtttgattattgctgttatcatcagtaccgggattaaccccaaggctaaatcctactacctcttcgacggatatgctcatctctcttctggtcttgcttgtgggctagctggtctttcagctggaatggccataggtatcgttggcgatgctggtgtcagggccaatgctcaacagccaaagcttttcgttggtatgattcttatcctcattttcgctgaagctcttgctctatacggtctcatcgtcgggatcattttgtcctcccgagctggtcagtccagagccgaatgagaaaagagtgcggttcttgaagtccgcatgattctttcttccccttttcaccggtctcttcatagagccgggatcttcttatattgtttgtcaggttagtagagagacacagtggttttgttccttgtggcatgtcttctcgaaacaaaaaccacacatcatcatcaaaagcgttgttccgttttcacccttctgttatgtttgtaatgagaccgttgcggattcttctgttcccagtaagataactgtgggagacaccctatttatatcgtttatcattttcctaataaaattccagaaaaactcgatttgatcttgtttatgaaacttttttgaatatttttctgttttgtttttgggttttatcgtgtatatatatatatatatatatttgtcgaccagtttaatttcgtt

SEQ ID NO: 3219 - protein, 164 aa, Arabidopsis thaliana
MSTFSGDETAPFFGFLGAAAALVFSCMGAAYGTAKSGVGVASMGVMRPELVMKSIVPVVMAGVLGIYGLIIAVIISTGINPKAKSYYLFDGYAHLSSGLACGLAGLSAGMAIGIVGDAGVRANAQQPKLFVGMILILIFAEALALYGLIVGIILSSRAGQSRAE

SEQ ID NO: 3220 - protein, 138 aa, Arabidopsis thaliana
MGAAYGTAKSGVGVASMGVMRPELVMKSIVPVVMAGVLGIYGLIIAVIISTGINPKAKSYYLFDGYAHLSSGLACGLAGLSAGMAIGIVGDAGVRANAQQPKLFVGMILILIFAEALALYGLIVGIILSSRAGQSRAE

SEQ ID NO: 3221 - protein, 122 aa, Arabidopsis thaliana
MGVMRPELVMKSIVPVVMAGVLGIYGLIIAVIISTGINPKAKSYYLFDGYAHLSSGLACGLAGLSAGMAIGIVGDAGVRANAQQPKLFVGMILILIFAEALALYGLIVGIILSSRAGQSRAE

SEQ ID NO: 3222 - DNA, 572 bp, Arabidopsis thaliana
aaaaaccctagatctgatactaaaatggcgacggcgttgaagaagaacagaaagaagagaggtcacgtcagcgccggacatggacgtatcggtaagcaccgtaagcatcccggaggtcgtggaaacgcaggaggtatgcatcaccacaggatcctcttcgacaagtaccatccaggttacttcgggaaagttggtatgaggtatttccacaagcttcgtaacaagttcttttgcccaatcgtgaacctggacaagctatggtcacttgttcctgaagacgtgaaggcgaaatcgagcaaggataatgttccgttgatcgatgtgacgcagcatggtttcttcaaggttttggggaaaggtcatttgcctgagaacaaacctttcgttgtgaaggctaagcttatctctaagactgctgagaagaagattaaggaagctggtggtgctgttgttctcactgcttagtttttttttttcaattcagtctctttttaatttatttcatgttattgaactcagctttgttggattttggaatcagagatcttttaatctatggtattggattatac

SEQ ID NO: 3223 - protein, 154 aa, Arabidopsis thaliana
KNPRSDTKMATALKKNRKKRGHVSAGHGRIGKHRKHPGGRGNAGGMHHHRILFDKYHPGYFGKVGMRYFHKLRNKFFCPIVNLDKLWSLVPEDVKAKSSKDNVPLIDVTQHGFFKVLGKGHLPENKPFVVKAKLISKTAEKKIKEAGGAVVLTA

SEQ ID NO: 3224 - protein, 146 aa, Arabidopsis thaliana
MATALKKNRKKRGHVSAGHGRIGKHRKHPGGRGNAGGMHHHRILFDKYHPGYFGKVGMRYFHKLRNKFFCPIVNLDKLWSLVPEDVKAKSSKDNVPLIDVTQHGFFKVLGKGHLPENKPFVVKAKLISKTAEKKIKEAGGAVVLTA

SEQ ID NO: 3225 - protein, 109 aa, Arabidopsis thaliana
MHHHRILFDKYHPGYFGKVGMRYFHKLRNKFFCPIVNLDKLWSLVPEDVKAKSSKDNVPLIDVTQHGFFKVLGKGHLPENKPFVVKAKLISKTAEKKIKEAGGAVVLTA

SEQ ID NO: 3226 - DNA, 2940 bp, Arabidopsis thaliana
ctccgccggcgaacagttttattatctctctctttctgcgtgttccaatttcttccacaaaaccctaattttctcttaaaccctgaaattcgtgtaacctttcaacaatctcttcaattttgttttcgattctgaatccattgtttacgaatctctcatctaaagctacattcttcgttaaatcgtttttaatcgactcgctcactcgtgagttgactcgtcagctgtttccataattgcttattgaatttttatacgatgatgtttcaatatggaagaaactagaggaatttctgatccagagaatgggagttcgagttacggcggtaaaccgccgaatccactctccttctcttcttcctccgccgctgctgccgtttacaggcaaaccttcgacggcgagcgatcgttggcgccgtgtaataagaggtcactggttcgacactcatctctcgtgaagacaatggtgtcagatatatctgttgagaatgagtttactatagagaagaacaagtctgagtttgttcctgctacgcgttctggagcttggtctgatattggctccaggtcaagcatggaagatgcttatctatgcgttgataatttcatggatagctttggccttctgaattctgaggctggtccaagtgccttctatggggtatttgatggacatggtgggaagcatgccgctgagtttgcatgtcaccatataccgaggtacattgttgaagatcaagagtttcctagtgaaatcaataaggtgttatcttcagcatttcttcaaacagacactgccttcttagaggcgtgttcattggatgggagccttgcttcaggaactactgctttggcagctattctttttggaaggtcgttggtggtagcaaacgctggagattgcagagcagtcttatcccgtcagggaaaagccattgaaatgtcaagagaccacaaacccatgagcagtaaggaaaggagacgcattgaagcatcgggtggacatgtattcgatggctatctaaatggacaacttaatgtggctcgagcgctaggtgactttcatatggaaggcatgaagaagaagaaagatggttctgattgtggacctctaattgcagagcctgagctcatgacaacaaaactaacagaagaggatgagttccttataattgggtgtgacggggtttgggatgtgttcatgagccagaatgctgtagattttgccagaaggagactacaggagcacaatgacccggtcatgtgtagtaaggagctggttgaggaagctttgaagaggaagagtgctgataatgtgacggcagtggttgtgtgtcttcagccacagccaccaccgaacttggtagcgccgaggttgagagttcacagaagcttctcggcggagggtttaaaagatttacagagctacttggatggcttgggaaactaattgggggacatgaggatggtgacgaatgattgatttctctgtttttgttttgtcttttcttacaattttatagtttggggtttggaggttttgttctgttaaattctcgcaatttgagtaagttataacatgaggcggcatacaataatttattgtttggtaggatatatttttttgtcacttttgcataataataattctgcttcagtctcatttgttttgtaactagaaagttattccaattcctgcgtttaccgaatatgttgtgttcttgcagaatgacgtatgttagatatgcagtaaactcgagggtcggctttgaccacatcgccacttatcggtttgcggatgctggaaaagtcagtctagtgatgaggctgagtgagccatcgtcagttactattttatcgtgaaactctgaacaacgagattgtcccggatattcaaatgaggaacaaggcccaatagtccgatcaaagtgggctattcgtatcgcttacgaggcctatacgatggtaattgaattcacgcgcattcatcagcgcgtgatttggagttgctcaatttcagatcgcacaggctctgttaatcatctcctcctccgaaagacagagaaagagacaaatcaaattcattcatatcaaagagatagagagaaaatgtccggtgtggctattcatgcgagttcatggggcgcggctctggtgagaatctccccgtacactttctccgccatcggaatcgccatctccatcggcgtctctgttcttggtgctgcctggggaatttacattaccggaagtagtttgatcggtgccgccattgaagctcctcgaatcacttccaagaatctcatcagtgtaatcttctgtgaagccgtggctatatacggtgttattgtggcaatcatattacaaacgaagttggagagtgtaccatcatcaaagatgtatgatgctgagtctctaagagctggatatgcaatctttgcttctggaatcattgttggattcgcaaaccttgtatgcgggttatgtgtaggaatcattggaagcagttgcgcattgtctgatgctcagaactcgacgctctttgttaagattcttgtgattgagatctttgggagtgctctcgggttatttggagttatcgttgggattattatgtcagctcaagctacatggcctacaaaatagagatatataaactggtaacttatggacttgtactctatagtctatacattctatgatctatttttcaaagttccggataaaaattacacttctttgctgttatatctcttgtgtagaagaaaaaccatgtgtgattaagattctccttgagttgaatccctattttttggtaatgttcaaatttggtaataagtcacttggagaaacctcttcatgcttgtactctttggttctcttttgacaaatgataagagagtctgtaaatttttgatgagcattgaatgagctttaaac

SEQ ID NO: 3227 - protein, 392 aa, Arabidopsis thaliana
MEETRGISDPENGSSSYGGKPPNPLSFSSSSAAAAVYRQTFDGERSLAPCNKRSLVRHSSLVKTMVSDISVENEFTIEKNKSEFVPATRSGAWSDIGSRSSMEDAYLCVDNFMDSFGLLNSEAGPSAFYGVFDGHGGKHAAEFACHHIPRYIVEDQEFPSEINKVLSSAFLQTDTAFLEACSLDGSLASGTTALAAILFGRSLVVANAGDCRAVLSRQGKAIEMSRDHKPMSSKERRRIEASGGHVFDGYLNGQLNVARALGDFHMEGMKKKKDGSDCGPLIAEPELMTTKLTEEDEFLIIGCDGVWDVFMSQNAVDFARRRLQEHNDPVMCSKELVEEALKRKSADNVTAVVVCLQPQPPPNLVAPRLRVHRSFSAEGLKDLQSYLDGLGN

SEQ ID NO: 3228 - protein, 328 aa, Arabidopsis thaliana
MVSDISVENEFTIEKNKSEFVPATRSGAWSDIGSRSSMEDAYLCVDNFMDSFGLLNSEAGPSAFYGVFDGHGGKHAAEFACHHIPRYIVEDQEFPSEINKVLSSAFLQTDTAFLEACSLDGSLASGTTALAAILFGRSLVVANAGDCRAVLSRQGKAIEMSRDHKPMSSKERRRIEASGGHVFDGYLNGQLNVARALGDFHMEGMKKKKDGSDCGPLIAEPELMTTKLTEEDEFLIIGCDGVWDVFMSQNAVDFARRRLQEHNDPVMCSKELVEEALKRKSADNVTAVVVCLQPQPPPNLVAPRLRVHRSFSAEGLKDLQSYLDGLGN

SEQ ID NO: 3229 - protein, 291 aa, Arabidopsis thaliana
MEDAYLCVDNFMDSFGLLNSEAGPSAFYGVFDGHGGKHAAEFACHHIPRYIVEDQEFPSEINKVLSSAFLQTDTAFLEACSLDGSLASGTTALAAILFGRSLVVANAGDCRAVLSRQGKAIEMSRDHKPMSSKERRRIEASGGHVFDGYLNGQLNVARALGDFHMEGMKKKKDGSDCGPLIAEPELMTTKLTEEDEFLIIGCDGVWDVFMSQNAVDFARRRLQEHNDPVMCSKELVEEALKRKSADNVTAVVVCLQPQPPPNLVAPRLRVHRSFSAEGLKDLQSYLDGLGN

SEQ ID NO: 3230 - DNA, 908 bp, Arabidopsis thaliana
agaagccgattctaggaaaaatccgatactctttggacagtctatggccaccgatctctacggcgatctctttccggttatcacttcgtcactacacatttgcttcttccgttttcgtatcggatcgaatactattcatctttcttcgaatcgggtttctttgaacctttgaagctatgggtgatgcaatcgatttgagtggagatggtggcgtcttgaaaaagattgtaaggagtgccaaacctgatgctatttcaccctctgatgatcttcctgttgtcgatgttcattatgagggtatcttggctgaagacgaaaaggttttcgacactactcgcgaagacaatcttgttttctcctttgagttaggaacaggcagtgttatccgttcttgggacattgctcttaaaaccatgaaggttggagaagttgcaaaaattacatgtaagccagaatatgcttacggaagagccgggtctcctcccgacatcccacctgatgcaactttgattttcgaggtggaattggttgcttgtagaccgaggaaaggtgctagtgttggaagtgtttctgaagagagagccaggctagaagatctgaagaagcagagagagattgctgcagctgcgaaagaggatgataagaaaaagagagaagaagcaaaagctgctgcagctgctaggattcaagctaagctagacgctaagaaaggtccaggcaaaggaaaaggcaaaggcaaagctaaataagtcgaatgcaaaagacctgtcactactatttcatgatgaatctaaatcaaacttttggaaagggagagtcatcagttacatcatattgagttattgaccattacatgatttgtttggggtttaattcgcacgcacattaataacataaacaagtgttcg

SEQ ID NO: 3231 - protein, 190 aa, Arabidopsis thaliana
MGDAIDLSGDGGVLKKIVRSAKPDAISPSDDLPVVDVHYEGILAEDEKVFDTTREDNLVFSFELGTGSVIRSWDIALKTMKVGEVAKITCKPEYAYGRAGSPPDIPPDATLIFEVELVACRPRKGASVGSVSEERARLEDLKKQREIAAAAKEDDKKKREEAKAAAAARIQAKLDAKKGPGKGKGKGKAK

SEQ ID NO: 3232 - protein, 111 aa, Arabidopsis thaliana
MKVGEVAKITCKPEYAYGRAGSPPDIPPDATLIFEVELVACRPRKGASVGSVSEERARLEDLKKQREIAAAAKEDDKKKREEAKAAAAARIQAKLDAKKGPGKGKGKGKAK

SEQ ID NO: 3233 - DNA, 682 bp, Arabidopsis thaliana
aaatctctctctctctctctctctctctctctctctctctctctttcacctttctcactttttctccctaaagcaaccacatctctctcttccttcttcatcttcgtctctctcgttccaagtttaagctcaagccatgagctcctcaattatgaaaacccttcaaattcgtaaaccaacttctctccctatctcttccaccaccacagatgagccagggcttctccgtcgtcgtctctcttctctttctctaaatctctcacgtaaccaaccttccaccgtctcaagatccaagtctgtctctgacatgggagagcaaggagggagctccgtgaaagaatggtgggaatggagttggtcatggattcttttaaagaagttaccaatctttttcacagatcttgaggttaacaagaacgaaaccaaatcatcattggggaatcaacaaagaggtagcttcattcacgtcttttttaagctccgatctgaaatccgccgtctcctccgtccttcctcagactctcttcctctctcttgcaaacatggacagcgatgacgtggagctcactctctcgttggagattcttaagattttgtgtgtgtggcgttactttcattcttataaaatctcttattatttgaatcttacatgtataatgtgtggtcataattttctaatttc

SEQ ID NO: 3234 - protein, 139 aa, Arabidopsis thaliana
MSSSIMKTLQIRKPTSLPISSTTTDEPGLLRRRLSSLSLNLSRNQPSTVSRSKSVSDMGEQGGSSVKEWWEWSWSWILLKKLPIFFTDLEVNKNETKSSLGNQQRGSFIHVFFKLRSEIRRLLRPSSDSLPLSCKHGQR

SEQ ID NO: 3235 - protein, 134 aa, Arabidopsis thaliana
MKTLQIRKPTSLPISSTTTDEPGLLRRRLSSLSLNLSRNQPSTVSRSKSVSDMGEQGGSSVKEWWEWSWSWILLKKLPIFFTDLEVNKNETKSSLGNQQRGSFIHVFFKLRSEIRRLLRPSSDSLPLSCKHGQR

SEQ ID NO: 3236 - protein, 82 aa, Arabidopsis thaliana
MGEQGGSSVKEWWEWSWSWILLKKLPIFFTDLEVNKNETKSSLGNQQRGSFIHVFFKLRSEIRRLLRPSSDSLPLSCKHGQR

SEQ ID NO: 3237 - DNA, 938 bp, Arabidopsis thaliana
actttaccatccaccagttcttctcaatctttctcttcctgggatcatcatcgttatgatttgattagcaacataacctagaatcaaaatgatgaatgaccttatcaacaacgatgggtcaattttcactagattctatttcctcggagatatctgagagaaaaaggttatttcactaatcgttaatcccagaggtgttttttttttgccaaggtcacgtgatatttttttttaatttcaatgactcgtcacgtgattttaaaatccccgttgttagtttcatcggaagaatcaacgatgagaaactctcctccttcgacgacgtcgttaagcaaagagagacgaaaagttggagaggtagcgggaggagcggcggcggagtgtgcggctgtgtggtgttgttgtccatgcgcggtggtgaatctaatggttttagccgtgtataaagttccggccgcggtttgtaaaaaagcttggaggcgaagcaaacgacgacgttttacgaggaaacgacatggtttgcttgcgtcagcgacggcggaaggaagcgaaagtaccgtacacgctagattgaatgaagaagatctaacggctgagattgtttttgaggaatgtcatgtgagtggtggtgagttaaacgacgtcgtcaggcttgaaaatgaaatgttggatcgtttctatggggctggcttttggagaagcccttcacagaaggacacgtcatcaggaagcctatgaattcttcttcttatgagtattttgggttttttgaaagaattaatagtaatttatttgttttttattttatttttttgtatgtaagttcaattgttttatgtggggtatgtgaatagaagaacattgtagtatactttatacatttttatttgttttctgttcgtttaaaatgtaactatgtctctttgtgtcagaatttg

SEQ ID NO: 3238 - protein, 165 aa, Arabidopsis thaliana
MTRHVILKSPLLVSSEESTMRNSPPSTTSLSKERRKVGEVAGGAAAECAAVWCCCPCAVVNLMVLAVYKVPAAVCKKAWRRSKRRRFTRKRHGLLASATAEGSESTVHARLNEEDLTAEIVFEECHVSGGELNDVVRLENEMLDRFYGAGFWRSPSQKDTSSGSL

SEQ ID NO: 3239 - protein, 146 aa, Arabidopsis thaliana
MRNSPPSTTSLSKERRKVGEVAGGAAAECAAVWCCCPCAVVNLMVLAVYKVPAAVCKKAWRRSKRRRFTRKRHGLLASATAEGSESTVHARLNEEDLTAEIVFEECHVSGGELNDVVRLENEMLDRFYGAGFWRSPSQKDTSSGSL

SEQ ID NO: 3240 - protein, 103 aa, Arabidopsis thaliana
MVLAVYKVPAAVCKKAWRRSKRRRFTRKRHGLLASATAEGSESTVHARLNEEDLTAEIVFEECHVSGGELNDVVRLENEMLDRFYGAGFWRSPSQKDTSSGSL

SEQ ID NO: 3241 - DNA, 649 bp, Arabidopsis thaliana
aaaaaaagctatgagctcgacgatcttgttctctggtgttgttcctctgcgtttgagatcggttttgactccagctaatccggctaccgatagagcttcaatggcgagttcctctggtgctaagtgggctcagaaaaccatcacgcttccaccgctacgtcgtggatgtcatcttattactccaaagatattgaaagaaataagggaagacttgtcagatttcaattgtggtcttgctcatgtcttcttacaacacacaagtgcttctctgacaatcaatgagaattatgatccagatgttcaggctgatactgagactttcttgaacaggattgttcctgaggggaattcagcgccttggaggcatactatggaaggtcctgatgacatgccagctcatatcaagtcatcaatgtttggatgtcaactcacaatcccaataacaaaaggaaaactcagcatgggaacttggcagggaatatggctctgtgaacaccgtgatgctccaacagcacgcagagttgtggtcactctcaatggaatctagagatgtctcttcacgttagatggcttgtaacctcgtaatgttttaatagatttttacagtcttgtaatgaaatttgactttctatatgagaccactttgtcc

SEQ ID NO: 3242 - protein, 181 aa, Arabidopsis thaliana
KKAMSSTILFSGVVPLRLRSVLTPANPATDRASMASSSGAKWAQKTITLPPLRRGCHLITPKILKEIREDLSDFNCGLAHVFLQHTSASLTINENYDPDVQADTETFLNRIVPEGNSAPWRHTMEGPDDMPAHIKSSMFGCQLTIPITKGKLSMGTWQGIWLCEHRDAPTARRVVVTLNGI

SEQ ID NO: 3243 - protein, 178 aa, Arabidopsis thaliana
MSSTILFSGVVPLRLRSVLTPANPATDRASMASSSGAKWAQKTITLPPLRRGCHLITPKILKEIREDLSDFNCGLAHVFLQHTSASLTINENYDPDVQADTETFLNRIVPEGNSAPWRHTMEGPDDMPAHIKSSMFGCQLTIPITKGKLSMGTWQGIWLCEHRDAPTARRVVVTLNGI

SEQ ID NO: 3244 - protein, 148 aa, Arabidopsis thaliana
MASSSGAKWAQKTITLPPLRRGCHLITPKILKEIREDLSDFNCGLAHVFLQHTSASLTINENYDPDVQADTETFLNRIVPEGNSAPWRHTMEGPDDMPAHIKSSMFGCQLTIPITKGKLSMGTWQGIWLCEHRDAPTARRVVVTLNGI

SEQ ID NO: 3245 - DNA, 694 bp, Arabidopsis thaliana
gagaactagtctcgagtttctttcgtcctttttttccttttgcattctctcgtcgtcgtctcaagatctagaagaaggaaacaacaatttcaagagacatggcaggcaaaggtggaaaaggactcgtagctgcgaagacgatggctgctaacaaggacaaagacaaggacaagaagaaacccatctctcgctctgctcgtgctggtattcagtttccagttggacgaattcacaggcaactgaagacccgagtctcggcacatggcagagttggtgccactgcagccgtctacacagcttcaatcctggagtatctgacagcagaggttcttgagttggctgggaatgcgagcaaggatctcaaagtgaagaggataacgccaaggcatctgcagttggcgattagaggagatgaggagctggacacactcatcaagggaacgattgctggaggtggtgtgatccctcacatccacaagtctctcatcaacaaaaccaccaaggagtgatgtgtagctttttatggtgtttgtatttctgtagtcttggactcattttcctttatccttttcttagttctttgactagtgttgacctcttctggacatcctcaggtgtacattagttaatttgaactctttaggtttccttgttcaatcatatgttctctttctatgctattgtgatttgcttg

SEQ ID NO: 3246 - protein, 136 aa, Arabidopsis thaliana
MAGKGGKGLVAAKTMAANKDKDKDKKKPISRSARAGIQFPVGRIHRQLKTRVSAHGRVGATAAVYTASILEYLTAEVLELAGNASKDLKVKRITPRHLQLAIRGDEELDTLIKGTIAGGGVIPHIHKSLINKTTKE

SEQ ID NO: 3247 - protein, 122 aa, Arabidopsis thaliana
MAANKDKDKDKKKPISRSARAGIQFPVGRIHRQLKTRVSAHGRVGATAAVYTASILEYLTAEVLELAGNASKDLKVKRITPRHLQLAIRGDEELDTLIKGTIAGGGVIPHIHKSLINKTTKE

SEQ ID NO: 3248 - DNA, 820 bp, Arabidopsis thaliana
gagaagggagaaaactttctccgagctcgattgtttttggaaatcgtcaatcagatatttctcgttcgtctccgccttcgatttatccaaaggctcttgttattgaaaatggcagattccaccaaagcagggttgaagaagccagctttcactaaggttgatcagctgcgtcctgggactagcggacacaatgtcaatgtgaagattgtcagcacgaaaatggtgttacagaaaggtcgtgctgatggtcctcaagctcgccagttgcggatttctgaatgcattgttggtgacgagacaggagtgatcgtctttaccgcaagaaatgaccaagtggacttaatgaaagagggatcaactgtaactctacgcaatgcgaaaatcgacatgtataaaggatcaatgaggctagctgtagacaagtggggtcgtgttgaagtcacagagcctgcgagcttcaaagtgaaagaagacaccaacatgtcccttatcgagtatgagctcgtaaacgtcgttgaatgagtgacaaattcctcgaaataccactaggagaaacgccctcaagaataaacaagtcaaatccgtaaccgtttatgttagcgtcaagaaaagagttaaaccctgatcagctgatgtcttgcactaagctatgtaagagtgatgatggctctaaaagttgaatgcagagcttttggcttaggttatgacttcgtgataccttttcttttgtaatgtcatcatacacgctaaggcttttgtgctacattattactctctttgtctttgcctcgtttcaaaaaatccatattcttagtgaagc

SEQ ID NO: 3249 - protein, 173 aa, Arabidopsis thaliana
EKGENFLRARLFLEIVNQIFLVRLRLRFIQRLLLLKMADSTKAGLKKPAFTKVDQLRPGTSGHNVNVKIVSTKMVLQKGRADGPQARQLRISECIVGDETGVIVFTARNDQVDLMKEGSTVTLRNAKIDMYKGSMRLAVDKWGRVEVTEPASFKVKEDTNMSLIEYELVNVVE

SEQ ID NO: 3250 - protein, 137 aa, Arabidopsis thaliana
MADSTKAGLKKPAFTKVDQLRPGTSGHNVNVKIVSTKMVLQKGRADGPQARQLRISECIVGDETGVIVFTARNDQVDLMKEGSTVTLRNAKIDMYKGSMRLAVDKWGRVEVTEPASFKVKEDTNMSLIEYELVNVVE

SEQ ID NO: 3251 - protein, 100 aa, Arabidopsis thaliana
MVLQKGRADGPQARQLRISECIVGDETGVIVFTARNDQVDLMKEGSTVTLRNAKIDMYKGSMRLAVDKWGRVEVTEPASFKVKEDTNMSLIEYELVNVVE

SEQ ID NO: 3252 - DNA, 776 bp, Arabidopsis thaliana
aaccatatatatacacacaaaatatttgttaacaaaaagatttatatttcttctcttctttgttcataactaagaactcagaaagagaccaacgacactgcaaatggcggatgaatctccaaagtctatctacgacttcaccgtcaaggatatcggaggtaacgatgtgagtttggaccaatacaaaggcaaaactcttttggttgtaaacgttgcttccaaatgtggtctgacggatgcgaactacaaggaactgaatgttctgtacgagaaatacaaggagcaagggttggagatattagcattcccgtgtaatcagttcttaggacaagaaccaggaaacaatgaagagattcaacaaactgtctgcaccaggttcaaagctgaattccccatctttgacaaggtggatgtgaacggtaagaacacggcaccattatacaagtacttgaaagcagagaaaggaggtttgctcattgatgctatcaaatggaacttcaccaaattcttggtttctcctgatggcaaggtcttacagagatattctcccagaacctctcctcttcaattcgagaaggacattcaaactgcgttgggacaggcctcttcttaatcaccagaagaagaagtttcaagaactttcgtttggtccaaattatgatcttagaatcatcaacattgcaaacttattttctttgaattctatcattcttgttttaaataattgatgtattcgatgtcttttcatgggatgatatatcatatattatcatgcg

SEQ ID NO: 3253 - protein, 169 aa, Arabidopsis thaliana
MADESPKSIYDFTVKDIGGNDVSLDQYKGKTLLVVNVASKCGLTDANYKELNVLYEKYKEQGLEILAFPCNQFLGQEPGNNEEIQQTVCTRFKAEFPIFDKVDVNGKNTAPLYKYLKAEKGGLLIDAIKWNFTKFLVSPDGKVLQRYSPRTSPLQFEKDIQTALGQASS

SEQ ID NO: 3254 - DNA, 1353 bp, Arabidopsis thaliana
accagaaaaacacacaccaaacaaaacaaaacaaaaaacagagagatggaaaacggaaactcctccagcgacaacaaatcttcacataaaccgatccgatgcaaagcggcggttagtaggaaggctggagagccgttggtgatggaagaaatcatggtggcgccgccgcagcctttcgaggttcggattcgaatcatctgcaccgcgttatgtcacagtgacgtcactttctggaaactccaagttcctccagcctgctttccgaggatactaggccacgaggcaataggcgtagtggaaagtgttggtgaaaatgtgaaggaagtggtagaaggagacaccgtactaccaacgttcatgcctgactgtggtgactgtgttgattgcaaatctcacaaaagcaacttatgtagcaaatttcctttcaaggtatccccttggatgccaagatacgataattccagcagattcaccgacctcaatggcgaaactctctttcatttcttgaacgtctccagcttcagcgaatacacggttcttgatgtcgctaacgttgttaagattgattcttcgattcctcctagtcgtgcttgcctcctaagctgcggagtctccaccggtgttggtgctgcttgggagaccgccaaagttgaaaaaggatcaaccgttgtgattttcggacttggttctatcggattagcggttgcagagggtgcgagactttgtggtgcctctagaatcattggtgtggatataaaccctaccaaattccaagttggccagaaatttggagttaccgagtttgtaaactctatgacatgtgagaaaaaccgtgttagcgaggtgatcaatgagatgactgatgggggagcggactattgcttcgaatgtgttggaagtagttctttggttcaagaagcttatgcttgctgtagacagggatggggaaagacaataactttaggggtggacaagccgggttcacaaatatgtttagattcgtttgatgttcttcaccatgggaagattctgatgggttcgttgtttggaggtttaaaggctaaaacacacattccaattcttcttaaacgctacttgagcaatgaacttgaattggataagtttgtgacacatgagatgaaattcgaggagatcaacgacgcattccagctacttcttgaagggaaatgcatcaggtgtgtcttatggatgggctaagtgaattgacttattttatctttccatcttttgcatcaatttcatatgtttcatgtttaactatttttattggtttgtaatcaaaacaagcaaatgccaaagtgacagcaaaataaaaagtcaatgaattgtaac

SEQ ID NO: 3255 - protein, 405 aa, Arabidopsis thaliana
TRKTHTKQNKTKNREMENGNSSSDNKSSHKPIRCKAAVSRKAGEPLVMEEIMVAPPQPFEVRIRIICTALCHSDVTFWKLQVPPACFPRILGHEAIGVVESVGENVKEVVEGDTVLPTFMPDCGDCVDCKSHKSNLCSKFPFKVSPWMPRYDNSSRFTDLNGETLFHFLNVSSFSEYTVLDVANVVKIDSSIPPSRACLLSCGVSTGVGAAWETAKVEKGSTVVIFGLGSIGLAVAEGARLCGASRIIGVDINPTKFQVGQKFGVTEFVNSMTCEKNRVSEVINEMTDGGADYCFECVGSSSLVQEAYACCRQGWGKTITLGVDKPGSQICLDSFDVLHHGKILMGSLFGGLKAKTHIPILLKRYLSNELELDKFVTHEMKFEEINDAFQLLLEGKCIRCVLWMG

SEQ ID NO: 3256 - protein, 390 aa, Arabidopsis thaliana
MENGNSSSDNKSSHKPIRCKAAVSRKAGEPLVMEEIMVAPPQPFEVRIRIICTALCHSDVTFWKLQVPPACFPRILGHEAIGVVESVGENVKEVVEGDTVLPTFMPDCGDCVDCKSHKSNLCSKFPFKVSPWMPRYDNSSRFTDLNGETLFHFLNVSSFSEYTVLDVANVVKIDSSIPPSRACLLSCGVSTGVGAAWETAKVEKGSTVVIFGLGSIGLAVAEGARLCGASRIIGVDINPTKFQVGQKFGVTEFVNSMTCEKNRVSEVINEMTDGGADYCFECVGSSSLVQEAYACCRQGWGKTITLGVDKPGSQICLDSFDVLHHGKILMGSLFGGLKAKTHIPILLKRYLSNELELDKFVTHEMKFEEINDAFQLLLEGKCIRCVLWMG

SEQ ID NO: 3257 - protein, 358 aa, Arabidopsis thaliana
MEEIMVAPPQPFEVRIRIICTALCHSDVTFWKLQVPPACFPRILGHEAIGVVESVGENVKEVVEGDTVLPTFMPDCGDCVDCKSHKSNLCSKFPFKVSPWMPRYDNSSRFTDLNGETLFHFLNVSSFSEYTVLDVANVVKIDSSIPPSRACLLSCGVSTGVGAAWETAKVEKGSTVVIFGLGSIGLAVAEGARLCGASRIIGVDINPTKFQVGQKFGVTEFVNSMTCEKNRVSEVINEMTDGGADYCFECVGSSSLVQEAYACCRQGWGKTITLGVDKPGSQICLDSFDVLHHGKILMGSLFGGLKAKTHIPILLKRYLSNELELDKFVTHEMKFEEINDAFQLLLEGKCIRCVLWMG

SEQ ID NO: 3258 - DNA, 1132 bp, Arabidopsis thaliana
tcccccccccgaagagcccgtcgtttctcccattaccctccaattaatacactattttttttatttttttgtctttccctttttaaaatgatcatcatcttcttcttcactcgcctcaatttttgttcccttcttcttctataattcaactgtgaatttcaccgacgaaacaaaaaagagagagagagagagagaaacgatgagttctcagatttcggagattgaacaagagcagctgatcgagaagcttgagatcttcaagatccatggcagagacaaacgtggccgtaagatccttcgtattatcggaaaattcttcccagctcgatttctgtcactggatgtgttgaagaagtatctagaggagaagatatttcctcgattaggtagaaaaccattcgccgtactctacgtccacaccggcgtacagagaagcgagaacttcccaggtatctcagctctacgagcgatctacgacgcaattccggtaaacgtcagagacaatcttcaggaggtttacttcctccatccaggtcttcaatcacgtctcttcctcgccacctgcggccgatttctattttccggcgggttgtacgggaagctgaggtacataagcagagttgattatctgtgggaacatgtgaggaggaatgagatagagatgccggagtttgtatacgatcacgatgatgatctggagtatcgtccgatgatggattacggtcaagaaagcgatcacgcgagggttttcgccggagccgccgtggattcatcagtctcaagtttctccatgaggtgtatctcatagcgtaaaaggctaaaactccacccactagatatcggatcgtatcttataaaccatataatatacgaatacgattaataatatatcaaaaagattggaaataggtgtgctttttgaaattagtgagcgttttttatggaaaagaaaagaaaagaaagcagttggcgtctggataaagggaaggaggagaatctttagattttttctttaatctgtttttcttttgtcttgattagttttttctttagtggtggtggttgtgagttagtgtgtaaaatgtatattgtcatatgtgaatttaataataagtccttttgtaagatgatc

SEQ ID NO: 3259 - protein, 202 aa, Arabidopsis thaliana
MSSQISEIEQEQLIEKLEIFKIHGRDKRGRKILRIIGKFFPARFLSLDVLKKYLEEKIFPRLGRKPFAVLYVHTGVQRSENFPGISALRAIYDAIPVNVRDNLQEVYFLHPGLQSRLFLATCGRFLFSGGLYGKLRYISRVDYLWEHVRRNEIEMPEFVYDHDDDLEYRPMMDYGQESDHARVFAGAAVDSSVSSFSMRCIS

SEQ ID NO: 3260 - DNA, 1528 bp, Arabidopsis thaliana
atttatcgacatcatcttctcctacattctaggtttcttcttcatttctcctttctctggccaaagttccgactttttgcttctcccagaggctaatcatggacgctgtggcggcgaatttgtttcaatctccttccttactgcgtcaaacttccgaaaggttgatattttcgacgcccaactgtcctggcttcatgcgaattagctccggacctcaatttcgtctcagacaaaactcttctcttaaattctcgagaccatttcaaagcggaacaacttgtgttaaatctcggagaagctttgtggttaaagcttcagcttctggtgatgcttcaacagaatcaatcgcgccgcttcagttgaagtctcctgtgggacagtttctgtcacagatattagtgagccatcctcatcttgttccagcagctgttgaacagcagcttgaacagctccaaattgatcgagacgctgaagaacagagtaaagatgcatcctctgtccttggaacagacattgttctctacaggagaattgctgaagttaaggagaaagagagaagaagggccttggaagagattttgtatgcgttagtggttcagaagttcatggatgctaatgttacacttgtaccatccataacctcttcatctgcggatccatctggtcgagttgatacttggccaactctagatggggaacttgagagacttcactcgcctgaagtttatgagatgattcagaatcatctttccatcattcttaaaaaccgcactgatgatctgacagcagttgcgcagataagcaaacttggagttggacaggtatatgctgcttcggtgatgtatgggtatttcctgaagaggatcgatcaaaggtttcagcttgagaagacgatgaggattctcccaggtgggtcagatgaaggtgagactagcattgagcaagcaggccgagatgtagagagaaacttctatgaagaagcagaagagacttatcaggctgtttcctcaaaccaagacgttggttcgtttgtaggagggatcaatgccagtggcggttttagcagtgatatgaagcaatcccggttaaagacatacgttatgtcctttgatggagaaacccttcaaaggtacgctacaataagatctagagaatcggttgggataattgagaagcatacagaagcattgtttgggaggccagagattgtgataacgccacaaggcactattgattcctcgaaggacgagcatatcaagatcagcttcaagggattgaagaggcttgtgttggaggctgtgacgtttggttctttcctctgggacgtggagagccatgtagactcaaggtatcacttcgtactgaactgaaatggcctctgtggtttatgaggatgtgccacattctttgagagggtttggggatttgttgtttgtaatatatgcgactgtgaactgaccaactaatatcaatacccattttatggtaatactacattcgcgatcagtttgtgttattcttctcgttt

SEQ ID NO: 3261 - protein, 423 aa, Arabidopsis thaliana
MDAVAANLFQSPSLLRQTSERLIFSTPNCPGFMRISSGPQFRLRQNSSLKFSRPFQSGTTCVKSRRSFVVKASASGDASTESIAPLQLKSPVGQFLSQILVSHPHLVPAAVEQQLEQLQIDRDAEEQSKDASSVLGTDIVLYRRIAEVKEKERRRALEEILYALVVQKFMDANVTLVPSITSSSADPSGRVDTWPTLDGELERLHSPEVYEMIQNHLSIILKNRTDDLTAVAQISKLGVGQVYAASVMYGYFLKRIDQRFQLEKTMRILPGGSDEGETSIEQAGRDVERNFYEEAEETYQAVSSNQDVGSFVGGINASGGFSSDMKQSRLKTYVMSFDGETLQRYATIRSRESVGIIEKHTEALFGRPEIVITPQGTIDSSKDEHIKISFKGLKRLVLEAVTFGSFLWDVESHVDSRYHFVLN

SEQ ID NO: 3262 - protein, 391 aa, Arabidopsis thaliana
MRISSGPQFRLRQNSSLKFSRPFQSGTTCVKSRRSFVVKASASGDASTESIAPLQLKSPVGQFLSQILVSHPHLVPAAVEQQLEQLQIDRDAEEQSKDASSVLGTDIVLYRRIAEVKEKERRRALEEILYALVVQKFMDANVTLVPSITSSSADPSGRVDTWPTLDGELERLHSPEVYEMIQNHLSIILKNRTDDLTAVAQISKLGVGQVYAASVMYGYFLKRIDQRFQLEKTMRILPGGSDEGETSIEQAGRDVERNFYEEAEETYQAVSSNQDVGSFVGGINASGGFSSDMKQSRLKTYVMSFDGETLQRYATIRSRESVGIIEKHTEALFGRPEIVITPQGTIDSSKDEHIKISFKGLKRLVLEAVTFGSFLWDVESHVDSRYHFVLN

SEQ ID NO: 3263 - protein, 254 aa, Arabidopsis thaliana
MDANVTLVPSITSSSADPSGRVDTWPTLDGELERLHSPEVYEMIQNHLSIILKNRTDDLTAVAQISKLGVGQVYAASVMYGYFLKRIDQRFQLEKTMRILPGGSDEGETSIEQAGRDVERNFYEEAEETYQAVSSNQDVGSFVGGINASGGFSSDMKQSRLKTYVMSFDGETLQRYATIRSRESVGIIEKHTEALFGRPEIVITPQGTIDSSKDEHIKISFKGLKRLVLEAVTFGSFLWDVESHVDSRYHFVLN

SEQ ID NO: 3264 - DNA, 1235 bp, Arabidopsis thaliana
aaacagagcaagctttccttcttatcccgaacaattcggtctgcttcgtctccctccctttcaattttcgtagacgaaccaacgaaaggtcttttctagtctagtcacttcacttctacggctactgccatggcggcttctttctcttccactgctcccacgacaccggttcttcgattcagagccaactactccaagcctctcctctctctcccagattcgtgtttgaggataatctcttcggcgatatctccctctacacgcttaattgcgtgttcgttcaagacagacaagcttccgctcggtgccggcgtcaatctctccggtggccccgttgtcaagcgctctctacagaagagattggtgataaggtctgctactattgaagaaatagaagcagagaagtctgctattgagactgatgttaaatcaaagatggagaagactattgaaacgcttcggacgagtttcaactccataaggactgggagatccaatgcagcgatgcttgacaagattgaggtggaatactatggaagtccagtaagtttgaaaagcatagcccaaatcagtactccggatggaagttctcttttgctgcaaccatatgacaaatccagcttgaaggctatagagaaagccattgtgaattctgatcttggtgtgacccctaataacgatggagatgttattcgactgtccttgcctcccctcacatctgacagaagaaaggaactatcaaaggttgttgctaaacagtctgaagaagggaaggttgcactgaggaacattaggagagatgccttgaaatcttatgataaactcgagaaggagaagaagctgtcagaagacaacgtgaaggatttgtcaagtgatttgcagaaactaattgatgtatacatgaagaagatagaggagctctacaaacagaaagaaaaggaattgatgaaggtgtgaccataatggttgttaggggaggagacgtaattcaacaatctggtaaaatcccgcaatttccaatgccttcgtttcttttactatttgccctgatgtttccttggggtacaagcatgtcttttgggaattgagagcaactttgtttaaattttcggttgcaaaatttttagaagaagcctctgatattttgtttcttttattaaaggatccctctttgtacagcaaaactcttgttaattttggttcatcaccccaattatcaaatcttatttttggct

SEQ ID NO: 3265 - protein, 275 aa, Arabidopsis thaliana
MAASFSSTAPTTPVLRFRANYSKPLLSLPDSCLRIISSAISPSTRLIACSFKTDKLPLGAGVNLSGGPVVKRSLQKRLVIRSATIEEIEAEKSAIETDVKSKMEKTIETLRTSFNSIRTGRSNAAMLDKIEVEYYGSPVSLKSIAQISTPDGSSLLLQPYDKSSLKAIEKAIVNSDLGVTPNNDGDVIRLSLPPLTSDRRKELSKVVAKQSEEGKVALRNIRRDALKSYDKLEKEKKLSEDNVKDLSSDLQKLIDVYMKKIEELYKQKEKELMKV

SEQ ID NO: 3266 - protein, 173 aa, Arabidopsis thaliana
MEKTIETLRTSFNSIRTGRSNAAMLDKIEVEYYGSPVSLKSIAQISTPDGSSLLLQPYDKSSLKAIEKAIVNSDLGVTPNNDGDVIRLSLPPLTSDRRKELSKVVAKQSEEGKVALRNIRRDALKSYDKLEKEKKLSEDNVKDLSSDLQKLIDVYMKKIEELYKQKEKELMKV

SEQ ID NO: 3267 - protein, 150 aa, Arabidopsis thaliana
MLDKIEVEYYGSPVSLKSIAQISTPDGSSLLLQPYDKSSLKAIEKAIVNSDLGVTPNNDGDVIRLSLPPLTSDRRKELSKVVAKQSEEGKVALRNIRRDALKSYDKLEKEKKLSEDNVKDLSSDLQKLIDVYMKKIEELYKQKEKELMKV

SEQ ID NO: 3268 - DNA, 1535 bp, Arabidopsis thaliana
accaacaacacaaaacttgtactcacaactaaaagaagaactcaaacgcaagacagaaagatcaatggcgagcaacggagttaccaactgtaacgcaaacgccaatgtttggcggttcaaaggaaacggtgcaacgagtgatgcggcggcggtgacgttgagaaagcttgcttttgggatgtttaaaaactgcaccatgaacagtggaaagaccattttgttcccaactcccggcgagccctccgcccattccaacttcaggacttgcccggaagccgaggaagccgttgccgcagctgcacgctccggcatggctaactcttacgcacccagccctggagttttcaaggctagaagggcggtggctgaatatttaaacggagaacttccgacgaagctgaaggccgaggatgtgtatatcaccggaggatgtaaccaagccatagagatcgtgatagattctcttgccggaaatccatccgccaacattctacttccaaggccgggatatcctcactacgatgctcgtgctgtctatagcggcctcgagattcgcaaatacgatcttctccccgagagtgattgggaaatcaatctcgatggcctcgaggcggctgcggatgagaataccgtcgcaatggtaatcatcaaccccaacaatccatgtggaaacgtctacacctacgaccatctcaacaaggtcgcggagatggctagaaaactcggtataatgataatatccgacgaagtatatgatcatgttgtatatggagacaagccttttattcccatggggaagtttgcatcaatagctccggtgatcacgctcggatccatatccaaaggatgggtcaacccaggctggagagttggctggatcgccatgaacgatcctaatggtatctttgtatctacaggggtagttcaagcaatagaggattttcttgatttaactccacagccttcatttattctccaggaagcacttcctgatatattggagaaaacacctaaagagttcttcgagaagaagatcaaagccatgagacgcaacgtcgagctttcatgtgagaggctcaaggatattccttgtctcttttgtcccaagaaacccgaatcttgttcttatttatggttgaagcttgacacatcaatgttgaataatatcaaaaatgattttgatttctgcacgaagctagttagtgaggagagtcttatccttataccaggagtggctctaggggcagagaattgggtgaggatatcgataggaaccgacgaatcagtggtacaagaaatatttgacagactaaaaggtttctatgatcgtcatgccatctccaaggaagctatcaaactcagtggccatgccattaaccagatcgtcgtctctgtcaactgattgtagtagtcctatgccacaagtccacattataatttgtgcgtaattccttaattatcaggaacacaatcaagaaaaatagcattggataatgaaataaagatgtgtgaaaaataaaaggatatttgttttc

SEQ ID NO: 3269 - protein, 466 aa, Arabidopsis thaliana
PTTQNLYSQLKEELKRKTERSMASNGVTNCNANANVWRFKGNGATSDAAAVTLRKLAFGMFKNCTMNSGKTILFPTPGEPSAHSNFRTCPEAEEAVAAAARSGMANSYAPSPGVFKARRAVAEYLNGELPTKLKAEDVYITGGCNQAIEIVIDSLAGNPSANILLPRPGYPHYDARAVYSGLEIRKYDLLPESDWEINLDGLEAAADENTVAMVIINPNNPCGNVYTYDHLNKVAEMARKLGIMIISDEVYDHVVYGDKPFIPMGKFASIAPVITLGSISKGWVNPGWRVGWIAMNDPNGIFVSTGVVQAIEDFLDLTPQPSFILQEALPDILEKTPKEFFEKKIKAMRRNVELSCERLKDIPCLFCPKKPESCSYLWLKLDTSMLNNIKNDFDFCTKLVSEESLILIPGVALGAENWVRISIGTDESVVQEIFDRLKGFYDRHAISKEAIKLSGHAINQIVVSVN

SEQ ID NO: 3270 - protein, 445 aa, Arabidopsis thaliana
MASNGVTNCNANANVWRFKGNGATSDAAAVTLRKLAFGMFKNCTMNSGKTILFPTPGEPSAHSNFRTCPEAEEAVAAAARSGMANSYAPSPGVFKARRAVAEYLNGELPTKLKAEDVYITGGCNQAIEIVIDSLAGNPSANILLPRPGYPHYDARAVYSGLEIRKYDLLPESDWEINLDGLEAAADENTVAMVIINPNNPCGNVYTYDHLNKVAEMARKLGIMIISDEVYDHVVYGDKPFIPMGKFASIAPVITLGSISKGWVNPGWRVGWIAMNDPNGIFVSTGVVQAIEDFLDLTPQPSFILQEALPDILEKTPKEFFEKKIKAMRRNVELSCERLKDIPCLFCPKKPESCSYLWLKLDTSMLNNIKNDFDFCTKLVSEESLILIPGVALGAENWVRISIGTDESVVQEIFDRLKGFYDRHAISKEAIKLSGHAINQIVVSVN

SEQ ID NO: 3271 - protein, 407 aa, Arabidopsis thaliana
MFKNCTMNSGKTILFPTPGEPSAHSNFRTCPEAEEAVAAAARSGMANSYAPSPGVFKARRAVAEYLNGELPTKLKAEDVYITGGCNQAIEIVIDSLAGNPSANILLPRPGYPHYDARAVYSGLEIRKYDLLPESDWEINLDGLEAAADENTVAMVIINPNNPCGNVYTYDHLNKVAEMARKLGIMIISDEVYDHVVYGDKPFIPMGKFASIAPVITLGSISKGWVNPGWRVGWIAMNDPNGIFVSTGVVQAIEDFLDLTPQPSFILQEALPDILEKTPKEFFEKKIKAMRRNVELSCERLKDIPCLFCPKKPESCSYLWLKLDTSMLNNIKNDFDFCTKLVSEESLILIPGVALGAENWVRISIGTDESVVQEIFDRLKGFYDRHAISKEAIKLSGHAINQIVVSVN

SEQ ID NO: 3272 - DNA, 1239 bp, Arabidopsis thaliana
aaactcaaccacaagagaaaccttatcttcttcttcttcttcatcatcaatctctcaagacatgctctcttttttctctaaccagatcgaccggcaaaaagatgtgtctaatgaggaaaaaaccctaaccaatctcgaaaaatctgacggttcacaattccctggcgatgactaccgtccgtccgatcggaaaaactggatggctggtcttacgttggagaaactaactctaaacaagatcgtgtggccaggaacgcatgattcagccaccaacgatatcggaatacctctgatctctcgtcctttagctgaatgccaatcgctctctatctacgagcagctcgtcctcgggacacgtgtcctcgatatccgtgtgcaagaggatcgccaaatctgccacgggattctgacgtcatacgaaattgatgttgtcattgatgacgttatcagattcttgtcggagactcactcggagattgtaatcctggagataaggactgagtttggacacaaagatcctccggggttcgagacttacttggcagacaagttaggtcaattcttgatacatcaagatgatagcttgttcaacaagccggtatcagagattttgccgaaaagggttatatgcatctggaaacctagagagtctccaaagccgagccgtggtggaattctctggaactcagattatctaaaagataattggatcgatacggatcttccatggacgaaatttcagagcaatttgaagcatctgagtgagcagcagccgacatcttctagaaaattcttttaccgggttgagaacacggtcacgccgcaagcagataatccggttgtgtgggttaaaccggtgactgatcggatccgaaaacacgccagactatttatttctcagtgtgtttccaagggatgtggagataagttgcagattttgtccactgatttcatcgaaggagatttcgttgatgcctgtgtcggccttactcacgcaagaatcgaaggaaaggtttgatagaactctggaacgatcgatggttgatctcaagcattggaaccaagattatttgcttttgggttgcgtgtatcttaagttatgctatgtattaaagtgtgtaatttaagttttctatgattgtacattatatctgtttttcgttatccgtcctgtttgaagaatcaaacagagagataaagagaaggcaggggaatttattcagttgctttattttgctc

SEQ ID NO: 3273 - protein, 338 aa, Arabidopsis thaliana
NSTTRETLSSSSSSSSISQDMLSFFSNQIDRQKDVSNEEKTLTNLEKSDGSQFPGDDYRPSDRKNWMAGLTLEKLTLNKIVWPGTHDSATNDIGIPLISRPLAECQSLSIYEQLVLGTRVLDIRVQEDRQICHGILTSYEIDVVIDDVIRFLSETHSEIVILEIRTEFGHKDPPGFETYLADKLGQFLIHQDDSLFNKPVSEILPKRVICIWKPRESPKPSRGGILWNSDYLKDNWIDTDLPWTKFQSNLKHLSEQQPTSSRKFFYRVENTVTPQADNPVVWVKPVTDRIRKHARLFISQCVSKGCGDKLQILSTDFIEGDFVDACVGLTHARIEGKV

SEQ ID NO: 3274 - protein, 318 aa, Arabidopsis thaliana
MLSFFSNQIDRQKDVSNEEKTLTNLEKSDGSQFPGDDYRPSDRKNWMAGLTLEKLTLNKIVWPGTHDSATNDIGIPLISRPLAECQSLSIYEQLVLGTRVLDIRVQEDRQICHGILTSYEIDVVIDDVIRFLSETHSEIVILEIRTEFGHKDPPGFETYLADKLGQFLIHQDDSLFNKPVSEILPKRVICIWKPRESPKPSRGGILWNSDYLKDNWIDTDLPWTKFQSNLKHLSEQQPTSSRKFFYRVENTVTPQADNPVVWVKPVTDRIRKHARLFISQCVSKGCGDKLQILSTDFIEGDFVDACVGLTHARIEGKV

SEQ ID NO: 3275 - protein, 272 aa, Arabidopsis thaliana
MAGLTLEKLTLNKIVWPGTHDSATNDIGIPLISRPLAECQSLSIYEQLVLGTRVLDIRVQEDRQICHGILTSYEIDVVIDDVIRFLSETHSEIVILEIRTEFGHKDPPGFETYLADKLGQFLIHQDDSLFNKPVSEILPKRVICIWKPRESPKPSRGGILWNSDYLKDNWIDTDLPWTKFQSNLKHLSEQQPTSSRKFFYRVENTVTPQADNPVVWVKPVTDRIRKHARLFISQCVSKGCGDKLQILSTDFIEGDFVDACVGLTHARIEGKV

SEQ ID NO: 3276 - DNA, 1323 bp, Arabidopsis thaliana
aactttcgtttccacttcagaccgatctcataatttgatcgcaaaactgatcaaatagcgtaaaattgaaattcaaattttcgccggagctccgtcggataaaacaataagcgacgtgcggcgatggaatctcacggttccggtctccggcgagttctgttattgtcgttctgtgtcgctgggatctgggcagcttacatataccaaggcattcttcaagagaccttgtcgacgaagaaatttggtgaagatgggaagagattcgagcatcttgcatttctgaatttggctcagaatgtaatctgcttggtttggtcttatataatgattaagctctggtccaacggaggttctggtggagccccatggtggacgtattggagtgctggcattactaataccattggtcctgctatgggcattgaagctttaaagtatattagttacccagctcaggtccttgcaaaatcttccaaaatgattccagttatgctgatgggctccttagtttatggcataagatacactttgcctgagtatctttgcacctttcttgttgccggaggagtatctatgtttgcccttcttaagacaagctctaaaaccatcagcaagctagcacatcccaatgcaccccttggttacgggctttgcttcttaaaccttgcctttgatggattcacaaacgcaacccaggattccattaccgcaaggtaccccaaaactaacgcatgggacataatgctgggaatgaatttatggggaaccatatacaacatggtctacatgtttggattgccacatgggagcggatttgaagctgtgcagttctgcaagcaacaccctgaggcagcatgggacattcttatgtactgtttatgcggtgcagtaggccaaaacttcatcttcttgacaataagcagattcgggtctctagctaacacgaccataaccacaaccaggaagtttgtaagcatcgtggtatcttcagttttgagcgggaatccgttatcttccaaacaatggggatgtgtgtcgatggtgttcggtggattgtcttaccaaatttacctgaaatggaggaagctgcagagaatgcagaagaagaaaaaggcctgaagctgagattggggatcaaaatatttaattcttcaagaaaattgtttttgatttggaaactttttacttccaaatatgtctgaaagttagagagaagaaagcttagtccattagcaaaatgtaaactaatgcattagaagaaacttatatatatcaaaccaaaagacaaatcatatatttccactcatatatatttgtcttaac

SEQ ID NO: 3277 - protein, 331 aa, Arabidopsis thaliana
MESHGSGLRRVLLLSFCVAGIWAAYIYQGILQETLSTKKFGEDGKRFEHLAFLNLAQNVICLVWSYIMIKLWSNGGSGGAPWWTYWSAGITNTIGPAMGIEALKYISYPAQVLAKSSKMIPVMLMGSLVYGIRYTLPEYLCTFLVAGGVSMFALLKTSSKTISKLAHPNAPLGYGLCFLNLAFDGFTNATQDSITARYPKTNAWDIMLGMNLWGTIYNMVYMFGLPHGSGFEAVQFCKQHPEAAWDILMYCLCGAVGQNFIFLTISRFGSLANTTITTTRKFVSIVVSSVLSGNPLSSKQWGCVSMVFGGLSYQIYLKWRKLQRMQKKKKA

SEQ ID NO: 3278 - protein, 264 aa, Arabidopsis thaliana
MIKLWSNGGSGGAPWWTYWSAGITNTIGPAMGIEALKYISYPAQVLAKSSKMIPVMLMGSLVYGIRYTLPEYLCTFLVAGGVSMFALLKTSSKTISKLAHPNAPLGYGLCFLNLAFDGFTNATQDSITARYPKTNAWDIMLGMNLWGTIYNMVYMFGLPHGSGFEAVQFCKQHPEAAWDILMYCLCGAVGQNFIFLTISRFGSLANTTITTTRKFVSIVVSSVLSGNPLSSKQWGCVSMVFGGLSYQIYLKWRKLQRMQKKKKA

SEQ ID NO: 3279 - protein, 234 aa, Arabidopsis thaliana
MGIEALKYISYPAQVLAKSSKMIPVMLMGSLVYGIRYTLPEYLCTFLVAGGVSMFALLKTSSKTISKLAHPNAPLGYGLCFLNLAFDGFTNATQDSITARYPKTNAWDIMLGMNLWGTIYNMVYMFGLPHGSGFEAVQFCKQHPEAAWDILMYCLCGAVGQNFIFLTISRFGSLANTTITTTRKFVSIVVSSVLSGNPLSSKQWGCVSMVFGGLSYQIYLKWRKLQRMQKKKKA

SEQ ID NO: 3280 - DNA, 1318 bp, Arabidopsis thaliana
tactcatgtcccacttacgacgacgtcgttttaaactctctctctgtgctcttccagtctctatcgatcgccttctgaattttccggcggaaaagcaaatgtccgttaacgacagtatcgatcctcggttcgtattccacgttgaagatgaatctttgcgtttccgtgtgggagattcaggtactaagatccgggagctcgaaaccgtcggcgatcgccatttcagaacccagcaaggtttctgcggaaatagaattgagaaagatgaaaccatgtattccgatggagatgatgaagagtacgacgtttctatccgaagacgaactgctctgattcagcctggtattgattccggtaacaattatgattctgctgcagctgaagaaaccaacagagaaagtaaaaatccagttggttgggaactggttgtgagagaagatggggaaggtaattcaacgattgatcgacatgaaatggagtttaaggtgaggatcactaaaccagatggtaacgtatctaattcccaccgtaacacgcaacaaaagcgagattttgcttctgtggagaaggagagagtcactactactagtgtcagctcttgggagtctctcaaggccatcctctctgatcctgtcaccggagccttgatgaatgatgctaccatactgccttgtggacattcttttggcgccgggggattaaaagaagttaaaaaaatgaaagcatgtttcacatgttcccaacctactttagaaggatcagaaaagccaaatctctctctcagaattgtagttcatgctttccgccaagaagaagattcagatcatattcacacgctgaaaagaaggaaagaaaggtcggatcagaagagaagtttctgtatcccaaacatcactgaaactcctaagagtagccgaggcatacagtttcctttctccattggagatcatattatcatagagggaaacaaaaggacgcctccaaggtttgtcggacgcatagctgttataatgacacaatgcttaaatggatggtacgttgtgaagacagtggacaattcagagtctatcaagttacaacattgctcacttgccaagatttcagacaattcatctacgaaggtaacagtagctgaaatgccaccgtcttggctctaactcgtagaaagcaaatatctgtggctgcagaaatcagcatctgtaattttttcattcagagaaagtagttactacgtttcattatgtaatataggaacgagacaacaattttctgtactaaatccagtgttttcattcatacaaggaaactttgctcatcg

SEQ ID NO: 3281 - protein, 384 aa, Arabidopsis thaliana
LMSHLRRRRFKLSLCALPVSIDRLLNFPAEKQMSVNDSIDPRFVFHVEDESLRFRVGDSGTKIRELETVGDRHFRTQQGFCGNRIEKDETMYSDGDDEEYDVSIRRRTALIQPGIDSGNNYDSAAAEETNRESKNPVGWELVVREDGEGNSTIDRHEMEFKVRITKPDGNVSNSHRNTQQKRDFASVEKERVTTTSVSSWESLKAILSDPVTGALMNDATILPCGHSFGAGGLKEVKKMKACFTCSQPTLEGSEKPNLSLRIVVHAFRQEEDSDHIHTLKRRKERSDQKRSFCIPNITETPKSSRGIQFPFSIGDHIIIEGNKRTPPRFVGRIAVIMTQCLNGWYVVKTVDNSESIKLQHCSLAKISDNSSTKVTVAEMPPSWL

SEQ ID NO: 3282 - protein, 383 aa, Arabidopsis thaliana
MSHLRRRRFKLSLCALPVSIDRLLNFPAEKQMSVNDSIDPRFVFHVEDESLRFRVGDSGTKIRELETVGDRHFRTQQGFCGNRIEKDETMYSDGDDEEYDVSIRRRTALIQPGIDSGNNYDSAAAEETNRESKNPVGWELVVREDGEGNSTIDRHEMEFKVRITKPDGNVSNSHRNTQQKRDFASVEKERVTTTSVSSWESLKAILSDPVTGALMNDATILPCGHSFGAGGLKEVKKMKACFTCSQPTLEGSEKPNLSLRIVVHAFRQEEDSDHIHTLKRRKERSDQKRSFCIPNITETPKSSRGIQFPFSIGDHIIIEGNKRTPPRFVGRIAVIMTQCLNGWYVVKTVDNSESIKLQHCSLAKISDNSSTKVTVAEMPPSWL

SEQ ID NO: 3283 - protein, 352 aa, Arabidopsis thaliana
MSVNDSIDPRFVFHVEDESLRFRVGDSGTKIRELETVGDRHFRTQQGFCGNRIEKDETMYSDGDDEEYDVSIRRRTALIQPGIDSGNNYDSAAAEETNRESKNPVGWELVVREDGEGNSTIDRHEMEFKVRITKPDGNVSNSHRNTQQKRDFASVEKERVTTTSVSSWESLKAILSDPVTGALMNDATILPCGHSFGAGGLKEVKKMKACFTCSQPTLEGSEKPNLSLRIVVHAFRQEEDSDHIHTLKRRKERSDQKRSFCIPNITETPKSSRGIQFPFSIGDHIIIEGNKRTPPRFVGRIAVIMTQCLNGWYVVKTVDNSESIKLQHCSLAKISDNSSTKVTVAEMPPSWL

SEQ ID NO: 3284 - DNA, 1214 bp, Arabidopsis thaliana
tgctttatataattaattccatctccaatgttatctccatgcgaactaaaacaatagaagaagcagctttcatctcccaatgtcgtctaacgaaatcgcccctgtggatcctaccgatgtttttcttgatatggatcccatcctcccggaagattcgccggcaaccagcttgttcacgagacccctcgctttgaaagaacaatatgtgtgggagccctatgacagcgagaagcttccggagacattagcctcagggattcaaaggtttcttcgtgtagcaaacttggttgagtctgatgatcctcgtgttgcttatctatgccgtttttatacttttgaagaagctcaccgcattgacagtagatctaacggaagaggtgtacgacagttcaaaaattctcttcttcgaaggctagagaaggatgacgagtttactataagaagaagaaaggaaataaatgatcataaggaactcaaacgtgtttatcatgcttacaatgaatacatcatcagacatggtgcatcattcaatttggataatagtcagcaagagaagttgataaatgcacgcagcattgcttctgttttatatgaaattctaaggaaaatcgaatcaagtatgggccgtgcctcaaccccagaaagtatacaattaaaccgggatgaggagattggtgagctccttgatatggacacctcaatggaggagaccaacaagataaattcggacgagacctttgtcgaccaaaaagccgagttggtagttgagaagagcaaagtcttagaggacgagagactaactcaaatgtttcaaggagaccaccaatatctcacccaagatgaaaaagatgacatatacaaagaggaggttcaaataaagaaagacaaacgttttgcatatggatcaatgaaggcggttccatctttgttttacgaagataagtatctcgagacacaagaaaagttgaacaagctggagaagaagattgaagagatggagctgaaactcaaggatgtcgacttttggactaacatgatgcaaaacatgtttccagaccaagtacctccatctatgagagcaaaccaaaccgataacaacaaaaacgacaaactaagcctttaaattttatcttctatctagttgttctattcctatggtttgtaagacactaaatatttacatttaagttatctttgaacttatgttttcgaat

SEQ ID NO: 3285 - protein, 347 aa, Arabidopsis thaliana
MSSNEIAPVDPTDVFLDMDPILPEDSPATSLFTRPLALKEQYVWEPYDSEKLPETLASGIQRFLRVANLVESDDPRVAYLCRFYTFEEAHRIDSRSNGRGVRQFKNSLLRRLEKDDEFTIRRRKEINDHKELKRVYHAYNEYIIRHGASFNLDNSQQEKLINARSIASVLYEILRKIESSMGRASTPESIQLNRDEEIGELLDMDTSMEETNKINSDETFVDQKAELVVEKSKVLEDERLTQMFQGDHQYLTQDEKDDIYKEEVQIKKDKRFAYGSMKAVPSLFYEDKYLETQEKLNKLEKKIEEMELKLKDVDFWTNMMQNMFPDQVPPSMRANQTDNNKNDKLSL

SEQ ID NO: 3286 - protein, 330 aa, Arabidopsis thaliana
MDPILPEDSPATSLFTRPLALKEQYVWEPYDSEKLPETLASGIQRFLRVANLVESDDPRVAYLCRFYTFEEAHRIDSRSNGRGVRQFKNSLLRRLEKDDEFTIRRRKEINDHKELKRVYHAYNEYIIRHGASFNLDNSQQEKLINARSIASVLYEILRKIESSMGRASTPESIQLNRDEEIGELLDMDTSMEETNKINSDETFVDQKAELVVEKSKVLEDERLTQMFQGDHQYLTQDEKDDIYKEEVQIKKDKRFAYGSMKAVPSLFYEDKYLETQEKLNKLEKKIEEMELKLKDVDFWTNMMQNMFPDQVPPSMRANQTDNNKNDKLSL

SEQ ID NO: 3287 - DNA, 1610 bp, Arabidopsis thaliana
agaagattcttaaatctcatttctgcggcgtaggtgaagtcttagcgataagctttgtttcttcttcttcttcttctttacccatggatttttaacgaacaagagaagagaagaaccaagttttcttcgaaaggattgaactttgtttctttctcttcagctacaacaaccaaaaaatgatcaagctttgcttcatgacttctcatggttattcaatccctggccttggtcttcctcaagacctctgcaacaccgaaatcatcaagcagaatagccggtctcatctggtgaatcccggagcaagacaagagatcatacctgcaagctccttcaatctgaatacagaactcttggaaccatggaaaccggtttcttcatttagccaattcgtggagattgattcagccatgatgaaacctctgctcatggatgttcatgagacggcaccagaatctctgattttgagctttggaatcgctgataagtttgcaagacaagaaaaggtgatggagtttcttctgtctcagtcagaggagttcaaggaaaaaggattcgatatgtcgctgttaaatgaattgatggagtttgagtctatgaaatccagttctcagctacgaccgtatgatacttcctctgttctttacttgaatcaagaattagggaaaccggttttggatctcgttagggatatgatggagaatccagagttctctgtgcgatcgaatggtcatgttctgttctcttcaagtagcaatcctgagttgaatgatctactttctattgcttccgagttcaatttgtcaaggaattcaacaacaaaatggagacagctctcaccgcttatcccacactttcagaggtttgaaagtgacgtatttacaccggctaagctgaaagcagttacagtgctagcacctttgaagagtcctgagaaaagcaggctcaagtcaccaaggaaacacaacacgaagcgaaaagctaaagagagggacctatacaaaagaaatcatctccacgcttacgagagccttctctctttaatgataggcaatgatcatcgacacaaacacacaacagtactctctttacagaaatcatgtggagagctctcagagcttctgactcagttctctatcactgctgctggaactggaatcgctgtgctcttttctgtcgtatgtagccttgcttcaaggcgtgtacccttttgcgcaaataagttcttcgacactgggcttggtttgagtttggtaatactgtcatgggctgtgaatagactcagggaggtgattgttcatgtcaataggaaagcgaacaagccatgttcaagtttgaaagatgacgaaatcataaacagtgtggagagaagtatgaaggaggtttactacagagctgcaacggtaatcgcggtgtttgcgcttaggtttgcatgttgaaaaatcggggtgagaggtaaaaatcttgatttactactccatggaaagcttctaaaaggtcgtttgtaaatgactaaaacttgtttagtagctgtaaatgtgaaagatgatattatgtggtagaacctaagattaagaggtgaagaattttgaagagaataaatgttttgcaag

SEQ ID NO: 3288 - protein, 419 aa, Arabidopsis thaliana
MIKLCFMTSHGYSIPGLGLPQDLCNTEIIKQNSRSHLVNPGARQEIIPASSFNLNTELLEPWKPVSSFSQFVEIDSAMMKPLLMDVHETAPESLILSFGIADKFARQEKVMEFLLSQSEEFKEKGFDMSLLNELMEFESMKSSSQLRPYDTSSVLYLNQELGKPVLDLVRDMMENPEFSVRSNGHVLFSSSSNPELNDLLSIASEFNLSRNSTTKWRQLSPLIPHFQRFESDVFTPAKLKAVTVLAPLKSPEKSRLKSPRKHNTKRKAKERDLYKRNHLHAYESLLSLMIGNDHRHKHTTVLSLQKSCGELSELLTQFSITAAGTGIAVLFSVVCSLASRRVPFCANKFFDTGLGLSLVILSWAVNRLREVIVHVNRKANKPCSSLKDDEIINSVERSMKEVYYRAATVIAVFALRFAC

SEQ ID NO: 3289 - protein, 413 aa, Arabidopsis thaliana
MTSHGYSIPGLGLPQDLCNTEIIKQNSRSHLVNPGARQEIIPASSFNLNTELLEPWKPVSSFSQFVEIDSAMMKPLLMDVHETAPESLILSFGIADKFARQEKVMEFLLSQSEEFKEKGFDMSLLNELMEFESMKSSSQLRPYDTSSVLYLNQELGKPVLDLVRDMMENPEFSVRSNGHVLFSSSSNPELNDLLSIASEFNLSRNSTTKWRQLSPLIPHFQRFESDVFTPAKLKAVTVLAPLKSPEKSRLKSPRKHNTKRKAKERDLYKRNHLHAYESLLSLMIGNDHRHKHTTVLSLQKSCGELSELLTQFSITAAGTGIAVLFSVVCSLASRRVPFCANKFFDTGLGLSLVILSWAVNRLREVIVHVNRKANKPCSSLKDDEIINSVERSMKEVYYRAATVIAVFALRFAC

SEQ ID NO: 3290 - protein, 342 aa, Arabidopsis thaliana
MMKPLLMDVHETAPESLILSFGIADKFARQEKVMEFLLSQSEEFKEKGFDMSLLNELMEFESMKSSSQLRPYDTSSVLYLNQELGKPVLDLVRDMMENPEFSVRSNGHVLFSSSSNPELNDLLSIASEFNLSRNSTTKWRQLSPLIPHFQRFESDVFTPAKLKAVTVLAPLKSPEKSRLKSPRKHNTKRKAKERDLYKRNHLHAYESLLSLMIGNDHRHKHTTVLSLQKSCGELSELLTQFSITAAGTGIAVLFSVVCSLASRRVPFCANKFFDTGLGLSLVILSWAVNRLREVIVHVNRKANKPCSSLKDDEIINSVERSMKEVYYRAATVIAVFALRFAC

SEQ ID NO: 3291 - DNA, 1203 bp, Arabidopsis thaliana
aaaccaacggtgggagaggaagcagagagagagaaaataaaaaaaacagaaaacgagaaaaccagagattcatcaattcattgattctttagttcttcttcgtccgtctaaccttagaaacttatagctacagcgagagaagacgaagaagaataagaataagaagaaagaaaattgaatggcggcaagagccaacaacaaatacacctctatcaacttcaaccacatccttcacaaagatcctccttcatcttcttcatcttcctcctctgcttcttattcctccgtcgctcgttccaatggccgtatgctcgtcctcaccaaatcttcccccaaacctctaagatctccctccgctgctcccaccaccaccaccactacgaccgcacctcctatctctacagctccgaggattccttcaaatcaagccatctctgatccagatccgagtcagatctctcttcgtcccttaggtcatacaggatctagttcctcgctttcttttccaattcggactcctgaaatcaacaaggctccggaggtaaatgctccaactccggtttcattgtccccgaaacctgatcggttcgtgccgccgcatcttaggccaggttttgttcggaaagacgagaaacctggactcaactcttctcgagttagagatccgaatccgaatctgaatcagagattgcctaaccaggaacagccacggcaggaatatttcggttatggacagcccggacggcccaaatcgggcgggtatgagaggatccgtacggatccgagaataaccggaaaccgacccggcacctccggatgatgagcttgctgggatgatgcctagttaactcactcgatgatggaggtggaactttacttacttctgaacgttgaaaacagtgacttgtcatttctcacttcttttgatcaaaccagagattatcaaagaccaacccccaagattcagtagatttgtagaagaatgttgttttgggatcaggctgggtgatactatgacacaaataacacttgttctcttacttgtctcactcatgtttcaaaaactttgtttatgtaactataattctgttatagcacgtgttgtttaggtattaatctatagattctattaccatttggtttataagaaaaacatttgtttctggatgtatgtttcagcaaaagaaatttccacttttgttt

SEQ ID NO: 3292 - protein, 213 aa, Arabidopsis thaliana
MAARANNKYTSINFNHILHKDPPSSSSSSSSASYSSVARSNGRMLVLTKSSPKPLRSPSAAPTTTTTTTAPPISTAPRIPSNQAISDPDPSQISLRPLGHTGSSSSLSFPIRTPEINKAPEVNAPTPVSLSPKPDRFVPPHLRPGFVRKDEKPGLNSSRVRDPNPNLNQRLPNQEQPRQEYFGYGQPGRPKSGGYERIRTDPRITGNRPGTSG

SEQ ID NO: 3293 - protein, 170 aa, Arabidopsis thaliana
MLVLTKSSPKPLRSPSAAPTTTTTTTAPPISTAPRIPSNQAISDPDPSQISLRPLGHTGSSSSLSFPIRTPEINKAPEVNAPTPVSLSPKPDRFVPPHLRPGFVRKDEKPGLNSSRVRDPNPNLNQRLPNQEQPRQEYFGYGQPGRPKSGGYERIRTDPRITGNRPGTSG

SEQ ID NO: 3294 - DNA, 1498 bp, Arabidopsis thaliana
gaagtgtgaactcatatcttcgaagagattgagacagagtttagaaaatctcttacaaatctagtttctacaacctcaactaacattgtccaaatctgtctctatcctctgttttatttttttcttccggtggtacaaaaattcacaatgaactgtatttatcacaattaatgaccgattgcttcttcacctactctctctctctctctctctctctttggaagtaaccaaacaagcctatatgctgctgatcccatctaggggccaagcctctcttctttaaaaacttttgacttccattttcttgagaattcccctttctgggttcttgatttggaaagatgggtaacaagataatctcaatgatgaagaaagatagcaaagatggaggaggaggaggatctaagagcaagagaatgaatcggtctcagaggaaattacttgctgatgaagagatgttgcatcgtcgagctctttccatggcgattcatcaagctcagctttctcagagatttgatggatctatgtctagacgggtcgggtctactagtactaggaaacgtactctctctgacccgttttctaatggcaagcaggtacctgatttttcagagagcttgatagtgaagaaatttgttctggtgcacggtgaaggatttggggcatggtgttggtacaaaatggttgcttcattggaagagtcaggactgtctcctgttacagttgacctcactgggtgtggatttaatatgactgacacaaatactgtctctaccttggaggaatattcaaaaccgttgatcgatctcctcgaaaatctccccgaagaagagaaggttattctagtgggtcacagtactggaggtgcttccatttcatatgcgttagagaggtttccagagaaaatctctaaagctatattcgtatgtgcaacaatggtttctgatggccaaagaccttttgatgttttctctgaagagcttggttccgcagagcggttcatgaaagagtcgcagttcttgatttatgggaacggtaaagacaagcctcctacggggttcatgtttgagaagccacatatgaaaggcttgtatttcaatcaatcacccaacaaggatatagcattggcgatgatctcaatgagacctgtaccactcggaccaatgatggagaaagtatctctaaccgcagaaagatatgggaaagggagaagattctacgtccagacgctagatgaccgtgcactttcaccagatgttcaagagaagttagtgagagagaacagccctgaaggagtcttcaagatcaaaggaagtgatcattgccctttcttctcaaagcctcaatctctccacaaaatccttctggagattgcacagattccttaacaaagctctgagattattatacttttgaaaacgagaatacactttccatttaatcctcaaaacatcttttgtatgcaattctagaatcaatgatacaagatcgtatttat

SEQ ID NO: 3295 - protein, 348 aa, Arabidopsis thaliana
MGNKIISMMKKDSKDGGGGGSKSKRMNRSQRKLLADEEMLHRRALSMAIHQAQLSQRFDGSMSRRVGSTSTRKRTLSDPFSNGKQVPDFSESLIVKKFVLVHGEGFGAWCWYKMVASLEESGLSPVTVDLTGCGFNMTDTNTVSTLEEYSKPLIDLLENLPEEEKVILVGHSTGGASISYALERFPEKISKAIFVCATMVSDGQRPFDVFSEELGSAERFMKESQFLIYGNGKDKPPTGFMFEKPHMKGLYFNQSPNKDIALAMISMRPVPLGPMMEKVSLTAERYGKGRRFYVQTLDDRALSPDVQEKLVRENSPEGVFKIKGSDHCPFFSKPQSLHKILLEIAQIP

SEQ ID NO: 3296 - protein, 341 aa, Arabidopsis thaliana
MMKKDSKDGGGGGSKSKRMNRSQRKLLADEEMLHRRALSMAIHQAQLSQRFDGSMSRRVGSTSTRKRTLSDPFSNGKQVPDFSESLIVKKFVLVHGEGFGAWCWYKMVASLEESGLSPVTVDLTGCGFNMTDTNTVSTLEEYSKPLIDLLENLPEEEKVILVGHSTGGASISYALERFPEKISKAIFVCATMVSDGQRPFDVFSEELGSAERFMKESQFLIYGNGKDKPPTGFMFEKPHMKGLYFNQSPNKDIALAMISMRPVPLGPMMEKVSLTAERYGKGRRFYVQTLDDRALSPDVQEKLVRENSPEGVFKIKGSDHCPFFSKPQSLHKILLEIAQIP

SEQ ID NO: 3297 - protein, 340 aa, Arabidopsis thaliana
MKKDSKDGGGGGSKSKRMNRSQRKLLADEEMLHRRALSMAIHQAQLSQRFDGSMSRRVGSTSTRKRTLSDPFSNGKQVPDFSESLIVKKFVLVHGEGFGAWCWYKMVASLEESGLSPVTVDLTGCGFNMTDTNTVSTLEEYSKPLIDLLENLPEEEKVILVGHSTGGASISYALERFPEKISKAIFVCATMVSDGQRPFDVFSEELGSAERFMKESQFLIYGNGKDKPPTGFMFEKPHMKGLYFNQSPNKDIALAMISMRPVPLGPMMEKVSLTAERYGKGRRFYVQTLDDRALSPDVQEKLVRENSPEGVFKIKGSDHCPFFSKPQSLHKILLEIAQIP

SEQ ID NO: 3298 - DNA, 967 bp, Arabidopsis thaliana
atcttcaatttcgaatcgataaccctaatttctcacagacgagcaagagaaagagccaaagccgtttcttcaggtaacttgaggatgtcgcgtgtgtatgttggtaatttggatccgcgagttactgaacgtgaactcgaggatgagtttcgttcctttggtgtgatcaggagtgtctgggttgctagaagacctcctggttacgcttttcttgattttgaagattcaagagatgcccgtgacgccatccgtgaagtagatggcaagaatggatggagggtagagcagtctcataaccgtggtggtggtggaggtcgtggtggtggtcgtggaggaggtgatggtggtcgtggacgtggtggttctgatttgaagtgctatgagtgtggtgagtctggtcactttgcacgtgaatgtcgttctcgtggtggttctggtggtaggcgtcgtagccgcagccgtagtcgcagtcctcctagatacagaaagagtcctacctatggaggacgaagaagttacagccctcgtgctagatctcctcctcctccaagacgtcgtagtccttctcctcgtggtcgcaactacagtaggtcaccaccaccttatagagcacgtgacgaggtgccatatgctaatggaaatggtctgaaagatgtgcgcagaagccggagctgagtgttacttgtctagatagcaaattatgggatcaggagacaactatttgcttgtgacgtcaagaggagaggaaattagtatctgtgaatttcactaagagaatatgttttagctgtgtggtggattggatatgcttgctgcttttgaattgctggaaagcttcttattgcgtttggattatgaagccatagttgtatctgccgttaggtaaagtacttttaaatatctacccatgttcttaaaagacataaacaaaagctctgctaaaaacctatgcattttctttgttttt

SEQ ID NO: 3299 - protein, 224 aa, Arabidopsis thaliana
IFNFESITLISHRRARERAKAVSSGNLRMSRVYVGNLDPRVTERELEDEFRSFGVIRSVWVARRPPGYAFLDFEDSRDARDAIREVDGKNGWRVEQSHNRGGGGGRGGGRGGGDGGRGRGGSDLKCYECGESGHFARECRSRGGSGGRRRSRSRSRSPPRYRKSPTYGGRRSYSPRARSPPPPRRRSPSPRGRNYSRSPPPYRARDEVPYANGNGLKDVRRSRS

SEQ ID NO: 3300 - protein, 196 aa, Arabidopsis thaliana
MSRVYVGNLDPRVTERELEDEFRSFGVIRSVWVARRPPGYAFLDFEDSRDARDAIREVDGKNGWRVEQSHNRGGGGGRGGGRGGGDGGRGRGGSDLKCYECGESGHFARECRSRGGSGGRRRSRSRSRSPPRYRKSPTYGGRRSYSPRARSPPPPRRRSPSPRGRNYSRSPPPYRARDEVPYANGNGLKDVRRSRS

SEQ ID NO: 3301 - DNA, 1159 bp, Arabidopsis thaliana
actttgatcacttttcaacttcctaaatctcttcacagttactttcgattttccgatttcgtagcttcgaaaatgttctccagcagccaattcgagcctaattccggcttctccggcggcggattcatgtcttctcaaccttctcaagcctacgaatcctcctcctccaccgctaagaatcgtgattttcaaggtcttgttccagtgacggtgaagcaaatcaccgaatgtttccaatccagtggtgaaaaatctggtctcgtcatcaatggaatctcactaacaaacgtttcacttgttggattagtgtgtgacaaagatgaatctaaagtcacagaagttagattcactcttgatgatggaacaggacgaattgactgtaaaagatgggtgagtgaaactttcgacgctagagaaatggagtctgtgcgagatggaacttatgtgcgcctcagtggtcatttgaagacttttcagggcaaaactcagcttcttgttttctctgtgaggcctattatggacttcaatgaggttacttttcactacattgagtgtatacacttctactcccagaactctgaatcacagagacaacaagtcggtgatgtcactcagtcagttaacaccacatttcaaggtggatcaaacacaaaccaggcaacactattgaaccctgtggtttcttctcaaaacaatgatggcaatgggcgcaagaacttggatgatatgattctagactatctaaagcaacctgcttgcactgcaagacaacaggggatacatatcgatgaaattgctcagcagttgaagatcccaaaaaacaagctagagggcgttgttcaatcactggaaggagatggtctaatatactcgacaatcgatgagtatcacttcaagcacgtggagctttgatctatctaatagtcatctagagtttggttaatccgtagatagagtcattagtattgtctggtgatttaaaagatgtttcaatatccagaactattaggatcacgtctagttcacttctgaaactttggtagtgtcatgcttaattctggtgttggattgtttccttgtttctttcaatttggtaagccaacttcaaaagttcaaagttgattttttgtttaatctgaaactatatttggtttaagac

SEQ ID NO: 3302 - protein, 303 aa, Arabidopsis thaliana
TLITFQLPKSLHSYFRFSDFVASKMFSSSQFEPNSGFSGGGFMSSQPSQAYESSSSTAKNRDFQGLVPVTVKQITECFQSSGEKSGLVINGISLTNVSLVGLVCDKDESKVTEVRFTLDDGTGRIDCKRWVSETFDAREMESVRDGTYVRLSGHLKTFQGKTQLLVFSVRPIMDFNEVTFHYIECIHFYSQNSESQRQQVGDVTQSVNTTFQGGSNTNQATLLNPVVSSQNNDGNGRKNLDDMILDYLKQPACTARQQGIHIDEIAQQLKIPKNKLEGVVQSLEGDGLIYSTIDEYHFKHVEL

SEQ ID NO: 3303 - protein, 279 aa, Arabidopsis thaliana
MFSSSQFEPNSGFSGGGFMSSQPSQAYESSSSTAKNRDFQGLVPVTVKQITECFQSSGEKSGLVINGISLTNVSLVGLVCDKDESKVTEVRFTLDDGTGRIDCKRWVSETFDAREMESVRDGTYVRLSGHLKTFQGKTQLLVFSVRPIMDFNEVTFHYIECIHFYSQNSESQRQQVGDVTQSVNTTFQGGSNTNQATLLNPVVSSQNNDGNGRKNLDDMILDYLKQPACTARQQGIHIDEIAQQLKIPKNKLEGVVQSLEGDGLIYSTIDEYHFKHVEL

SEQ ID NO: 3304 - protein, 261 aa, Arabidopsis thaliana
MSSQPSQAYESSSSTAKNRDFQGLVPVTVKQITECFQSSGEKSGLVINGISLTNVSLVGLVCDKDESKVTEVRFTLDDGTGRIDCKRWVSETFDAREMESVRDGTYVRLSGHLKTFQGKTQLLVFSVRPIMDFNEVTFHYIECIHFYSQNSESQRQQVGDVTQSVNTTFQGGSNTNQATLLNPVVSSQNNDGNGRKNLDDMILDYLKQPACTARQQGIHIDEIAQQLKIPKNKLEGVVQSLEGDGLIYSTIDEYHFKHVEL

SEQ ID NO: 3305 - DNA, 1271 bp, Arabidopsis thaliana
ctctcactgcaagagcgcgaaacagagtaaggctcactttgttttagctttctcctctacttcgataatgccgtttgctccttccttgttgtcatcgtcttcctcagtctctcaatttcttcccagattccccaacgcgactagattcaatgtaactccacggagcagagccgccaccgtcgtcgcggcatccgtcaccgacctagccggggtcgacagtacaacaatcgccgtactcggtggaggatccgtagcagcactcgcggcgatggtttccttaacggatccggagaggaggcggaaattgcaggcggaggaagttggcggaggcgataaggaggttgtgagggagtatttcaatagcacggggttcgagaggtggaggaagatctacggtgagactgatgaagtgaatcgagtacagaaggatattcgactcggtcatgctaagacggtggagaacacgatgcttatgctgactgaagatagatccttggccggtgtcacggtttgcgacgccggttgtggaaccggtttgctctcgattccacttgctaaggaaggagcaatcgtctctgcttccgatatttctgctgctatggttgctgaagctgagatgaaggcaaaggcacaactaccatcagagaatttaccaaaatttgaggtgaatgatttggagagcctaactgggaagtatgataccgttgtatgtctcgacgtgttgatacattacccgcagaacaaagcagacggaatgatcgcacatcttgcttctttagcagagaagagagtgattctgagttttgctccaaagactttttactatgatatcttaaagagaattggagagcttttcccagggccatcaaaagctacaagggcgtatctacactcggaggcggatgtggaaagagcgttgggtaaagtcggctggaaaatcagcaagagaggactcactaccacacagttctacttctctaggctcatcgaagctgttccaatgtagaccaatttgaaaactagtagatctctgtatagcatattccgagaaggattttcgtggaagacatgcagattctcctaaattcgctgaagagattctcataaactcttcttatatactaggaggacggtctgtacaaacttgcacttctgcagaccctaattgataattggccaaaatgttcaatgtaatcaacgttatttgttgtgctgcttaactgtgtccaaaaacatgtctatacttttctacccattcttgtgcatagttt

SEQ ID NO: 3306 - protein, 334 aa, Arabidopsis thaliana
SHCKSAKQSKAHFVLAFSSTSIMPFAPSLLSSSSSVSQFLPRFPNATRFNVTPRSRAATVVAASVTDLAGVDSTTIAVLGGGSVAALAAMVSLTDPERRRKLQAEEVGGGDKEVVREYFNSTGFERWRKIYGETDEVNRVQKDIRLGHAKTVENTMLMLTEDRSLAGVTVCDAGCGTGLLSIPLAKEGAIVSASDISAAMVAEAEMKAKAQLPSENLPKFEVNDLESLTGKYDTVVCLDVLIHYPQNKADGMIAHLASLAEKRVILSFAPKTFYYDILKRIGELFPGPSKATRAYLHSEADVERALGKVGWKISKRGLTTTQFYFSRLIEAVPM

SEQ ID NO: 3307 - protein, 312 aa, Arabidopsis thaliana
MPFAPSLLSSSSSVSQFLPRFPNATRFNVTPRSRAATVVAASVTDLAGVDSTTIAVLGGGSVAALAAMVSLTDPERRRKLQAEEVGGGDKEVVREYFNSTGFERWRKIYGETDEVNRVQKDIRLGHAKTVENTMLMLTEDRSLAGVTVCDAGCGTGLLSIPLAKEGAIVSASDISAAMVAEAEMKAKAQLPSENLPKFEVNDLESLTGKYDTVVCLDVLIHYPQNKADGMIAHLASLAEKRVILSFAPKTFYYDILKRIGELFPGPSKATRAYLHSEADVERALGKVGWKISKRGLTTTQFYFSRLIEAVPM

SEQ ID NO: 3308 - protein, 245 aa, Arabidopsis thaliana
MVSLTDPERRRKLQAEEVGGGDKEVVREYFNSTGFERWRKIYGETDEVNRVQKDIRLGHAKTVENTMLMLTEDRSLAGVTVCDAGCGTGLLSIPLAKEGAIVSASDISAAMVAEAEMKAKAQLPSENLPKFEVNDLESLTGKYDTVVCLDVLIHYPQNKADGMIAHLASLAEKRVILSFAPKTFYYDILKRIGELFPGPSKATRAYLHSEADVERALGKVGWKISKRGLTTTQFYFSRLIEAVPM

SEQ ID NO: 3309 - DNA, 1660 bp, Arabidopsis thaliana
ttttttgtctttgcaacatcaccaccatacatacatacaacttacatacatacacgtcttccacaggactcaaactccacagcatgggattctcacggtcgctcaaccgcaccgtgggcgtcttcgtcttcttcatcctcgacattgttgatttcctgctttgctttacctacaagactcttgatttcttcttcgagtccgagtggaaaccctgctactgctgtccgccgcccgaggccaaaccaatctcggctggagggaacagaggcggtaagatgatagtgtcggaaagatcaggagactactcgaaggtggtctcactcacaaggacaaagatctatctggatgagatctccgacacactctactctcgcccttcactcctcaccaagctcactaagctggtgaagtgcttcaagaaagatgttgttaaatgctgtgatgagtccaagaagagatcaccgtcaactaaaaagacattactcactgtcaactccacggtggtcgagaagttgcaaagaacaccaagatggtctgattgccattgcactttctgcacttcttggctttcctcttccaaccaatctctctttgtcaatgtccaacagcccacagacaacaaggcacaagagaacgtagtgttcattcatgggttcttatcatcatccacgttttggacggagactctgttcccaaacttctcagactcagccaaatcgaattacaggtttctcgcagtggacctgttgggttatgggaaaagtccaaagccgaacgattcattgtatacattaaaagagcatttagagatgatagagagatcggtgatttctcagttcagactcaagacattccatttagtggctcactccctaggctgcattttggctcttgcgctcgcggttaaacacccaggagccatcaagtcactcactctattggctcctccatattattcggtgccaaaaggtgtgcaagggacgcaatatgtgatgagaagactggcccccaaggaagtgtggcctccgatggccttcggagcctcagtggctagctggtacgagcacattagccgcacagtcagtctagtgctttgcaagaatcatcacttgttggaatttctcaccaggctactcaccagaaacaggatgcgaacgtacttgatagaagggttcttgtgtcacacacataacgcgtcatggcacacactacacaacatcattttcggatcggggagcaaagtagaggcttatttggaccatgtccgtgacaacgtggactgtgaggtcgcagtcttccacggcggtagggacgagctgatccccgtggagtgcagctacggcgtcaagaggaaagtgccacgtgcaaggatccacgtcgtccccgacaaagaccacatcaccattgttgttgggaggcagaaggagttcgctcgtgagcttgagctcatttggcgcagatccactactcctcaacttcattcaataaattaacccttctttattttaagctaagtatatatatattaataccaaccactattattcaaaccatcattttatacccattcacttttgcatatttcggtgactcctatgtagaaaaaaaaacagaacatgtttcttttgtggttgccatttcattatgatttcgaattttg

SEQ ID NO: 3310 - protein, 496 aa, Arabidopsis thaliana
FCLCNITTIHTYNLHTYTSSTGLKLHSMGFSRSLNRTVGVFVFFILDIVDFLLCFTYKTLDFFFESEWKPCYCCPPPEAKPISAGGNRGGKMIVSERSGDYSKVVSLTRTKIYLDEISDTLYSRPSLLTKLTKLVKCFKKDVVKCCDESKKRSPSTKKTLLTVNSTVVEKLQRTPRWSDCHCTFCTSWLSSSNQSLFVNVQQPTDNKAQENVVFIHGFLSSSTFWTETLFPNFSDSAKSNYRFLAVDLLGYGKSPKPNDSLYTLKEHLEMIERSVISQFRLKTFHLVAHSLGCILALALAVKHPGAIKSLTLLAPPYYSVPKGVQGTQYVMRRLAPKEVWPPMAFGASVASWYEHISRTVSLVLCKNHHLLEFLTRLLTRNRMRTYLIEGFLCHTHNASWHTLHNIIFGSGSKVEAYLDHVRDNVDCEVAVFHGGRDELIPVECSYGVKRKVPRARIHVVPDKDHITIVVGRQKEFARELELIWRRSTTPQLHSIN

SEQ ID NO: 3311 - protein, 469 aa, Arabidopsis thaliana
MGFSRSLNRTVGVFVFFILDIVDFLLCFTYKTLDFFFESEWKPCYCCPPPEAKPISAGGNRGGKMIVSERSGDYSKVVSLTRTKIYLDEISDTLYSRPSLLTKLTKLVKCFKKDVVKCCDESKKRSPSTKKTLLTVNSTVVEKLQRTPRWSDCHCTFCTSWLSSSNQSLFVNVQQPTDNKAQENVVFIHGFLSSSTFWTETLFPNFSDSAKSNYRFLAVDLLGYGKSPKPNDSLYTLKEHLEMIERSVISQFRLKTFHLVAHSLGCILALALAVKHPGAIKSLTLLAPPYYSVPKGVQGTQYVMRRLAPKEVWPPMAFGASVASWYEHISRTVSLVLCKNHHLLEFLTRLLTRNRMRTYLIEGFLCHTHNASWHTLHNIIFGSGSKVEAYLDHVRDNVDCEVAVFHGGRDELIPVECSYGVKRKVPRARIHVVPDKDHITIVVGRQKEFARELELIWRRSTTPQLHSIN

SEQ ID NO: 3312 - protein, 405 aa, Arabidopsis thaliana
MIVSERSGDYSKVVSLTRTKIYLDEISDTLYSRPSLLTKLTKLVKCFKKDVVKCCDESKKRSPSTKKTLLTVNSTVVEKLQRTPRWSDCHCTFCTSWLSSSNQSLFVNVQQPTDNKAQENVVFIHGFLSSSTFWTETLFPNFSDSAKSNYRFLAVDLLGYGKSPKPNDSLYTLKEHLEMIERSVISQFRLKTFHLVAHSLGCILALALAVKHPGAIKSLTLLAPPYYSVPKGVQGTQYVMRRLAPKEVWPPMAFGASVASWYEHISRTVSLVLCKNHHLLEFLTRLLTRNRMRTYLIEGFLCHTHNASWHTLHNIIFGSGSKVEAYLDHVRDNVDCEVAVFHGGRDELIPVECSYGVKRKVPRARIHVVPDKDHITIVVGRQKEFARELELIWRRSTTPQLHSIN

SEQ ID NO: 3313 - DNA, 1284 bp, Arabidopsis thaliana
gtcttgagctcaaattgaaaacacgagcttcctaaaccctagcagcagagtcttccgtaaacccagctctcttagctctcacgcctcgtcaattgttgacctgtaggatagatatgggcaacgagagcaaaacctcggctttggaatcggagcagaaggctcttcttctccgttcggtagctcaatacttggaacgatgtggtttttccaaatgcttcaagaaattgctctccgaagctgaaatcgagaagaaggaattgaacactagtttacctgatttagaggaaattttcagcgagtttttgaacaagagagatcatgaagctgcagctaatggaaataccgaggcgaatgtagtggaagctgtagagaatgtaaagaaggataagaagaagaagaagaacaaggaaacaaaggtggaggtaactgaggaagagaaggtcaaagagactgatgctgtgattgaagatggagttaaggagaagaagaagaagaaggaaactaaggtgaaagtaaccgaggaggagaaggtcaaagagactgatgctgtgattgaagatggagttaaggagaaaaagaagaagaagagcaagtcgaaatctgttgaggctgatgatgataaggagaaagtttcaaagaaaaggaaaagatcagagcctgaagagactaaagaagagactgaggatgatgatgaagaatcaaaacgtaggaagaaggaagagaatgtagttgaaaacgatgagggtgttcaagagacacctgttaaggagactgaaactaaggaaaacggaaatgctgagaaaagtgagacaaagtcaacaaatcagaagtcaggaaaagggctttctaactcaaaagagccgaagaaaccgtttcagagggtgaacgttgacgaaattgtgtacactgagaatagcaactcgtactattcaaagggtggtgctgaaattggctatggtcttaaagctcaagaggttctcgggcaagtgagaggaagggatttccgacatgagaagacgaagaagaaacgaggaagctacagaggaggattgatcgatcaagagtcacattcgactaagtttaataactcagacgacgaagaatgattgataagcagacaacactgcctttttgacattgcttcgtttcgatttatctttttcttttcttttgctttgatcatttcaatacccgtaatagggctcaagttttgtgtctgtgcactcctttgatacttatatgaacatgattcagtttcagtttcttgttcactaaattgacttc

SEQ ID NO: 3314 - protein, 330 aa, Arabidopsis thaliana
MGNESKTSALESEQKALLLRSVAQYLERCGFSKCFKKLLSEAEIEKKELNTSLPDLEEIFSEFLNKRDHEAAANGNTEANVVEAVENVKKDKKKKKNKETKVEVTEEEKVKETDAVIEDGVKEKKKKKETKVKVTEEEKVKETDAVIEDGVKEKKKKKSKSKSVEADDDKEKVSKKRKRSEPEETKEETEDDDEESKRRKKEENVVENDEGVQETPVKETETKENGNAEKSETKSTNQKSGKGLSNSKEPKKPFQRVNVDEIVYTENSNSYYSKGGAEIGYGLKAQEVLGQVRGRDFRHEKTKKKRGSYRGGLIDQESHSTKFNNSDDEE

SEQ ID NO: 3315 - DNA, 1641 bp, Arabidopsis thaliana
tgattcgtcgtaataataaaaacacaactcaaacgattcacgggtttcacttggaatcgtttggttttctcatttccgaaatataaaaagatggccaaagcgccaccgtcaatctctcttctcctcctcctctgcgccgccgtattcctcaccatccccgccgtgatctccgccatcggtgttaactacggaactctcggaaacctcccaccaccgactcaggtggctaactttatcaagacacaaacttcgattgatagcgtcaagatcttcgatgtgaatcccgatatcctacgtgccttcgctggaactggtatctccgtcgttgtcaccgttcctaacggtgatattccggcgttggctaacggaagacaagctcgtcggtgggtttcggttaacattttgccgtttcatcctcagacgaagattaagtatatctcagtcggaaatgagattctgctcaccggagataataacatgatcaataatctcttaccggcgatgaggaatcttaacaacgctttggttcgtgctggtgtcagagatgttaaggttacaaccgcacactcacttaacatcatagcctatgacctgaccggtgcaccaagcagcggtagattcaggccgggttgggacaaaggcatattggctccaatcctagcttaccatcgccgaaccaagtcacctttcatggttaacccgtacccttactttggttttgaccccaaaaacgtcaacttcgcaattttccgaacaccgtacaaggcagtccgtgacccgttcacccgccacgtctacaccaacatgtttgatgcactcatggactcgacatactcagccatgaaagctcttggatacggtgatgttaacattgtcgttggcgagactggctggccatctgcttgtgacgcaccttggtgctcgcctgcgaatgctgcttggttcaacctcaacattatcaaacgtgcacaaggccaagggacacctctcatgcctaacagacggttcgagacatacattttcggtctcttcaacgaagaaggcaaacccggtccgaccgcagagcgtaactggggacttttccgagcagatttctccccggtttacgatgttggtcttctccgaaacggacaaggcggtggaggccgcccagcattgcccgcacctagtactgccggcggtaaatggtgtgtagcgaggtccggggcgacgaatactcagctgcaagacagtattaattgggtgtgtggtcagggtgttgactgtaaaccgatccaagctggtggttcgtgctttaacccgagcagtttgaggacgcacgcatcttttgttatgaatgcttatttccagagccacggccgcactgatggtgcttgtaacttcagtggaactggtatgatcgtagggaacaacccaagcaatggtgcatgtaagtactaaggagattgtctatgtagtagtatttgtctgaaaaatcctaacataatggttctgaggaactttggatttgagagatcatcagctttgtgtttaatttcggattatcctaattttaagatttttttgttaattattttttcgctgattccttttatttaaataaagtggaacttccataaaatttgcttcagcgttacgctt

SEQ ID NO: 3316 - protein, 449 aa, Arabidopsis thaliana
MAKAPPSISLLLLLCAAVFLTIPAVISAIGVNYGTLGNLPPPTQVANFIKTQTSIDSVKIFDVNPDILRAFAGTGISVVVTVPNGDIPALANGRQARRWVSVNILPFHPQTKIKYISVGNEILLTGDNNMINNLLPAMRNLNNALVRAGVRDVKVTTAHSLNIIAYDLTGAPSSGRFRPGWDKGILAPILAYHRRTKSPFMVNPYPYFGFDPKNVNFAIFRTPYKAVRDPFTRHVYTNMFDALMDSTYSAMKALGYGDVNIVVGETGWPSACDAPWCSPANAAWFNLNIIKRAQGQGTPLMPNRRFETYIFGLFNEEGKPGPTAERNWGLFRADFSPVYDVGLLRNGQGGGGRPALPAPSTAGGKWCVARSGATNTQLQDSINWVCGQGVDCKPIQAGGSCFNPSSLRTHASFVMNAYFQSHGRTDGACNFSGTGMIVGNNPSNGACKY

SEQ ID NO: 3317 - protein, 320 aa, Arabidopsis thaliana
MINNLLPAMRNLNNALVRAGVRDVKVTTAHSLNIIAYDLTGAPSSGRFRPGWDKGILAPILAYHRRTKSPFMVNPYPYFGFDPKNVNFAIFRTPYKAVRDPFTRHVYTNMFDALMDSTYSAMKALGYGDVNIVVGETGWPSACDAPWCSPANAAWFNLNIIKRAQGQGTPLMPNRRFETYIFGLFNEEGKPGPTAERNWGLFRADFSPVYDVGLLRNGQGGGGRPALPAPSTAGGKWCVARSGATNTQLQDSINWVCGQGVDCKPIQAGGSCFNPSSLRTHASFVMNAYFQSHGRTDGACNFSGTGMIVGNNPSNGACKY

SEQ ID NO: 3318 - protein, 312 aa, Arabidopsis thaliana
MRNLNNALVRAGVRDVKVTTAHSLNIIAYDLTGAPSSGRFRPGWDKGILAPILAYHRRTKSPFMVNPYPYFGFDPKNVNFAIFRTPYKAVRDPFTRHVYTNMFDALMDSTYSAMKALGYGDVNIVVGETGWPSACDAPWCSPANAAWFNLNIIKRAQGQGTPLMPNRRFETYIFGLFNEEGKPGPTAERNWGLFRADFSPVYDVGLLRNGQGGGGRPALPAPSTAGGKWCVARSGATNTQLQDSINWVCGQGVDCKPIQAGGSCFNPSSLRTHASFVMNAYFQSHGRTDGACNFSGTGMIVGNNPSNGACKY

SEQ ID NO: 3319 - DNA, 1285 bp, Arabidopsis thaliana
aggaagaaacaacaacaatggcaacggcttctcctccatttatctcaactctcagcttcactcactcttctttcaaaacttcttcttcttcttcattttctccgaagcttcttcgacccctcttaagcttttccgtcaaagcttccagaaagcaagtagagatagtgtttgatcctgatgagaggcttaataagataggtgatgatgttgacaaagaagctcctttgtccaggcttaagctcttctcaccttgcaagatcaatgttttcttgaggatcaccggaaagcgagaagatgggtttcatgatttagcctctttgtttcatgtgattagcttaggagacactattaaattctcattgtcaccatcaaagtctaaagatcgtttgtctactaacgttcaaggagtccctgttgatgggagaaatctgattataaaagcacttaacctttacaggaagaaaactggtagtaacagattcttctggattcatttagataagaaggtgcctaccggggctggactcggtggtggaagtagtaatgctgcaactgcactctgggcggcaaatgagctcaatggaggtcttgtcactgagaacgaactccaggattggtcaagtgaaattgggtcagatattcctttcttcttctcgcatggagctgcctattgtactgggagaggtgagattgtccaagaccttcctccaccttttcctcttgatcttccgatggtgctcataaagccccgagaagcatgttccactgctgaagtttacaaacgtcttcgtttagatcagacgagcaatattaatcccttgacattactagagaatgtgaccagcaatggtgtgtctcaaagcatatgcgtaaacgatttggaaccgccagcgttttcagttcttccatctctaaaacgcttgaagcaacggataatagcatctggacgtggggaatacgatgctgtgtttatgtctgggagtggaagcactattatcggtattggttcaccagatcctcctcaatttatatatgatgatgaagaatacaagaacgtgttcttgtctgaagcaaactttatgacgcgtgaggctaatgaatggtacaaagaacctgcttctgcaaatgctactacctcatccgccgaatctcgcatggatttccaatgagatgttacaaacatgtaattttttgaaaggattgatttgagattcctacttgtgtttcgaatagtgagtggttaactaaaggagaagatgctttaaatataaattaaaagtttttt

SEQ ID NO: 3320 - protein, 388 aa, Arabidopsis thaliana
EETTTMATASPPFISTLSFTHSSFKTSSSSSFSPKLLRPLLSFSVKASRKQVEIVFDPDERLNKIGDDVDKEAPLSRLKLFSPCKINVFLRITGKREDGFHDLASLFHVISLGDTIKFSLSPSKSKDRLSTNVQGVPVDGRNLIIKALNLYRKKTGSNRFFWIHLDKKVPTGAGLGGGSSNAATALWAANELNGGLVTENELQDWSSEIGSDIPFFFSHGAAYCTGRGEIVQDLPPPFPLDLPMVLIKPREACSTAEVYKRLRLDQTSNINPLTLLENVTSNGVSQSICVNDLEPPAFSVLPSLKRLKQRIIASGRGEYDAVFMSGSGSTIIGIGSPDPPQFIYDDEEYKNVFLSEANFMTREANEWYKEPASANATTSSAESRMDFQ

SEQ ID NO: 3321 - protein, 383 aa, Arabidopsis thaliana
MATASPPFISTLSFTHSSFKTSSSSSFSPKLLRPLLSFSVKASRKQVEIVFDPDERLNKIGDDVDKEAPLSRLKLFSPCKINVFLRITGKREDGFHDLASLFHVISLGDTIKFSLSPSKSKDRLSTNVQGVPVDGRNLIIKALNLYRKKTGSNRFFWIHLDKKVPTGAGLGGGSSNAATALWAANELNGGLVTENELQDWSSEIGSDIPFFFSHGAAYCTGRGEIVQDLPPPFPLDLPMVLIKPREACSTAEVYKRLRLDQTSNINPLTLLENVTSNGVSQSICVNDLEPPAFSVLPSLKRLKQRIIASGRGEYDAVFMSGSGSTIIGIGSPDPPQFIYDDEEYKNVFLSEANFMTREANEWYKEPASANATTSSAESRMDFQ

SEQ ID NO: 3322 - DNA, 1625 bp, Arabidopsis thaliana
aaagattggatatgatctaaaaaatcagaggcaaatcaatcaagattaagaagacgacaatggaagagccatttcttccgagagacgagcagttagtctcttgtaaatccacatggcaaagtggtcaggtcaccgtcgagctgaagaaagtgagccgcttggccgctcctatggccaccgtaaccatagctcagtacttattgcctgtcatctcagtcatggtcgccggccacatcggcgagttggagctcgccggtgtcgcgcttgccacgtctttcacaaacgtttccggcttcagcataatgtttgggttagttggtgcattggaaactctttgtggccaagcctatggagcagaacaatacgaaaaaatcggaacctatacatactctgcaatggcttccaacataccaatttgtttcatcatatcaattctatggatttacatcgaaaagctcttgatcactctcgggcaagagcctgacatctctagagtcgctggctcctactcattgtggctcgtaccggctttgtttgcccatgctattttcttaccactgactcggtttctgctagcacaagggttggttatttccctgctatactctgccatgaccacccttttgttccatattgcggtttgctggactttggttttcgcgcttggtcttggaagcaatggagctgctattgctattagtttgtctttctggttttacgctgtgatactctcatgtcatgtgagatttttcagctcttgcgagaagactcgcggatttgtatcaaatgattttatgtctagtatcaagcagtacttccagtacggagtcccatccgctggattgatttgcttagaatggtggctgtttgagctactcatactctgctcaggtcttctcccaaacccaaaactcgagacatctgttctttcgatttgtcttacaataggaactttacactatgtgattccatctggagtcgcggcggctgtgagcacacgagtgtcaaacaaattgggagctggaaatcctcaagttgctagggtttccgtattggcagggctttgtctctggcttgtagagtcagctttctttagcacacttctcttcacctgccgaaacatcataggctacacattcagcaacagcaaagaagttgttgactatgttgctgacatatctcctttgctctgtctctccttcatcctcgacggattaacggcagttctaaatggagtggctaggggatgtgggtggcaacacattggagctttgatcaacgtggtggcttattatcttgtaggagctcctgttggagtttacttagctttcagtcgtgagtggaatggaaaaggactctggtgcggtgttatggttggatccgcggtgcaagccactttactggctatcgtcacagcctccatgaactggaaggaacaggctgagaaagcaaggaagagaataatctctactgaaaatggattggtttaaataaaggttgttcctaagagctatctcaaagtatttgcaagtcatgtgcaaaaaaacatgtaatgttattttgatgggttataatatttttttgtaaaacttttatccaggatttatacattttttcttgagttg

SEQ ID NO: 3323 - protein, 476 aa, Arabidopsis thaliana
MEEPFLPRDEQLVSCKSTWQSGQVTVELKKVSRLAAPMATVTIAQYLLPVISVMVAGHIGELELAGVALATSFTNVSGFSIMFGLVGALETLCGQAYGAEQYEKIGTYTYSAMASNIPICFIISILWIYIEKLLITLGQEPDISRVAGSYSLWLVPALFAHAIFLPLTRFLLAQGLVISLLYSAMTTLLFHIAVCWTLVFALGLGSNGAAIAISLSFWFYAVILSCHVRFFSSCEKTRGFVSNDFMSSIKQYFQYGVPSAGLICLEWWLFELLILCSGLLPNPKLETSVLSICLTIGTLHYVIPSGVAAAVSTRVSNKLGAGNPQVARVSVLAGLCLWLVESAFFSTLLFTCRNIIGYTFSNSKEVVDYVADISPLLCLSFILDGLTAVLNGVARGCGWQHIGALINVVAYYLVGAPVGVYLAFSREWNGKGLWCGVMVGSAVQATLLAIVTASMNWKEQAEKARKRIISTENGLV

SEQ ID NO: 3324 - protein, 439 aa, Arabidopsis thaliana
MATVTIAQYLLPVISVMVAGHIGELELAGVALATSFTNVSGFSIMFGLVGALETLCGQAYGAEQYEKIGTYTYSAMASNIPICFIISILWIYIEKLLITLGQEPDISRVAGSYSLWLVPALFAHAIFLPLTRFLLAQGLVISLLYSAMTTLLFHIAVCWTLVFALGLGSNGAAIAISLSFWFYAVILSCHVRFFSSCEKTRGFVSNDFMSSIKQYFQYGVPSAGLICLEWWLFELLILCSGLLPNPKLETSVLSICLTIGTLHYVIPSGVAAAVSTRVSNKLGAGNPQVARVSVLAGLCLWLVESAFFSTLLFTCRNIIGYTFSNSKEVVDYVADISPLLCLSFILDGLTAVLNGVARGCGWQHIGALINVVAYYLVGAPVGVYLAFSREWNGKGLWCGVMVGSAVQATLLAIVTASMNWKEQAEKARKRIISTENGLV

SEQ ID NO: 3325 - protein, 423 aa, Arabidopsis thaliana
MVAGHIGELELAGVALATSFTNVSGFSIMFGLVGALETLCGQAYGAEQYEKIGTYTYSAMASNIPICFIISILWIYIEKLLITLGQEPDISRVAGSYSLWLVPALFAHAIFLPLTRFLLAQGLVISLLYSAMTTLLFHIAVCWTLVFALGLGSNGAAIAISLSFWFYAVILSCHVRFFSSCEKTRGFVSNDFMSSIKQYFQYGVPSAGLICLEWWLFELLILCSGLLPNPKLETSVLSICLTIGTLHYVIPSGVAAAVSTRVSNKLGAGNPQVARVSVLAGLCLWLVESAFFSTLLFTCRNIIGYTFSNSKEVVDYVADISPLLCLSFILDGLTAVLNGVARGCGWQHIGALINVVAYYLVGAPVGVYLAFSREWNGKGLWCGVMVGSAVQATLLAIVTASMNWKEQAEKARKRIISTENGLV

SEQ ID NO: 3326 - DNA, 480 bp, Arabidopsis thaliana
tcttccttgtctggatttggttcaccatcgtcggaaatctctgatctctctcaggatcgcttgttcgctacgcagatctcacctgccatgactcgaggaagtcaaagagagcgtgaccgtgaaagggctctagctcgaaccggaggcaaaggaaagaacaaagatgatggattaactcctgagcaacgtcgtgaaagagatgcaaaagcattgcaagagaagactgcaaagaaagctgctcaagccgctgctgcagctagttccggaggaggaggaggcaaaggaaacaataagtgagaaaaaatgatctatgcttcgatgtttgtaactgtgcttttgaatatgaaagtttggtgtttgtgttgagaatgttttggcttcgtttggtttgagtttgtatcaaaacttagacttggtgatgtactttgattaaaccaatgattactcttacaatatctatgattacaagtacatttgtcc

SEQ ID NO: 3327 - protein, 98 aa, Arabidopsis thaliana
SSLSGFGSPSSEISDLSQDRLFATQISPAMTRGSQRERDRERALARTGGKGKNKDDGLTPEQRRERDAKALQEKTAKKAAQAAAAASSGGGGGKGNNK

SEQ ID NO: 3328 - protein, 69 aa, Arabidopsis thaliana
MTRGSQRERDRERALARTGGKGKNKDDGLTPEQRRERDAKALQEKTAKKAAQAAAAASSGGGGGKGNNK

SEQ ID NO: 3329 - DNA, 2940 bp, Arabidopsis thaliana
gtcactcactagcttgaggaaaaatgttaacttcatcaatgcctcaaaacctaagccttttcggattttctcctctcaagtcttcttcgttcgctcttattctcagacccttttctctctacccaccaatcttcgcttcttcttctccggctccgagtcgtcgtcctcctcgcaccgccggttaccgtcgcagtggcccttctcctccgagacgcaaatggagtagtttcgaggagcagaagagaaaaggtaggtctccgatggagaaagataaagctattagctttaatcactcttctgattctttcgagtttaataagagaagagctgagggattggataaggtcgataagcctaagaagaatctcaagaggaatactcgcacccttaaccctaccaataccatcgcctatgttcagatccttgggactggaatggatacacaggatacgtcaccttctgtattactcttctttgacaaacaaagattcatctttaatgctggagaggggttgcaacgtttttgtactgaacataaaattaagttatcaaaggtagatcatatatttttgtctcgtgtgtgctcagagacagcaggcgggcttccaggtcttctactgaccctagctggtatcggggaacaaggactatccgtcaacgtatggggtccttcagatcttaagtatttggttgatgctatgaggtcatttatccctcgtgctgccatggttcatacaagaagttttggtccatcattgaatatatctgactctgcgcctcagattggcttaagtaaacccaaagatgatgcctatgttcttgtggatgacgaagttgtgaaaatatccgccattctcctagaaccaagtcgcttagaggaatctggcagcaaacctggtgaaacagcagttatatatgtatgtgaattacctgaaatcaaaggaaagtttgatccaaagaaggccatggctcttggattgagagctggtccaaagtacagttatcttcagtctggacagtcagtcaagtcagattttaaagatattacggttcatccgagtgatgtgatgggaccttcagttcctggtcctgttgttttgcttgtggattgtccaacagagtcacatgccgaggaactgctatctatcccgtctatgaagacttattattcatgtcttgacaattcaacagatggagctaagcttgttaattgtattattcatctaagtccagcttctgtaacaaatagttctacataccgaagctggatgaagagattccattctgcccagcacattctcgctggacatgaagcgaagaatatggagtttccaatcctgagagccagttctagaatcacagccagacttaactatttatgtccacagttcttcccagctcctggattttggtctcatcaacatgataataactcgataaaccccacttctttgagcaagtgcttcgattcgaatcttggtgaaagcatttctgctgaaaatctcctcaagttcactttgcgtccacatggtaatcttggggtagacagatctagtatccctagtcgattaacagctttacgagtgatggatgagcttctttcagaaattcctgaaatcagcagtaagaccgaagaaatcaagcagttatggaatggacaacacaacaagatgatgatcgaagagccatggctgggtgaaagcactgttccaagctgtcttgaaaacattagaagagacgacatggagatagttcttttgggcactggttcctcccaaccctcaaaataccgaaatgtcacggcaatttacatcgacctattctctagaggcagtattctcttggattgtggggaaggtaccttaggccagcttaaacgaagatatggtttagaaggagctgatgaagcagtcagaaacttgagatgtatatggatctctcacatccatgctgatcaccatacgggtcttgcaagaatccttgctcgcagacgtgagcttttgaaaggattggctcatgagccagcaattgtggttggaccgagatcgcttaagaaatttctcgatgcatatcaaagacttgaggatttagatatggagtttctcgactgcaggaacaccacaacaacatcttgggcttctgtagaaaccagccgccctgagaaaaataccagtagcggcaatgcagagggttctttgttcagtaaaggaagtctaatgcagagtatatataaaagaccgagcagcccactgacagacaattcttcagctttaccattcttgaagaaactgaaaaaagtcctcggcgaaatggggttggagcatttgattagctttcctgttgtgcattgccctcaagcctttggggtttcgttaaaagcagcagaaagaaaaaacattgccggagatgagattccggggtggaaaatggtttactcgggagacacaaggccttgtcctgagatggttgaagcttcaaaaggagcaacagttcttatacatgaggcgacgtttgaggatgcgttggtagaagaagctgtggctaaaaaccatagcacaactaaagaagcaatcaaagttggatcttcagcaggtgtataccgaaccgtactgacacattttagccagagatacccaaagatcccggtgattgacgaatcacatatgcacaatacatgcattgcctttgatatgatgagtataaacatggcggatttacatgtgcttccaaagattttaccttacttcaaaactctattcagaaaccaagtggttgaagaagaagaagaagaagaagagactgatgatgatagcttaatacgtgacaaagtcccaagctttttcatcaattagtatatagattagaatgttctgttttgtcccctgtttttgactgtgttgtattgtctttagaaataatatcaatttaattgattaaaac

SEQ ID NO: 3330 - protein, 942 aa, Arabidopsis thaliana
MLTSSMPQNLSLFGFSPLKSSSFALILRPFSLYPPIFASSSPAPSRRPPRTAGYRRSGPSPPRRKWSSFEEQKRKGRSPMEKDKAISFNHSSDSFEFNKRRAEGLDKVDKPKKNLKRNTRTLNPTNTIAYVQILGTGMDTQDTSPSVLLFFDKQRFIFNAGEGLQRFCTEHKIKLSKVDHIFLSRVCSETAGGLPGLLLTLAGIGEQGLSVNVWGPSDLKYLVDAMRSFIPRAAMVHTRSFGPSLNISDSAPQIGLSKPKDDAYVLVDDEVVKISAILLEPSRLEESGSKPGETAVIYVCELPEIKGKFDPKKAMALGLRAGPKYSYLQSGQSVKSDFKDITVHPSDVMGPSVPGPVVLLVDCPTESHAEELLSIPSMKTYYSCLDNSTDGAKLVNCIIHLSPASVTNSSTYRSWMKRFHSAQHILAGHEAKNMEFPILRASSRITARLNYLCPQFFPAPGFWSHQHDNNSINPTSLSKCFDSNLGESISAENLLKFTLRPHGNLGVDRSSIPSRLTALRVMDELLSEIPEISSKTEEIKQLWNGQHNKMMIEEPWLGESTVPSCLENIRRDDMEIVLLGTGSSQPSKYRNVTAIYIDLFSRGSILLDCGEGTLGQLKRRYGLEGADEAVRNLRCIWISHIHADHHTGLARILARRRELLKGLAHEPAIVVGPRSLKKFLDAYQRLEDLDMEFLDCRNTTTTSWASVETSRPEKNTSSGNAEGSLFSKGSLMQSIYKRPSSPLTDNSSALPFLKKLKKVLGEMGLEHLISFPVVHCPQAFGVSLKAAERKNIAGDEIPGWKMVYSGDTRPCPEMVEASKGATVLIHEATFEDALVEEAVAKNHSTTKEAIKVGSSAGVYRTVLTHFSQRYPKIPVIDESHMHNTCIAFDMMSINMADLHVLPKILPYFKTLFRNQVVEEEEEEEETDDDSLIRDKVPSFFIN

SEQ ID NO: 3331 - protein, 937 aa, Arabidopsis thaliana
MPQNLSLFGFSPLKSSSFALILRPFSLYPPIFASSSPAPSRRPPRTAGYRRSGPSPPRRKWSSFEEQKRKGRSPMEKDKAISFNHSSDSFEFNKRRAEGLDKVDKPKKNLKRNTRTLNPTNTIAYVQILGTGMDTQDTSPSVLLFFDKQRFIFNAGEGLQRFCTEHKIKLSKVDHIFLSRVCSETAGGLPGLLLTLAGIGEQGLSVNVWGPSDLKYLVDAMRSFIPRAAMVHTRSFGPSLNISDSAPQIGLSKPKDDAYVLVDDEVVKISAILLEPSRLEESGSKPGETAVIYVCELPEIKGKFDPKKAMALGLRAGPKYSYLQSGQSVKSDFKDITVHPSDVMGPSVPGPVVLLVDCPTESHAEELLSIPSMKTYYSCLDNSTDGAKLVNCIIHLSPASVTNSSTYRSWMKRFHSAQHILAGHEAKNMEFPILRASSRITARLNYLCPQFFPAPGFWSHQHDNNSINPTSLSKCFDSNLGESISAENLLKFTLRPHGNLGVDRSSIPSRLTALRVMDELLSEIPEISSKTEEIKQLWNGQHNKMMIEEPWLGESTVPSCLENIRRDDMEIVLLGTGSSQPSKYRNVTAIYIDLFSRGSILLDCGEGTLGQLKRRYGLEGADEAVRNLRCIWISHIHADHHTGLARILARRRELLKGLAHEPAIVVGPRSLKKFLDAYQRLEDLDMEFLDCRNTTTTSWASVETSRPEKNTSSGNAEGSLFSKGSLMQSIYKRPSSPLTDNSSALPFLKKLKKVLGEMGLEHLISFPVVHCPQAFGVSLKAAERKNIAGDEIPGWKMVYSGDTRPCPEMVEASKGATVLIHEATFEDALVEEAVAKNHSTTKEAIKVGSSAGVYRTVLTHFSQRYPKIPVIDESHMHNTCIAFDMMSINMADLHVLPKILPYFKTLFRNQVVEEEEEEEETDDDSLIRDKVPSFFIN

SEQ ID NO: 3332 - protein, 863 aa, Arabidopsis thaliana
MEKDKAISFNHSSDSFEFNKRRAEGLDKVDKPKKNLKRNTRTLNPTNTIAYVQILGTGMDTQDTSPSVLLFFDKQRFIFNAGEGLQRFCTEHKIKLSKVDHIFLSRVCSETAGGLPGLLLTLAGIGEQGLSVNVWGPSDLKYLVDAMRSFIPRAAMVHTRSFGPSLNISDSAPQIGLSKPKDDAYVLVDDEVVKISAILLEPSRLEESGSKPGETAVIYVCELPEIKGKFDPKKAMALGLRAGPKYSYLQSGQSVKSDFKDITVHPSDVMGPSVPGPVVLLVDCPTESHAEELLSIPSMKTYYSCLDNSTDGAKLVNCIIHLSPASVTNSSTYRSWMKRFHSAQHILAGHEAKNMEFPILRASSRITARLNYLCPQFFPAPGFWSHQHDNNSINPTSLSKCFDSNLGESISAENLLKFTLRPHGNLGVDRSSIPSRLTALRVMDELLSEIPEISSKTEEIKQLWNGQHNKMMIEEPWLGESTVPSCLENIRRDDMEIVLLGTGSSQPSKYRNVTAIYIDLFSRGSILLDCGEGTLGQLKRRYGLEGADEAVRNLRCIWISHIHADHHTGLARILARRRELLKGLAHEPAIVVGPRSLKKFLDAYQRLEDLDMEFLDCRNTTTTSWASVETSRPEKNTSSGNAEGSLFSKGSLMQSIYKRPSSPLTDNSSALPFLKKLKKVLGEMGLEHLISFPVVHCPQAFGVSLKAAERKNIAGDEIPGWKMVYSGDTRPCPEMVEASKGATVLIHEATFEDALVEEAVAKNHSTTKEAIKVGSSAGVYRTVLTHFSQRYPKIPVIDESHMHNTCIAFDMMSINMADLHVLPKILPYFKTLFRNQVVEEEEEEEETDDDSLIRDKVPSFFIN

SEQ ID NO: 3333 - DNA, 1303 bp, Arabidopsis thaliana
tgactgtaacaataatcaaataatccctgacttcgtcacgtttctttgtatctccaacgtccaataaatgaaagcaactctagcagcaccctcttctctcacaagcctcccttatcgaaccaactcttctttcggctcaaagtcatcgcttctctttcggtctccatcctcctcctcctcagtctctatgacgacaacgcgtggaaacgtggctgtggcggctgctgctacatccactgaggcgctaagaaaaggaatagcggagttctacaatgaaacttcgggtttgtgggaagagatttggggagatcatatgcatcatggcttttatgaccctgattcttctgttcaactttctgattctggtcacaaggaagctcagatccgtatgattgaagagtctctccgttttgccggtgttactgatgaagaggaggagaaaaagataaagaaagtagtggatgttgggtgtgggattggaggaagctcaagatatcttgcctctaaatttggagctgaatgcattggcattactctcagccctgttcaggccaagagagccaatgatctcgcggctgctcaatcactcgctcataaggcttccttccaagttgcggatgcgttggatcagccattcgaagatggaaaattcgatctagtgtggtcgatggagagtggtgagcatatgcctgacaaggccaagtttgtaaaagagttggtacgtgtggcggctccaggaggtaggataataatagtgacatggtgccatagaaatctatctgcgggggaggaagctttgcagccgtgggagcaaaacatcttggacaaaatctgtaagacgttctatctcccggcttggtgctccaccgatgattatgtcaacttgcttcaatcccattctctccaggatattaagtgtgcggattggtcagagaacgtagctcctttctggcctgcggttatacggactgcattaacatggaagggccttgtgtctctgcttcgtagtggtatgaaaagtattaaaggagcattgacaatgccattgatgattgaaggttacaagaaaggtgtcattaagtttggtatcatcacttgccagaagccactctaagtctaaagctatactaggagattgaataagactataagagtagtgtctcatgtgaaagcatgaaattccttaaaaacgtcaatgttaagcctatgcttcgttatttgttttagataaatatcatttcactcttgtctaaggtagtttctataaacaataaataccatgaattagctcatgttatctggt

SEQ ID NO: 3334 - protein, 348 aa, Arabidopsis thaliana
MKATLAAPSSLTSLPYRTNSSFGSKSSLLFRSPSSSSSVSMTTTRGNVAVAAAATSTEALRKGIAEFYNETSGLWEEIWGDHMHHGFYDPDSSVQLSDSGHKEAQIRMIEESLRFAGVTDEEEEKKIKKVVDVGCGIGGSSRYLASKFGAECIGITLSPVQAKRANDLAAAQSLAHKASFQVADALDQPFEDGKFDLVWSMESGEHMPDKAKFVKELVRVAAPGGRIIIVTWCHRNLSAGEEALQPWEQNILDKICKTFYLPAWCSTDDYVNLLQSHSLQDIKCADWSENVAPFWPAVIRTALTWKGLVSLLRSGMKSIKGALTMPLMIEGYKKGVIKFGIITCQKPL

SEQ ID NO: 3335 - protein, 308 aa, Arabidopsis thaliana
MTTTRGNVAVAAAATSTEALRKGIAEFYNETSGLWEEIWGDHMHHGFYDPDSSVQLSDSGHKEAQIRMIEESLRFAGVTDEEEEKKIKKVVDVGCGIGGSSRYLASKFGAECIGITLSPVQAKRANDLAAAQSLAHKASFQVADALDQPFEDGKFDLVWSMESGEHMPDKAKFVKELVRVAAPGGRIIIVTWCHRNLSAGEEALQPWEQNILDKICKTFYLPAWCSTDDYVNLLQSHSLQDIKCADWSENVAPFWPAVIRTALTWKGLVSLLRSGMKSIKGALTMPLMIEGYKKGVIKFGIITCQKPL

SEQ ID NO: 3336 - protein, 266 aa, Arabidopsis thaliana
MHHGFYDPDSSVQLSDSGHKEAQIRMIEESLRFAGVTDEEEEKKIKKVVDVGCGIGGSSRYLASKFGAECIGITLSPVQAKRANDLAAAQSLAHKASFQVADALDQPFEDGKFDLVWSMESGEHMPDKAKFVKELVRVAAPGGRIIIVTWCHRNLSAGEEALQPWEQNILDKICKTFYLPAWCSTDDYVNLLQSHSLQDIKCADWSENVAPFWPAVIRTALTWKGLVSLLRSGMKSIKGALTMPLMIEGYKKGVIKFGIITCQKPL

SEQ ID NO: 3337 - DNA, 1294 bp, Arabidopsis thaliana
ataaatattaattttattttgggtcgccgcttgattttctggtggggaagtcgtaatcgttaaattagggtcttcccttcttcttcttctacatctcctcagccgtttcctacggaggattccgatcgatcccttttctctttttttttttttcttctggtcaccgaatcattgtcataccccactttgagctcacaactcttcttcctcagattgcttgattagggttttcttctgcttgccgaattgatttccaaggaacaactttttatttattttcatcacctaatctttcgttttcagattccgagtatccaaataatatttttatattttctctttcgccgccatgagttcctcgatccagatcgttgttgaggagaagcaagtggatgttttgcctcttcaagatcaggatgaaaagaagactccacaagtgttcaatgagctgagtttcgggaaccatgggggctgttgtgcaatttgcttggatactatacctcttcaagaaacagctatggttaaaggctgtgagcatgcttactgtgtgacgtgcatactccgttgggcaagttacaaggagaaacctacctgcccacaatgtaagcttccatttgattttctcaatgtccaccgcgctctcgatggaagcgttgaagatttcatgttcgaggagagtgtatgcctcctcctgagggcatcatggttccagccactggaagcagtggagcgggtttcagacaatgacaatttcaactatgatttcgacattccacctgagtatgaggaggaggatgaggacgacgatgaccttgacgagttttatatgcaaggttcaagtcttcgattaggaaaccggaggtggggtgacaatggatttgtgagggcaggccgccaagaagcaaggccagtccaacataagaaccgaggtggccaggcttctggctctgaacccgcctcttcatcctcatgtgagccaaaggagaagactagcagtgccataacaggaaggcgtgcaaagagggcaatgaagcgtgaagctgcaaacaaagctgcggaagcagtagcagctgcaaagcatgaggcccttttggttaggttgggaaggaagtgactgtggttgtatctctgtaattacatcaacccaccccaaccccaaatgaccaaatcctttgacttcgatacttgagaatctgtacatcagtagaatttaataatggtagaacttgttgaacctttgtcgttaagatgctttgtgctagatttgatttatttatctgcaactttcttgacc

SEQ ID NO: 3338 - protein, 254 aa, Arabidopsis thaliana
MSSSIQIVVEEKQVDVLPLQDQDEKKTPQVFNELSFGNHGGCCAICLDTIPLQETAMVKGCEHAYCVTCILRWASYKEKPTCPQCKLPFDFLNVHRALDGSVEDFMFEESVCLLLRASWFQPLEAVERVSDNDNFNYDFDIPPEYEEEDEDDDDLDEFYMQGSSLRLGNRRWGDNGFVRAGRQEARPVQHKNRGGQASGSEPASSSSCEPKEKTSSAITGRRAKRAMKREAANKAAEAVAAAKHEALLVRLGRK

SEQ ID NO: 3339 - protein, 198 aa, Arabidopsis thaliana
MVKGCEHAYCVTCILRWASYKEKPTCPQCKLPFDFLNVHRALDGSVEDFMFEESVCLLLRASWFQPLEAVERVSDNDNFNYDFDIPPEYEEEDEDDDDLDEFYMQGSSLRLGNRRWGDNGFVRAGRQEARPVQHKNRGGQASGSEPASSSSCEPKEKTSSAITGRRAKRAMKREAANKAAEAVAAAKHEALLVRLGRK

SEQ ID NO: 3340 - protein, 149 aa, Arabidopsis thaliana
MFEESVCLLLRASWFQPLEAVERVSDNDNFNYDFDIPPEYEEEDEDDDDLDEFYMQGSSLRLGNRRWGDNGFVRAGRQEARPVQHKNRGGQASGSEPASSSSCEPKEKTSSAITGRRAKRAMKREAANKAAEAVAAAKHEALLVRLGRK

SEQ ID NO: 3341 - DNA, 720 bp, Arabidopsis thaliana
aaatcagtataaaatatcatagcggagtctaaagaagagttcatccaattatttaactctttagtgtaatcattagcaacgcaaagaaatgcctaaacgacaggctcaacggcgtttcactcgcaagactgactcgaaaacaccatcccagcctctggtatcccgtcgctctgcaaactatcaaccgtctctttggcagcacgaatatctcctctcgctcggtaatacatatgtgaaagaggacaacgtcgagagagttacgttattgaagcaggaagtgagtaaaatgctcgatgaaacggaaggtttactcgaacagctagagctcatcgacactttacaaaggcttggagtttcttaccattttgaacaagaaatcaagaagacgctaacgaatgtgcatgttaaaaatgtgcgagcacacaaaaaccggatagatcgaaaccgatggggagatttatacgcgaccgcccttgagttccgactcctaaggcaacatggtttcagtatcgcacaaggttgaaagcaaaaaaaaaaaaaaaaaaaaaaaaattcaaaaagttattcacataaatccaaattttcagtttttagttcaaagtttcaaaaatgaattatataaagttggtcttcagttctatatgtctatatgatggttctgaatttaaccacattaatattgcaatctcttgctgttgttaataaccacattaatattgc

SEQ ID NO: 3342 - protein, 144 aa, Arabidopsis thaliana
MPKRQAQRRFTRKTDSKTPSQPLVSRRSANYQPSLWQHEYLLSLGNTYVKEDNVERVTLLKQEVSKMLDETEGLLEQLELIDTLQRLGVSYHFEQEIKKTLTNVHVKNVRAHKNRIDRNRWGDLYATALEFRLLRQHGFSIAQG

SEQ ID NO: 3343 - protein, 78 aa, Arabidopsis thaliana
MLDETEGLLEQLELIDTLQRLGVSYHFEQEIKKTLTNVHVKNVRAHKNRIDRNRWGDLYATALEFRLLRQHGFSIAQG

SEQ ID NO: 3344 - DNA, 1126 bp, Arabidopsis thaliana
gctaaaaccctctctccccttcttcttacttcacttcactcgtgctttctccaatggagtcactcctgcacgcgtcttcgtctctggtgtctctgagacccagaatcgacggtagagattcgttcatcaacccgtcacgcgtgtgccttaatcctagtctcggccgcagaggatctaaacctcttccgttggtcgcggcggcgaagaagaagaaaagcaagaaagatgacaatcataacttttcagctagacctgacgaagccactggtccttttcctgaatccattcttctcaaagagaagaagattgatgaagaaggtgatcttcttcccgagtttgctgatgctgaagaaaaggagctatatcagtttctggatcttcagcttcagagtgacttgaatgaagaaaggatgaggcactatgaggtggtttacttgattcatgaaaaacatgctgaggaggttgaaagcattaaccagaaagtacaagattacctgaaggagaagaaggggaaagtttggaggtttagtgattggggaatgcgtagactggcttacaaaatacagaaggcagagaatgcgcactatatactgatgaactttgagatagaggcaaaatacttgaacgaattcaagggattgttagatagtgatgagagggtgattaggcatcttgtgatgaaacgtgatgaggccataaccgaagactgtcctccacctcctgagtttcactctgtccgcgcaggtgatgaatattatgacgatgatgaagaggaagagattgaagaagatgaagatgaaggtgagggtgaagatgaagaagatgctgataatatagagtacgaagtagatgatgatggtaatgtcgttatggtgttgtacggagatgaagaagaaggagaagaagaagaagatggagctagtgaacaagaagaaggacaggacaagtcaactaatggtagaagagaaacccggagaacagttaacgtaggaggttaggactgtctgtaattcttttgtttttgggtcatgttttggataatagggtcacacatcaaatcgaagttgtttgttgtactcataatagcatcctaagaagtatatgagaaactaaactattcccttgg

SEQ ID NO: 3345 - protein, 314 aa, Arabidopsis thaliana
MESLLHASSSLVSLRPRIDGRDSFINPSRVCLNPSLGRRGSKPLPLVAAAKKKKSKKDDNHNFSARPDEATGPFPESILLKEKKIDEEGDLLPEFADAEEKELYQFLDLQLQSDLNEERMRHYEVVYLIHEKHAEEVESINQKVQDYLKEKKGKVWRFSDWGMRRLAYKIQKAENAHYILMNFEIEAKYLNEFKGLLDSDERVIRHLVMKRDEAITEDCPPPPEFHSVRAGDEYYDDDEEEEIEEDEDEGEGEDEEDADNIEYEVDDDGNVVMVLYGDEEEGEEEEDGASEQEEGQDKSTNGRRETRRTVNVGG

SEQ ID NO: 3346 - protein, 195 aa, Arabidopsis thaliana
MRHYEVVYLIHEKHAEEVESINQKVQDYLKEKKGKVWRFSDWGMRRLAYKIQKAENAHYILMNFEIEAKYLNEFKGLLDSDERVIRHLVMKRDEAITEDCPPPPEFHSVRAGDEYYDDDEEEEIEEDEDEGEGEDEEDADNIEYEVDDDGNVVMVLYGDEEEGEEEEDGASEQEEGQDKSTNGRRETRRTVNVGG

SEQ ID NO: 3347 - DNA, 968 bp, Arabidopsis thaliana
aaagcccgaccaaaagcttttgattcctcaagagtgaaaatggcgtcgtacacagtctcctttatccctttgacgctctctaatcctcggatctttgtttcgagacagaatggatctccctcgtcttcttctcggattcctctaacgtcttctctgttaggtaagaagcttctggcgacacaaccgtcgcatcgctgcttcgtccccaagctccggtgcttgacctcggccagcacggtcttaaacgtccctattgcgcaaccggagaatggttcttcggataagatcccaaaatggtcggcgagagctataaagtcacttgcaatgggagaattggaggctaggaagctcaagtatccaagtaccgggaccgaagccattctcatgggtattttagtcgaaggcactagcacagttgctaagttcctgagggggaatggagtcacacttttcaaggttcgagatgagacgttaagcctgctggggaaatcagacatgtactttttcagcccagagcatcctcctctaactgagccggctcaaaaggccattgcctgggccattgatgagaagaataaatctgatgtggatggggaactaaccacggcctacttgcttctgggggtttggtctcaaaaggattcagcaggccgccagattttggagaagctcgggtttaacgaagataaagccaaagaagttgagaaatcgatgaatgaagatgtagatttgagcttcaagaaacaaggtcaatagtgatgaggtttatatcgattagaaaagcttctgtaattgttatggagtagcaaaagcaactcttgattaaagactcggccaaagaccccactttcattagtattcactttccatacttgtttgtggttagtgtcatttagcttttccgcattatcacaatatacaactctggcaaatgattcagtgctttggttctccgataggtttttgtt

SEQ ID NO: 3348 - protein, 251 aa, Arabidopsis thaliana
KARPKAFDSSRVKMASYTVSFIPLTLSNPRIFVSRQNGSPSSSSRIPLTSSLLGKKLLATQPSHRCFVPKLRCLTSASTVLNVPIAQPENGSSDKIPKWSARAIKSLAMGELEARKLKYPSTGTEAILMGILVEGTSTVAKFLRGNGVTLFKVRDETLSLLGKSDMYFFSPEHPPLTEPAQKAIAWAIDEKNKSDVDGELTTAYLLLGVWSQKDSAGRQILEKLGFNEDKAKEVEKSMNEDVDLSFKKQGQ

SEQ ID NO: 3349 - protein, 238 aa, Arabidopsis thaliana
MASYTVSFIPLTLSNPRIFVSRQNGSPSSSSRIPLTSSLLGKKLLATQPSHRCFVPKLRCLTSASTVLNVPIAQPENGSSDKIPKWSARAIKSLAMGELEARKLKYPSTGTEAILMGILVEGTSTVAKFLRGNGVTLFKVRDETLSLLGKSDMYFFSPEHPPLTEPAQKAIAWAIDEKNKSDVDGELTTAYLLLGVWSQKDSAGRQILEKLGFNEDKAKEVEKSMNEDVDLSFKKQGQ

SEQ ID NO: 3350 - protein, 143 aa, Arabidopsis thaliana
MGELEARKLKYPSTGTEAILMGILVEGTSTVAKFLRGNGVTLFKVRDETLSLLGKSDMYFFSPEHPPLTEPAQKAIAWAIDEKNKSDVDGELTTAYLLLGVWSQKDSAGRQILEKLGFNEDKAKEVEKSMNEDVDLSFKKQGQ

SEQ ID NO: 3351 - DNA, 1204 bp, Arabidopsis thaliana
gtctcaattattctccccgcccctctatgtagacgtgtgaatattagagagattgataacgaactcctcacaacatcatatctcaagttcaccacccaaaagaaaaaacacacacacatcttagagagatgaaagagactaattttggcgagaaaacgcgcgttctggtagttggtgggacgggatcattggggaggaggattgtaagtgcgtgtttggctgagggacacgagacttatgttctccagcggccggagattggagtggacatcgagaaggtgcagctacttctttctttcaaaagactcggcgcacatcttgtggaaggctcattctccgatcaccaaagccttgtctctgccgtaaagcaagtcgacgtggttgtctccgccatgtccggtgtccacttccgcacccacaacatccccgttcagctcaagctcgtcgcagccatcaaagaggccggtaacgtcaagcgtttcttaccatcagaatttggaatggatccgtcacgtatgggacatgccatgccaccaggaagtgaaacatttgatcaaaaaatggaaatacgaaatgcaattaaggccgccgggatctcccacacatacctcgtcggtgcttgttttgccgcatacttcggcggaaatttatctcaaatgggaactttgttccctccgaaaaacaaagttgatatttatggggacggaaatgttaaagtggtgttcgtagatgaagatgacatggcaaaatatacagcgaagacgcttaatgatccccgaacgttgaataaaactgtgtatgttagacctaccgacaacattctcacacaaatggaactagttcagatatgggagaaactaaccgaaaaagagttggagaagacctatgtttcaggaaacgactttcttgctgacattgaagataaggagatatcacaccaagcgggactaggacacttttatcacatatactacgaaggttgtctcacagatcatgaagttggagacgacgaagaagctactaaactctatccggatgtgaagtacaaacgcatggatgaatatttgaaaattttcgtataatgttacatatatgtgaaacacatcgccatttccttatttttatgttttaccatggccttttgttttgtttgcttgaagatgttttccgaatttattttaaaatttaaatgtttcagttatgg

SEQ ID NO: 3352 - protein, 317 aa, Arabidopsis thaliana
MKETNFGEKTRVLVVGGTGSLGRRIVSACLAEGHETYVLQRPEIGVDIEKVQLLLSFKRLGAHLVEGSFSDHQSLVSAVKQVDVVVSAMSGVHFRTHNIPVQLKLVAAIKEAGNVKRFLPSEFGMDPSRMGHAMPPGSETFDQKMEIRNAIKAAGISHTYLVGACFAAYFGGNLSQMGTLFPPKNKVDIYGDGNVKVVFVDEDDMAKYTAKTLNDPRTLNKTVYVRPTDNILTQMELVQIWEKLTEKELEKTYVSGNDFLADIEDKEISHQAGLGHFYHIYYEGCLTDHEVGDDEEATKLYPDVKYKRMDEYLKIFV

SEQ ID NO: 3353 - protein, 229 aa, Arabidopsis thaliana
MSGVHFRTHNIPVQLKLVAAIKEAGNVKRFLPSEFGMDPSRMGHAMPPGSETFDQKMEIRNAIKAAGISHTYLVGACFAAYFGGNLSQMGTLFPPKNKVDIYGDGNVKVVFVDEDDMAKYTAKTLNDPRTLNKTVYVRPTDNILTQMELVQIWEKLTEKELEKTYVSGNDFLADIEDKEISHQAGLGHFYHIYYEGCLTDHEVGDDEEATKLYPDVKYKRMDEYLKIFV

SEQ ID NO: 3354 - protein, 193 aa, Arabidopsis thaliana
MDPSRMGHAMPPGSETFDQKMEIRNAIKAAGISHTYLVGACFAAYFGGNLSQMGTLFPPKNKVDIYGDGNVKVVFVDEDDMAKYTAKTLNDPRTLNKTVYVRPTDNILTQMELVQIWEKLTEKELEKTYVSGNDFLADIEDKEISHQAGLGHFYHIYYEGCLTDHEVGDDEEATKLYPDVKYKRMDEYLKIFV

SEQ ID NO: 3355 - DNA, 1040 bp, Arabidopsis thaliana
aaattatcggattctcagctcttctctcagaatctcagatcgtgttttgtttgcttcaccagagaagatcgaagacgaagaagacgagaaagagagataattagggtttagaatggcggaggatctagttctcgatacggcgatcagagattgggttctgattcctctctccgtagtgatggttctaatcggtattttgagatactttgtctctaagcttatgcgttctactccaactcctgatgctaagatggttaaagaagggcaagttgttattagagctcggaatcttaaagtcggtgctaattttatcccgccgaaatcattccgtgctcggagattctacttcagcaacgaggagaatggtttgctacatgttcccaagggagaagctcaaaatccacaagctgctatgttttctgatcctaacatggccatggatatgatgaagaaaaatctttctatgattattcctcagacactcacttttgcatgggtcaacttcttcttctctggatttgttgcagccaaaataccatttccactgactcagaggttcagatcaatgttacagaatggcattgacttgagcactgtcgatgttagctatgtgagtagtcgttcctggtacttcttgaacttgtttggattaagaggcttgttcagtctcattctcggagatgaaaatgccattgatgacacacaacgtatgatgcaaatgggtgggtttggatttgatgcatcaaagagtctgggtgcagagaaggatggtttagacataatccagcacgaatgggcactacctcgatttgagcagcgcgcagaatctgtattaagaaaactcgtgaagtagagagaaacacgataaggttttcagtgaaatctggtttacttcactcgatgttgaaaacattcgaactttgtagaaacttttacttgaaactgagtcttaacagtgagttcttgtgtttcagctcgtagattccgctctggttttcttttcgtcatctgtcaattattgtgacactcactactctctc

SEQ ID NO: 3356 - protein, 246 aa, Arabidopsis thaliana
MAEDLVLDTAIRDWVLIPLSVVMVLIGILRYFVSKLMRSTPTPDAKMVKEGQVVIRARNLKVGANFIPPKSFRARRFYFSNEENGLLHVPKGEAQNPQAAMFSDPNMAMDMMKKNLSMIIPQTLTFAWVNFFFSGFVAAKIPFPLTQRFRSMLQNGIDLSTVDVSYVSSRSWYFLNLFGLRGLFSLILGDENAIDDTQRMMQMGGFGFDASKSLGAEKDGLDIIQHEWALPRFEQRAESVLRKLVK

SEQ ID NO: 3357 - protein, 224 aa, Arabidopsis thaliana
MVLIGILRYFVSKLMRSTPTPDAKMVKEGQVVIRARNLKVGANFIPPKSFRARRFYFSNEENGLLHVPKGEAQNPQAAMFSDPNMAMDMMKKNLSMIIPQTLTFAWVNFFFSGFVAAKIPFPLTQRFRSMLQNGIDLSTVDVSYVSSRSWYFLNLFGLRGLFSLILGDENAIDDTQRMMQMGGFGFDASKSLGAEKDGLDIIQHEWALPRFEQRAESVLRKLVK

SEQ ID NO: 3358 - protein, 210 aa, Arabidopsis thaliana
MRSTPTPDAKMVKEGQVVIRARNLKVGANFIPPKSFRARRFYFSNEENGLLHVPKGEAQNPQAAMFSDPNMAMDMMKKNLSMIIPQTLTFAWVNFFFSGFVAAKIPFPLTQRFRSMLQNGIDLSTVDVSYVSSRSWYFLNLFGLRGLFSLILGDENAIDDTQRMMQMGGFGFDASKSLGAEKDGLDIIQHEWALPRFEQRAESVLRKLVK

SEQ ID NO: 3359 - DNA, 1355 bp, Arabidopsis thaliana
cactcccatcaaagcaaaactatctttctccttctcattcctttttctctcactctcctccattaaagctctgcactttctcaaagagaatgttcatgggtaagatgggtcttttgggaattgctctgttttgttttgctgcaatggtgtgctctgttcatggctatgacgctggatgggtcaatgctcatgctaccttctatggtggaagtgatgcttcaggaacaatgggtggagcttgtggctacgggaacctctacagtcaaggttacgggaccaacacggcggcgttgagcactgctctgttcaacaacggtcttagctgcggggcttgttttgagatcaagtgtcagagcgacggcgcgtggtgtttacctggtgctatcattgtcacagccaccaatttctgtcctcctaacaacgctcttcccaataacgctggtggttggtgtaaccctccgcttcatcatttcgatctctctcagcctgtttttcaacgcattgctcagtacaaagctggtgttgtccctgtttcctacagaagggttccgtgtatgagaagaggaggtataagattcacaatcaacggtcactcttacttcaaccttgtcttggtgaccaatgttggtggtgctggagatgttcattcggttgcggttaaaggttctagaacaaggtggcaacaaatgtcaagaaactggggacagaactggcaaagcaacaatctcttaaacggtcaagcattgtcatttaaggtgactgctagtgatggtcgtaccgtcgtctctaacaacattgctccagctagttggtcctttggacaaaccttcaccggccgtcaattccgttaaaattgagtcaagttcggttttatatagttttagggtttgtgtagtagttggttgaggaaagagtagagaaagagagagggtttaaggctttttagggtttttaagtggagagccttgaaacttcttctttgactcttgagggttaaaatggagaaaagagcttgttttataagggctcttttagtcatgttaaggattagggttttagtaagtgggtgttgagtagtagagtggtgtgtcttaagggacctctatgtttcaccaatgggttcctttgttttatcacttttttattttgttttatcttcttttttcaagcttctgtcttgtggtttaaaaagcagaagtgggtaggggcagaggaggaatttcaccacccgcctatgtgtttttctttttgggtcgttttggtttatgttatgaagttgtaattgtaatgtagatcaaccaatgggtttgataagtgttttgttaccatactatgaattttatctgttttgtgtg

SEQ ID NO: 3360 - protein, 282 aa, Arabidopsis thaliana
LPSKQNYLSPSHSFFSHSPPLKLCTFSKRMFMGKMGLLGIALFCFAAMVCSVHGYDAGWVNAHATFYGGSDASGTMGGACGYGNLYSQGYGTNTAALSTALFNNGLSCGACFEIKCQSDGAWCLPGAIIVTATNFCPPNNALPNNAGGWCNPPLHHFDLSQPVFQRIAQYKAGVVPVSYRRVPCMRRGGIRFTINGHSYFNLVLVTNVGGAGDVHSVAVKGSRTRWQQMSRNWGQNWQSNNLLNGQALSFKVTASDGRTVVSNNIAPASWSFGQTFTGRQFR

SEQ ID NO: 3361 - protein, 253 aa, Arabidopsis thaliana
MFMGKMGLLGIALFCFAAMVCSVHGYDAGWVNAHATFYGGSDASGTMGGACGYGNLYSQGYGTNTAALSTALFNNGLSCGACFEIKCQSDGAWCLPGAIIVTATNFCPPNNALPNNAGGWCNPPLHHFDLSQPVFQRIAQYKAGVVPVSYRRVPCMRRGGIRFTINGHSYFNLVLVTNVGGAGDVHSVAVKGSRTRWQQMSRNWGQNWQSNNLLNGQALSFKVTASDGRTVVSNNIAPASWSFGQTFTGRQFR

SEQ ID NO: 3362 - protein, 251 aa, Arabidopsis thaliana
MGKMGLLGIALFCFAAMVCSVHGYDAGWVNAHATFYGGSDASGTMGGACGYGNLYSQGYGTNTAALSTALFNNGLSCGACFEIKCQSDGAWCLPGAIIVTATNFCPPNNALPNNAGGWCNPPLHHFDLSQPVFQRIAQYKAGVVPVSYRRVPCMRRGGIRFTINGHSYFNLVLVTNVGGAGDVHSVAVKGSRTRWQQMSRNWGQNWQSNNLLNGQALSFKVTASDGRTVVSNNIAPASWSFGQTFTGRQFR

SEQ ID NO: 3363 - DNA, 1121 bp, Arabidopsis thaliana
ttgtccatagttctcttttcctctcttatctctctaacatcctttagagagaaaaatcttttcagcgtcgttttttgatttccgatttcagtcggatctgtttatactcttgcttatatgcaagcttaataatttccggtcttggatcggacttttgtttccggttatgtccggtctcctttctcgcttatagcgagtttagatcttcttatcctctttggctttaatcatcgaagtcttcgattgtcttccaacttctctccgatatctccaattgctcgaggaataatatcttcgtcactctccttttgctcaaaatcgatgagcaacgaaggatcttagtctacatcaaattgggtgtagctggtggtggagcctccccggagttggtgcttcccggagaaattttgaagcgatttcatctaaacccggtagatttcgatgctatcttatacaggattgaagatcggcagaaggaatgaagaccccagcgttctagggctgacacgcgacggctaatcagcgcttgggagatgagcggcgaattatagacggtggtgcttcatgaaaagacgcgtggtttcaagggaaatacgtcttctccacgtgtcatatgctaactcataattatcatgatatgttaatgttaattatgtttttagtttgggccgtttaattcgcttgtactcttcttggaccttctgtatgttgccctttgggcatataaatgaatttggtcgacaaaaaaaaaaaaagaagaaatgcttttttgggcaggacagaacgtttaagtttttggatctgaccatgtaatggatggataaagctaaatatgtgggtggtacttcaagagggaatactggactagcagctgtgaggggagtaatgaggaatgaggcagaagactggtgcaagtgttttcactcaacattggtatatgctttgctctgttagcagaactttaggaagtatattatggtatgaacattacatgggaaaagggagttcaaaggctagaactcgaggtcgattcagagattgtagttggttttcttaaggtagagattattaatactcatctgctgtcattcctattatgtttgtgatatggctttttattg

SEQ ID NO: 3364 - protein, 54 aa, Arabidopsis thaliana
MRQKTGASVFTQHWYMLCSVSRTLGSILWYEHYMGKGSSKARTRGRFRDCSWFS

SEQ ID NO: 3365 - protein, 45 aa, Arabidopsis thaliana
MDKAKYVGGTSRGNTGLAAVRGVMRNEAEDWCKCFHSTLVYALLC

SEQ ID NO: 3366 - protein, 41 aa, Arabidopsis thaliana
MNITWEKGVQRLELEVDSEIVVGFLKVEIINTHLLSFLLCL

SEQ ID NO: 3367 - DNA, 2208 bp, Arabidopsis thaliana
attgggatataacataactaagaaagtatagccatcacatctgaagctctgagggcaatgtagttggaaccatctttgcccttgaagtcgttaccagcatacttggagtaaagtactgtgcttccggttgatactggtagaggcgtaattttaccttcctcgtctagggaacccggtccaactgctatcaccgtgccaatagaaggcttctctttggtagtctcggttaacaacaaccctccagctgttttctcctccgcctcagcaaccttaataaagactcggtcattcaaaggtttgagatctttgatgtcctctgtctcaagaatgccaacaatatcatcttccttgaggataagatgcttcacatcattgaactccacctcagttcctgcgtatttggagtagataatttgtgctccagtagggacagtgatatcaattttgttcttcccaatagttcttccttcacccacggcaacgacttcacctccttgaggttttgattgagcagtggatggaagtaagataccacctaaagtcttctcctctgcctccttgatcttcaccaaaactcgatctcccaatggcttaattgaagtatacttaggggcaacaacagaagcagctttgacaaccaaacgacggaactggctctgtctaagggtccctggtttcaaagatgaaaacttgacactcgaagctctgagaccatccagcgaggctaagctccttgctgacatagtcactggtgacgctgtaagttgagtcgccgccatttctccttgttgaggataagaaaaaggttgagactttcggaggataaaaccctaaaaattgcagtagagagagagttagatcggttctcgagaaccggagcaaatattttactctcttatttcgaagagagagagagaagaagacggaagctagaagaaatcgtttttgatcggagatagtgtatgagctagttgtttgtaatttgacggctctcgggaactgatctatctccggtgtctctgctttgtcggtagctacaggagtgaagagagtttctacaagggttttaatggaagatgatgactctccttcttctcgggatttggatgcacagaacccttatgatcgattgcttgctctagatacaagtaccgtagatccaaattgtaacttggattcggtttctgccatttatctagcgatgaagagctctaagctggaatgtgttgacgagcgtggtcaagattcccttattacttcggtatgcatggaggatgaagaggatgaggagctcgatgagtttgatccttatctgtttatcaagaacttgccgaacctgtcttctgttgtcccaactttcaggccggtcttgcttcctaaacaaacccgaagctgtcctcctatttctcttgtcctagaccttgatgaaactcttgtgcactcgactctagagccgtgtggtgaggtagatttcacattcccagtgaattttaatgaagaagagcatatggtgtatgtgcgatgccgtcctcacctcaaagagtttatggagagagtgtcccgactttttgagatcattatatttacagctagccaaagtatttatgctgagcaacttctgaacgtgcttgaccctaagagaaagctctttcgccatagagtgtaccgtgactcgtgtgttttctttgatggtaactacctcaaggatttgtcagtcctcgggcgtgatttatctcgtgttatcattgttgataactccccacaggcatttggtttccaagtggaaaatggagtgccaatagagagctggtttaatgacccatcagataaagaactccttcacttgctgccatttcttgaaagcctaattggagttgaagatgtaaggccaatgatcgccaagaaattcaatctaagggagaagattgatgcagctgtagccgcacctgaatatcctgctgaggcgggagatcctttcgaaaggtaaagtctatcgccaaaacacttttaaaggaagaatctggcacaagagcagaggttggagaagatatataagtatatcaatgttgttttcttattagtttaaattaagaacttggtatacagagaaagacaggatatgcctgtaaaaacagtttaaggcacaataactgtataattgttttctcgtttatttactagtacacatagattaacatttcaagtttc

SEQ ID NO: 3368 - protein, 305 aa, Arabidopsis thaliana
MEDDDSPSSRDLDAQNPYDRLLALDTSTVDPNCNLDSVSAIYLAMKSSKLECVDERGQDSLITSVCMEDEEDEELDEFDPYLFIKNLPNLSSVVPTFRPVLLPKQTRSCPPISLVLDLDETLVHSTLEPCGEVDFTFPVNFNEEEHMVYVRCRPHLKEFMERVSRLFEIIIFTASQSIYAEQLLNVLDPKRKLFRHRVYRDSCVFFDGNYLKDLSVLGRDLSRVIIVDNSPQAFGFQVENGVPIESWFNDPSDKELLHLLPFLESLIGVEDVRPMIAKKFNLREKIDAAVAAPEYPAEAGDPFER

SEQ ID NO: 3369 - protein, 261 aa, Arabidopsis thaliana
MKSSKLECVDERGQDSLITSVCMEDEEDEELDEFDPYLFIKNLPNLSSVVPTFRPVLLPKQTRSCPPISLVLDLDETLVHSTLEPCGEVDFTFPVNFNEEEHMVYVRCRPHLKEFMERVSRLFEIIIFTASQSIYAEQLLNVLDPKRKLFRHRVYRDSCVFFDGNYLKDLSVLGRDLSRVIIVDNSPQAFGFQVENGVPIESWFNDPSDKELLHLLPFLESLIGVEDVRPMIAKKFNLREKIDAAVAAPEYPAEAGDPFER

SEQ ID NO: 3370 - protein, 239 aa, Arabidopsis thaliana
MEDEEDEELDEFDPYLFIKNLPNLSSVVPTFRPVLLPKQTRSCPPISLVLDLDETLVHSTLEPCGEVDFTFPVNFNEEEHMVYVRCRPHLKEFMERVSRLFEIIIFTASQSIYAEQLLNVLDPKRKLFRHRVYRDSCVFFDGNYLKDLSVLGRDLSRVIIVDNSPQAFGFQVENGVPIESWFNDPSDKELLHLLPFLESLIGVEDVRPMIAKKFNLREKIDAAVAAPEYPAEAGDPFER

SEQ ID NO: 3371 - DNA, 2067 bp, Arabidopsis thaliana
gaagcatcttatagtatttttagcttcattccttcttttgctctgatcaaagtcttctccttcccttctctctctctttcctcctctgcacatttctgggttcttctcttcttatgctctgtttcttttaagacacagaagaaacagtacagagttgagattttcttaaacaaaagtgaaaagagaagaaacaagtgacagctcaaacggacaaaaaccactcttgggtctttcttgcttctgattctttctcttctctaatagaagaaaacatctagaagctaaaaaaatgtcggaaggagtagaagcgatagtagcaaatgacaacggaacagatcaggtaaacggaaaccgtaccgggaaagataacgaagaacacgacggctccaccggttctaacctaagcaatttcctatggcacggtggctctgtctgggacgcttggttcagctgcgcatctaaccaagtggctcaagtgttattgacattaccgtactcgtttagtcaactaggaatgttatcaggaatagtacttcagatcttctatggtttactaggaagctggactgcttatctcatctctgttctctacgtcgaatacagagctcgtaaagaaaaagaaggcaaaagcttcaaaaaccacgtcattcagtggtttgaagtacttgatggattacttggttcatactggaaagcactaggactcgcatttaattgcactttcctcttgtttggatctgttatccaactcattgcttgtgccagtaacatttattacataaacgatcatctggacaagagaacatggacttacatatttggcgcgtgttgtgcaaccactgtctttataccgtcgtttcacaattaccgaatttggtcattccttggccttggaatgaccacttacaccgcttggtacttagccattgcctccatcatccacggccaggcggaaggtgtgaaacattcaggtccaacaaagctagtgctttattttacgggagccacaaatattttgtacacctttggaggtcacgcggttactgttgagattatgcatgctatgtggaaaccacagaagtttaagtacatttacttgatggcgacgttatacgtgttcacgctaacgattccgtcagctgccgccgtttactgggctttcggagacgcacttctcgaccactccaacgctttctctcttatgcccaagaacgcgtggcgtgacgccgctgttatcctcatgctcattcatcagtttataacgttcgggttcgcttgtacacctttgtactttgtgtgggagaaagtgattgggatgcatgacacaaagagcatttgcttaagggctttggctagattgcctgtggtcatacctatttggttcttagctattatcttcccctttttcggtccaatcaattccgctgtcggtgctcttcttgttagcttcaccgtctatatcatcccatctctcgctcacatgctcacttaccgatctgcctccgctcgtcagaatgcggcggagaagccaccgttctttatgccgagctggacggcgatgtacgtgttgaatgctttcgtggtggtttgggttcttatagtcggatttgggttcggtggatgggctagtgtaaccaactttgttcgtcaagtcgacacttttggtctctttgccaagtgttaccaatgtaaaccagctgcagccgccgcacatgccccggtctccgctttacaccaccgtctttgagagatcgagtcagggttcttctaatgcgtttgtggagggttcttaaaattatttgttcttcttttgtgttttgtgttcgtatacgtgaagggagtaaaagtcacgaaaatagtgtactttttacacacccctttaaatgcgtgctaagctcttaattatttttttctcttttggggttttgtatttttgttttcactccttagttttttttttaaaattgaatagtcgataatatgtagtgtgtgatttcttaatttggtattgttaaaacaataggctaagaaaatgtatcgtcttctctccttttacttgtctttagt

SEQ ID NO: 3372 - protein, 485 aa, Arabidopsis thaliana
MSEGVEAIVANDNGTDQVNGNRTGKDNEEHDGSTGSNLSNFLWHGGSVWDAWFSCASNQVAQVLLTLPYSFSQLGMLSGIVLQIFYGLLGSWTAYLISVLYVEYRARKEKEGKSFKNHVIQWFEVLDGLLGSYWKALGLAFNCTFLLFGSVIQLIACASNIYYINDHLDKRTWTYIFGACCATTVFIPSFHNYRIWSFLGLGMTTYTAWYLAIASIIHGQAEGVKHSGPTKLVLYFTGATNILYTFGGHAVTVEIMHAMWKPQKFKYIYLMATLYVFTLTIPSAAAVYWAFGDALLDHSNAFSLMPKNAWRDAAVILMLIHQFITFGFACTPLYFVWEKVIGMHDTKSICLRALARLPVVIPIWFLAIIFPFFGPINSAVGALLVSFTVYIIPSLAHMLTYRSASARQNAAEKPPFFMPSWTAMYVLNAFVVVWVLIVGFGFGGWASVTNFVRQVDTFGLFAKCYQCKPAAAAAHAPVSALHHRL

SEQ ID NO: 3373 - protein, 410 aa, Arabidopsis thaliana
MLSGIVLQIFYGLLGSWTAYLISVLYVEYRARKEKEGKSFKNHVIQWFEVLDGLLGSYWKALGLAFNCTFLLFGSVIQLIACASNIYYINDHLDKRTWTYIFGACCATTVFIPSFHNYRIWSFLGLGMTTYTAWYLAIASIIHGQAEGVKHSGPTKLVLYFTGATNILYTFGGHAVTVEIMHAMWKPQKFKYIYLMATLYVFTLTIPSAAAVYWAFGDALLDHSNAFSLMPKNAWRDAAVILMLIHQFITFGFACTPLYFVWEKVIGMHDTKSICLRALARLPVVIPIWFLAIIFPFFGPINSAVGALLVSFTVYIIPSLAHMLTYRSASARQNAAEKPPFFMPSWTAMYVLNAFVVVWVLIVGFGFGGWASVTNFVRQVDTFGLFAKCYQCKPAAAAAHAPVSALHHRL

SEQ ID NO: 3374 - protein, 283 aa, Arabidopsis thaliana
MTTYTAWYLAIASIIHGQAEGVKHSGPTKLVLYFTGATNILYTFGGHAVTVEIMHAMWKPQKFKYIYLMATLYVFTLTIPSAAAVYWAFGDALLDHSNAFSLMPKNAWRDAAVILMLIHQFITFGFACTPLYFVWEKVIGMHDTKSICLRALARLPVVIPIWFLAIIFPFFGPINSAVGALLVSFTVYIIPSLAHMLTYRSASARQNAAEKPPFFMPSWTAMYVLNAFVVVWVLIVGFGFGGWASVTNFVRQVDTFGLFAKCYQCKPAAAAAHAPVSALHHRL

SEQ ID NO: 3375 - DNA, 1610 bp, Arabidopsis thaliana
gaagagaacatctgtgagagatctgagacgtctggaaatgtgaagaaaacaaaaaaaaaaaagatctgagagagagagtttcgaaattctcgtgttcgtaagcaaaaatggtttgggagaaagagaagatcgtcggaagttgtatagtcggaggagctgcgttcgccgtcggagcttctttccttcatcttttccttaaaggtgagcttccgttaggattaggtttaggtttgtcttgtccatggcgcattttgagaaaacgaaaacctgttcgcgtttacatggatggttgcttcgatatgatgcactatggccactgcaacgctcttcgtcaagctcgtgctctcggtgaccaattggtcgtcggtgttgtttccgacgaagaaattatagccaacaaaggacctcctgttactcctcttcatgaaagaatgacaatggtgaaagctgtgaagtgggtggatgaagttatatctgatgctccttacgctattacggaagatttcatgaagaaattgttcgatgagtatcagatcgattacattatccatggtgatgatccttgtgttcttcctgatggtactgatgcttatgcacttgctaagaaggctggtcgttacaagcagattaagcgcactgaaggagtttctagcactgatatcgttggtcgtatgcttctttgtgtaagagaaagatccattagtgacactcatagtcgttcctctctgcaaaggcaatttagtcatgggcatagtagcccaaagtttgaggatggagcttcttctgctggtactcgtgtctcgcattttcttcctacttcccgcaggattgttcagttctccaatggaaaggggccaggacctgatgcacgcattatctacatagatggtgcttttgatcttttccatgctggccatgttgagattcttagacgtgctcgagagcttggagactttcttcttgttggtatacataatgaccagactgtcagtgctaaacgaggagcgcatcgccctattatgaatctccatgaaaggagcttaagcgttctggcgtgccgctacgtggatgaggtgataattggtgctccatgggaagtgtcgagagatacgatcacgacatttgacatctcgttggtggtacatgggacagtagccgagagcgatgattttcgaaaggaggaagataatccgtattctgtaccaattagcatgggcatattccaagttctagatagccctcttgatatcacaacgtccaccataatcaggaggattgtagcaaaccatgaagcttatcagaaacgtaatgcgaagaaggaagctagcgagaaaaagtattacgagcagaagtcgtttgtgtccggagactgatagagctatatgcttagctttttaaatctatctacatcttgtactttgactatagtaggatgtttttggttgagactccaaatgctacatactacattttgctatctagtttttactttacataaagagggccattgatggttttagtaccaattgcatcttttattttcactcttttggatctttcattttaccttttacttactttatttactgccacaaatatccttattggct

SEQ ID NO: 3376 - protein, 421 aa, Arabidopsis thaliana
MVWEKEKIVGSCIVGGAAFAVGASFLHLFLKGELPLGLGLGLSCPWRILRKRKPVRVYMDGCFDMMHYGHCNALRQARALGDQLVVGVVSDEEIIANKGPPVTPLHERMTMVKAVKWVDEVISDAPYAITEDFMKKLFDEYQIDYIIHGDDPCVLPDGTDAYALAKKAGRYKQIKRTEGVSSTDIVGRMLLCVRERSISDTHSRSSLQRQFSHGHSSPKFEDGASSAGTRVSHFLPTSRRIVQFSNGKGPGPDARIIYIDGAFDLFHAGHVEILRRARELGDFLLVGIHNDQTVSAKRGAHRPIMNLHERSLSVLACRYVDEVIIGAPWEVSRDTITTFDISLVVHGTVAESDDFRKEEDNPYSVPISMGIFQVLDSPLDITTSTIIRRIVANHEAYQKRNAKKEASEKKYYEQKSFVSGD

SEQ ID NO: 3377 - protein, 363 aa, Arabidopsis thaliana
MDGCFDMMHYGHCNALRQARALGDQLVVGVVSDEEIIANKGPPVTPLHERMTMVKAVKWVDEVISDAPYAITEDFMKKLFDEYQIDYIIHGDDPCVLPDGTDAYALAKKAGRYKQIKRTEGVSSTDIVGRMLLCVRERSISDTHSRSSLQRQFSHGHSSPKFEDGASSAGTRVSHFLPTSRRIVQFSNGKGPGPDARIIYIDGAFDLFHAGHVEILRRARELGDFLLVGIHNDQTVSAKRGAHRPIMNLHERSLSVLACRYVDEVIIGAPWEVSRDTITTFDISLVVHGTVAESDDFRKEEDNPYSVPISMGIFQVLDSPLDITTSTIIRRIVANHEAYQKRNAKKEASEKKYYEQKSFVSGD

SEQ ID NO: 3378 - protein, 357 aa, Arabidopsis thaliana
MMHYGHCNALRQARALGDQLVVGVVSDEEIIANKGPPVTPLHERMTMVKAVKWVDEVISDAPYAITEDFMKKLFDEYQIDYIIHGDDPCVLPDGTDAYALAKKAGRYKQIKRTEGVSSTDIVGRMLLCVRERSISDTHSRSSLQRQFSHGHSSPKFEDGASSAGTRVSHFLPTSRRIVQFSNGKGPGPDARIIYIDGAFDLFHAGHVEILRRARELGDFLLVGIHNDQTVSAKRGAHRPIMNLHERSLSVLACRYVDEVIIGAPWEVSRDTITTFDISLVVHGTVAESDDFRKEEDNPYSVPISMGIFQVLDSPLDITTSTIIRRIVANHEAYQKRNAKKEASEKKYYEQKSFVSGD

SEQ ID NO: 3379 - DNA, 746 bp, Arabidopsis thaliana
atatcttccttatccatattctcacaaaatctccattgttctctgagaaaacacaaaaatgatgtcatcaatggcactctcttctacttccctctgctcttctttcatctctcaacatccaaaactctccatcactgcttctcctccattgttccatacccaaacaaccaaacccatctctgtaaaacggaaaatcataactctagcagctccagagacactcaccgctgaaacagtcaccggaattgatacttccgacaacactccacaacaaacaataaaggtggtgaagccagatgagaaatcaagagtggtactcaagtttgtgtggatggagaagaacataggattaggattggaccaacatgtacctggacatggcacaatcccacttagtccttacttcttctggcctaggaaagatgcttgggaagagcttaagtctactcttgaagctaaaccatggatctctcagaagaagatgatcattcttctaaaccaagccactgatatcatcaatctctggcaacaaagtggcggcaatttaacttctcaataatctcttttttgatttctgcatttcaagaattcactttgtctatgattattattgctattgagagttttttgtttatctaaacaatatccaatcacattcaacataaaagattcatattattgcaaagagaaaatgataataaaagcaaaaaaaattaagcaactctgagttgttgtttccttgaagg

SEQ ID NO: 3380 - protein, 166 aa, Arabidopsis thaliana
MMSSMALSSTSLCSSFISQHPKLSITASPPLFHTQTTKPISVKRKIITLAAPETLTAETVTGIDTSDNTPQQTIKVVKPDEKSRVVLKFVWMEKNIGLGLDQHVPGHGTIPLSPYFFWPRKDAWEELKSTLEAKPWISQKKMIILLNQATDIINLWQQSGGNLTSQ

SEQ ID NO: 3381 - protein, 165 aa, Arabidopsis thaliana
MSSMALSSTSLCSSFISQHPKLSITASPPLFHTQTTKPISVKRKIITLAAPETLTAETVTGIDTSDNTPQQTIKVVKPDEKSRVVLKFVWMEKNIGLGLDQHVPGHGTIPLSPYFFWPRKDAWEELKSTLEAKPWISQKKMIILLNQATDIINLWQQSGGNLTSQ

SEQ ID NO: 3382 - protein, 162 aa, Arabidopsis thaliana
MALSSTSLCSSFISQHPKLSITASPPLFHTQTTKPISVKRKIITLAAPETLTAETVTGIDTSDNTPQQTIKVVKPDEKSRVVLKFVWMEKNIGLGLDQHVPGHGTIPLSPYFFWPRKDAWEELKSTLEAKPWISQKKMIILLNQATDIINLWQQSGGNLTSQ

SEQ ID NO: 3383 - DNA, 836 bp, Arabidopsis thaliana
atcttacatatattactcatcatcaagttcctactttctctctgacaaacatcacagagtaagtaagaatggtacagacgaagaagttcagaggtgtcaggcaacgccattggggttcttgggtcgctgagattcgtcatcctctcttgaaacggaggatttggctagggacgttcgagaccgcagaggaggcagcaagagcatacgacgaggccgccgttttaatgagcggccgcaacgccaaaaccaactttcccctcaacaacaacaacaccggagaaacttccgagggcaaaaccgatatttcagcttcgtccacaatgtcatcctcaacatcatcttcatcgctctcttccatcctcagcgccaaactgaggaaatgctgcaagtctccttccccatccctcacctgcctccgtcttgacacagccagctcccatatcggcgtctggcagaaacgggccggttcaaagtctgactccagctgggtcatgacggtggagctaggtcccgcaagctcctcccaagagactactagtaaagcttcacaagacgctattcttgctccgaccactgaagttgaaattggtggcagcagagaagaagtattggatgaggaagaaaaggttgctttgcaaatgatagaggagcttctcaatacaaactaaatcttatttgcttatatatatgtacctattttcattgctgatttacagccaaaataatcaattataccgtgtattttatagatgttttatattaaaaggttgttagctatatattgtttctctttttccacatttgtatctaataaagtattggtgtttgtaactaag

SEQ ID NO: 3384 - protein, 199 aa, Arabidopsis thaliana
MVQTKKFRGVRQRHWGSWVAEIRHPLLKRRIWLGTFETAEEAARAYDEAAVLMSGRNAKTNFPLNNNNTGETSEGKTDISASSTMSSSTSSSSLSSILSAKLRKCCKSPSPSLTCLRLDTASSHIGVWQKRAGSKSDSSWVMTVELGPASSSQETTSKASQDAILAPTTEVEIGGSREEVLDEEEKVALQMIEELLNTN

SEQ ID NO: 3385 - protein, 147 aa, Arabidopsis thaliana
MSGRNAKTNFPLNNNNTGETSEGKTDISASSTMSSSTSSSSLSSILSAKLRKCCKSPSPSLTCLRLDTASSHIGVWQKRAGSKSDSSWVMTVELGPASSSQETTSKASQDAILAPTTEVEIGGSREEVLDEEEKVALQMIEELLNTN

SEQ ID NO: 3386 - protein, 115 aa, Arabidopsis thaliana
MSSSTSSSSLSSILSAKLRKCCKSPSPSLTCLRLDTASSHIGVWQKRAGSKSDSSWVMTVELGPASSSQETTSKASQDAILAPTTEVEIGGSREEVLDEEEKVALQMIEELLNTN

SEQ ID NO: 3387 - DNA, 1038 bp, Arabidopsis thaliana
actcttattacttcctaaatccgatcgaaacaactgttgggttagtttctaatttccaagaatggcgcaagatcacgacgagacggagaataaaacctttgccgacgttgtcggtggcgatgatgtcggcgaaattgtcaacggaggaacaaagaatggctatcgtaaaccggactctgtggagaaggaagatgatgaggatttgaagagtctctattccttgatttgtctcacgatcggttcgattatgtttccagattcgaaaaccggtgatgcgtcttcgtttcttgaacgtgtaagaaactccgtcgctgaaaatgggcctaagcttcgagaagcttctgaaagaacaggacgcgagattcttctctggactcgtagaggcagctcgcttcgtgctctgcttgtcatcactatgggaacaatagttcttttgacaacaatggctttggttgtattcacactcttctttgtagctgcaacagccaatgctatcataatctctcttctgatttcacttgctgttgctggtggcttcttggcactcttctttctctgcttgactggtgtttacattggagccttatccgttgctgcattcgtcatctctaccgctacagtttctgctgtcgtttctgtcttaatagcttcaggttggattgggtttttctatgcggtgtggttgggaacaagaggaagcctacgcttggctaagcaatcggtttcagtggtgggatcagccatttcaggtaacactatcagtcgtcatcaacaccaagaccgggaggtaaacatcgaatcaaccaactgagaatccgtccttaccgcgtttgtaaataaaccccgacttttggttgttaatggaagcttgatataaatatgatctatggagtttgttgtgaagaagcagagaaagaatgataagaatatttcaaaatgcaacttgaaacattttgtgatcaatgtctacggatttttggatctatgtatgcatacattgtgtgttttatgtacttaagaaagaataatgatcagtag

SEQ ID NO: 3388 - protein, 249 aa, Arabidopsis thaliana
MAQDHDETENKTFADVVGGDDVGEIVNGGTKNGYRKPDSVEKEDDEDLKSLYSLICLTIGSIMFPDSKTGDASSFLERVRNSVAENGPKLREASERTGREILLWTRRGSSLRALLVITMGTIVLLTTMALVVFTLFFVAATANAIIISLLISLAVAGGFLALFFLCLTGVYIGALSVAAFVISTATVSAVVSVLIASGWIGFFYAVWLGTRGSLRLAKQSVSVVGSAISGNTISRHQHQDREVNIESTN

SEQ ID NO: 3389 - protein, 187 aa, Arabidopsis thaliana
MFPDSKTGDASSFLERVRNSVAENGPKLREASERTGREILLWTRRGSSLRALLVITMGTIVLLTTMALVVFTLFFVAATANAIIISLLISLAVAGGFLALFFLCLTGVYIGALSVAAFVISTATVSAVVSVLIASGWIGFFYAVWLGTRGSLRLAKQSVSVVGSAISGNTISRHQHQDREVNIESTN

SEQ ID NO: 3390 - protein, 131 aa, Arabidopsis thaliana
MGTIVLLTTMALVVFTLFFVAATANAIIISLLISLAVAGGFLALFFLCLTGVYIGALSVAAFVISTATVSAVVSVLIASGWIGFFYAVWLGTRGSLRLAKQSVSVVGSAISGNTISRHQHQDREVNIESTN

SEQ ID NO: 3391 - DNA, 764 bp, Arabidopsis thaliana
catcgctgtctggaacagcgaggactcgagaaccaaacatcgagcttgccttagagtttgtctcaagcttctccttttttggtattttgtcttaagcttccttgcttctctttcttcttcttctctactctttctctctatttcaaaccttcgttttctttccttttttgtataaaatcttaaaatcaaccaagacaatggaaatgaaattgctctttacatcggctttcacccaaatgttcggctactcgaaccatatggatcaagccagcaactgccaaagcacccgcaacaaaattataaagatgatgaagaaagaagaattcccaagtggattccaagtccctcttcactaccctaaatactccaagtctgattacgaagttatggatgatctccgccttgacttgctcctcaaacaatatggattctcctttgaaggatctcttgaagacaagagggtttttgcaattggatcatttctctggcctgatcagctttagatggtctatgttggtgttgaatgatcttatatcgctctccacatgcatatcaatgagcctatactcgagtggttgaatgtttttaaaattatgtcaaattaccatgtatatcaatcacttagtaatgttttagaactatgtcaaatactagtgtgtgttatatttctttgtgtgtggggatgttttgaagtatgcaattcttcacatatatatgtatcatatgagtgcattaataacatctttgatgtcatgtataacact

SEQ ID NO: 3392 - protein, 101 aa, Arabidopsis thaliana
MEMKLLFTSAFTQMFGYSNHMDQASNCQSTRNKIIKMMKKEEFPSGFQVPLHYPKYSKSDYEVMDDLRLDLLLKQYGFSFEGSLEDKRVFAIGSFLWPDQL

SEQ ID NO: 3393 - protein, 99 aa, Arabidopsis thaliana
MKLLFTSAFTQMFGYSNHMDQASNCQSTRNKIIKMMKKEEFPSGFQVPLHYPKYSKSDYEVMDDLRLDLLLKQYGFSFEGSLEDKRVFAIGSFLWPDQL

SEQ ID NO: 3394 - protein, 88 aa, Arabidopsis thaliana
MFGYSNHMDQASNCQSTRNKIIKMMKKEEFPSGFQVPLHYPKYSKSDYEVMDDLRLDLLLKQYGFSFEGSLEDKRVFAIGSFLWPDQL

SEQ ID NO: 3395 - DNA, 1293 bp, Arabidopsis thaliana
tttacggatttcacctacccaaattgtcttcccagaggcgaggacacacaacctcaatctgttcgtcgctgtcgcagatcggagagatgggtgtcgatttggaatcggtgtcggaagcaacctcgggagctattgggtcgcttctgagtacaacgatcttgtatcctcttgatacatgtaaatcaaagttccaagccgaggttcgagctcgtggtcagcaaaaatacagatatctttccgatgttatgtgggaggcaatttctaaaggacaagtcttttcactgtatcaaggccttggaactaagaattttcagtctttcatttctcagttcatctacttttatagctatagctatttcaagagagttcatagtgaaaggactggttctaaatcaattggaactaaggctaatttgctcattgctgctgctgctggggcttgtacttctgtcttaattcagcctctagatacagcttcatcaaggatgcaaactagtgagtttggagaatcaaaagggttgtggaagaccttaacagagggttcatgggcagacgcatttgatggcctagggatctctcttttattgacttcaaatcctgcaattcagtatacagtgtttgatcagctgaaacagcaccttcttaagcagaaaaatgcaaaagccgagaatggttcttctccggtagtgctctctgcctttatggcgtttgtcttaggtgcggtctccaaaagtgttgccaccgtgctcacatatccagcaatcaggtgcaaggtgatgattcaagctgcggatgagtcgaaggaaaacgaaacaaagaagccgagaagaagaacaaggaaaacaattccaggggttgtgtatgccatatggagaaaagaaggaatgttagggttctttaagggcttgcaggctcaaatcttgaagactgtcttgagctcagcattgctattgatgatcaaggagaaaatcacagcaacgacatggattctcattctagctatccgtagaaccctgtttctcacaaacacaaagggtaagttaagaagtccttagagactcccaccaccaagcttatttcacgtccttgtaagttgtattagatgatgaatgatctacatcagttatgtaaaattggttgtagccggattgtgttctaggtgggttattgtgtgtagttggggtgtaataaaagtaagaatctttgtgtagaagaatcaaagaaaatgatgtaatatgaacgtttcttaagaaactcaaatttataacattattgtatggattgttgagcttc

SEQ ID NO: 3396 - protein, 350 aa, Arabidopsis thaliana
YGFHLPKLSSQRRGHTTSICSSLSQIGEMGVDLESVSEATSGAIGSLLSTTILYPLDTCKSKFQAEVRARGQQKYRYLSDVMWEAISKGQVFSLYQGLGTKNFQSFISQFIYFYSYSYFKRVHSERTGSKSIGTKANLLIAAAAGACTSVLIQPLDTASSRMQTSEFGESKGLWKTLTEGSWADAFDGLGISLLLTSNPAIQYTVFDQLKQHLLKQKNAKAENGSSPVVLSAFMAFVLGAVSKSVATVLTYPAIRCKVMIQAADESKENETKKPRRRTRKTIPGVVYAIWRKEGMLGFFKGLQAQILKTVLSSALLLMIKEKITATTWILILAIRRTLFLTNTKGKLRSP

SEQ ID NO: 3397 - protein, 322 aa, Arabidopsis thaliana
MGVDLESVSEATSGAIGSLLSTTILYPLDTCKSKFQAEVRARGQQKYRYLSDVMWEAISKGQVFSLYQGLGTKNFQSFISQFIYFYSYSYFKRVHSERTGSKSIGTKANLLIAAAAGACTSVLIQPLDTASSRMQTSEFGESKGLWKTLTEGSWADAFDGLGISLLLTSNPAIQYTVFDQLKQHLLKQKNAKAENGSSPVVLSAFMAFVLGAVSKSVATVLTYPAIRCKVMIQAADESKENETKKPRRRTRKTIPGVVYAIWRKEGMLGFFKGLQAQILKTVLSSALLLMIKEKITATTWILILAIRRTLFLTNTKGKLRSP

SEQ ID NO: 3398 - protein, 269 aa, Arabidopsis thaliana
MWEAISKGQVFSLYQGLGTKNFQSFISQFIYFYSYSYFKRVHSERTGSKSIGTKANLLIAAAAGACTSVLIQPLDTASSRMQTSEFGESKGLWKTLTEGSWADAFDGLGISLLLTSNPAIQYTVFDQLKQHLLKQKNAKAENGSSPVVLSAFMAFVLGAVSKSVATVLTYPAIRCKVMIQAADESKENETKKPRRRTRKTIPGVVYAIWRKEGMLGFFKGLQAQILKTVLSSALLLMIKEKITATTWILILAIRRTLFLTNTKGKLRSP

SEQ ID NO: 3399 - DNA, 1317 bp, Arabidopsis thaliana
gtattccaattttagaacttacgcgtcttcataatcttcctctttttttctttgtctttgatattcgaagtttttgtttattttttctttgcttaacccggagagacaccctctccataaatttagttttgatccctctgggttccttgaagaaaaaaacaccaattccattcatattcttcttcatacgttcaataattcttacgaggacgagatcttcctaacgtctttgatcttcttcattaggagataagtctaaactggtcgaagatgttgggagatttcatcatcagactccttgtattgatattagggtacacatacccagcattcgaatgctttaaaacggtggagaagaacaaagttgatatcgaggaactcagattttggtgccaatactggatacttttggcgctaatttcatcattcgagagggttggcgatttttttatctcatggttaccgttatacggagagatgaaagtagtcttcttcgtatatctctggtaccctaaaacaaagggaacgagacatgtgtatgaaacattgttgaagccatacatggctcgacacgagacagagattgacagaaagatcatggagttgcgagctcgagcttgggactttttcatcttttacttcaacaacttcgcccaggccggtcaatccaccttgatccagggttttcagtacgtactcgcccaatcggtccggttctctgccgctgcagctaaccaaccgccaacggagaggaacgtgaacatgaacgcgcagtcaccggtggagatggacaatgatcctccatcaccgcgcgctccaagaccgctgaacaaatcactatctgcgttgcgatcgctagagaagcaaacaagcagagggaggaagtggccgccaccaacaccaccaccaacaccaggccgagactccgccggaacatttaacggtgatgatggagtcaacattcctgatacaattccgggatcacccctcactgatgctcgagctaagctgcgacgttctaactccagaactcagccagcggcatagtaacgcaaacgtacatatacgtgactcgacaaagaaacccttttcgtttgtttaaagatatatagggaaagaaaagtgaatgaaagttttgaattgaaacaaaacagatttttttttttttttcatgttttctgtaaattgaagcagtaagtattaatacagcgagaatatttgtgtttgttttcgtttaaacttcccgctttaatccggatattgatttgagtttggatttcttcatatagctgattataaagatgcatttgagtggac

SEQ ID NO: 3400 - protein, 258 aa, Arabidopsis thaliana
MLGDFIIRLLVLILGYTYPAFECFKTVEKNKVDIEELRFWCQYWILLALISSFERVGDFFISWLPLYGEMKVVFFVYLWYPKTKGTRHVYETLLKPYMARHETEIDRKIMELRARAWDFFIFYFNNFAQAGQSTLIQGFQYVLAQSVRFSAAAANQPPTERNVNMNAQSPVEMDNDPPSPRAPRPLNKSLSALRSLEKQTSRGRKWPPPTPPPTPGRDSAGTFNGDDGVNIPDTIPGSPLTDARAKLRRSNSRTQPAA

SEQ ID NO: 3401 - protein, 189 aa, Arabidopsis thaliana
MKVVFFVYLWYPKTKGTRHVYETLLKPYMARHETEIDRKIMELRARAWDFFIFYFNNFAQAGQSTLIQGFQYVLAQSVRFSAAAANQPPTERNVNMNAQSPVEMDNDPPSPRAPRPLNKSLSALRSLEKQTSRGRKWPPPTPPPTPGRDSAGTFNGDDGVNIPDTIPGSPLTDARAKLRRSNSRTQPAA

SEQ ID NO: 3402 - protein, 161 aa, Arabidopsis thaliana
MARHETEIDRKIMELRARAWDFFIFYFNNFAQAGQSTLIQGFQYVLAQSVRFSAAAANQPPTERNVNMNAQSPVEMDNDPPSPRAPRPLNKSLSALRSLEKQTSRGRKWPPPTPPPTPGRDSAGTFNGDDGVNIPDTIPGSPLTDARAKLRRSNSRTQPAA

SEQ ID NO: 3403 - DNA, 1309 bp, Arabidopsis thaliana
acttttataaagttctattagagacggtggataggccatggctactactgttcatctcaactcattctccctcttcatccaatccagaggaagaagagacaactccatatcttccgtcaagagtctcaaaaaacgcacaggtttgtctccctcttctgccctcacctcacaaggtggcagagacatgattccaccagagggaaaatgcaatgatcacaactctgcttttgatttcaagttgtatatgatccgcaaagccgaatctgtaaatgcggctctcgacgtttctgtaccgctccgagaacccctcactgtccaggaagccgtgcggtactcattgctagcgggcggaaaacgtgtgaggcctctgctctgcattgccgtctgcgagcttgtgggaggcgacgaggctactgccatgtcagctgcttgcgcggttgagatgatccacacaagctctcttattcatgacgatcttccgtgcatggacaatgccgacctccgcagaggcaagcccaccaaccacaaggtatatggagaagacatggcggttttggcaggtgatgcactccttgcattggcgtttgagcacatgacggttgtgtcgagtgggttggtcgctcccgagaggatgattcgcgcggtggttgagctggccaggaccatagggactacagggctagttgctggacaaatgatagacctagccagcgaaagactgaatccagacaaggttggattggagcatctagagttcatccatctccacaaaacggcggcattgttggaggcagcggcggttttaggggttataatgggaggtggaacagaggaagagatcgaaaagcttagaaagtatgctaggtgtattggactactgtttcaggtggttgatgacattctcgacgtaacaaaatctactgaggaattgggaaagactgcaggaaaagacgtaatggctggaaagctgacgtatccaaggctgataggtttggagagatcaaaggaagttgcagagaaactgaggagagaagcagaggaacaacttctagggtttgatccaagtaaggcggcgcctctggtggctcttgctagctacatcgcttgcagacacaactgaatggactgatcatatcctcaatgcatcaatctcctaacaagtccttttacttagatctatggtcttgtttcttataaatcatctatgccgtgtgatcatctctctcatttgttttcaagttgtattatgtttttgaatcttaataatgtaatgttcgaaaaatatcaataagatttgctcataggaacg

SEQ ID NO: 3404 - protein, 360 aa, Arabidopsis thaliana
MATTVHLNSFSLFIQSRGRRDNSISSVKSLKKRTGLSPSSALTSQGGRDMIPPEGKCNDHNSAFDFKLYMIRKAESVNAALDVSVPLREPLTVQEAVRYSLLAGGKRVRPLLCIAVCELVGGDEATAMSAACAVEMIHTSSLIHDDLPCMDNADLRRGKPTNHKVYGEDMAVLAGDALLALAFEHMTVVSSGLVAPERMIRAVVELARTIGTTGLVAGQMIDLASERLNPDKVGLEHLEFIHLHKTAALLEAAAVLGVIMGGGTEEEIEKLRKYARCIGLLFQVVDDILDVTKSTEELGKTAGKDVMAGKLTYPRLIGLERSKEVAEKLRREAEEQLLGFDPSKAAPLVALASYIACRHN

SEQ ID NO: 3405 - protein, 311 aa, Arabidopsis thaliana
MIPPEGKCNDHNSAFDFKLYMIRKAESVNAALDVSVPLREPLTVQEAVRYSLLAGGKRVRPLLCIAVCELVGGDEATAMSAACAVEMIHTSSLIHDDLPCMDNADLRRGKPTNHKVYGEDMAVLAGDALLALAFEHMTVVSSGLVAPERMIRAVVELARTIGTTGLVAGQMIDLASERLNPDKVGLEHLEFIHLHKTAALLEAAAVLGVIMGGGTEEEIEKLRKYARCIGLLFQVVDDILDVTKSTEELGKTAGKDVMAGKLTYPRLIGLERSKEVAEKLRREAEEQLLGFDPSKAAPLVALASYIACRHN

SEQ ID NO: 3406 - protein, 291 aa, Arabidopsis thaliana
MIRKAESVNAALDVSVPLREPLTVQEAVRYSLLAGGKRVRPLLCIAVCELVGGDEATAMSAACAVEMIHTSSLIHDDLPCMDNADLRRGKPTNHKVYGEDMAVLAGDALLALAFEHMTVVSSGLVAPERMIRAVVELARTIGTTGLVAGQMIDLASERLNPDKVGLEHLEFIHLHKTAALLEAAAVLGVIMGGGTEEEIEKLRKYARCIGLLFQVVDDILDVTKSTEELGKTAGKDVMAGKLTYPRLIGLERSKEVAEKLRREAEEQLLGFDPSKAAPLVALASYIACRHN

SEQ ID NO: 3407 - DNA, 1221 bp, Arabidopsis thaliana
gaaaaccagactaaagggcagaaacgtcatttgacaaaaagaaggatgattctctccttcctctttccccaatgcaaagaaaaagcattatagacttttcaagttttccgatataggcacgaaatcgctatttctctcttcgacgaagctttgataatttgatctcaatcgatcgattctattgagaatttgtgtacctgttttcttataaggttaactaaggattgtggaatcagaagtgttgtgtttttgtgatcggagattatggattggggaaacgtaacggttgatgatctcttcgatgctctccgagaagttgactggtcgtctccgccgcgtcctccgtctgagttcttctcaaggttcaccgttcctaaatctgtccctaaatgggatagtcgcctcaagtgcaatctctactactaccgaacaaactatttcatcatgatcgtcgttatacttggattgggagtccttacaaggcctttagcgatcttcgctgcgcttttgacagcattaagtttggcatttctaaatgacagctttgcaggttcttttagtgagaaggcgacacgaaccgtcagaagattctctccacagttagctgctaaaatgagacctcctttgacacctgtcactcgtgggcgtccatcatcaaagagagcaatccatgtatgtggtcaaccccgttgggtttttgtcttgacatgctcacttgtgagttttgctctttggtatatttcctctggtttgctcagagtctcggttgcgctactcattgcacatcttgcaacaattcttcatgcaagcttgagaacaccgaacttgaaggcacgttttaacacatttagggaggaattccgagcagtatggcgtaactacagcgagatttagagtaattctttggcagcttgtaccaccatgatcgtgttctgctgaggacataacgctgtaaagaccaaacttactgcctttctccaagataaacccggtttcgttaacactgtactatggatgttcaatctggatttgttgctcaatgactgggatcatctgttttttctttgatttgagatttgagctctgagctctttttgctagcaaaatcctctctttttttttttgctaaagacttgtaaagctagctttgttgttcttcgttctaacacaaaaccctttgtgtaaagtcctagaatcgtttaatagcttgcatttttttcc

SEQ ID NO: 3408 - protein, 209 aa, Arabidopsis thaliana
MDWGNVTVDDLFDALREVDWSSPPRPPSEFFSRFTVPKSVPKWDSRLKCNLYYYRTNYFIMIVVILGLGVLTRPLAIFAALLTALSLAFLNDSFAGSFSEKATRTVRRFSPQLAAKMRPPLTPVTRGRPSSKRAIHVCGQPRWVFVLTCSLVSFALWYISSGLLRVSVALLIAHLATILHASLRTPNLKARFNTFREEFRAVWRNYSEI

SEQ ID NO: 3409 - protein, 149 aa, Arabidopsis thaliana
MIVVILGLGVLTRPLAIFAALLTALSLAFLNDSFAGSFSEKATRTVRRFSPQLAAKMRPPLTPVTRGRPSSKRAIHVCGQPRWVFVLTCSLVSFALWYISSGLLRVSVALLIAHLATILHASLRTPNLKARFNTFREEFRAVWRNYSEI

SEQ ID NO: 3410 - DNA, 2881 bp, Arabidopsis thaliana
acaatagtaattttatagtattatccaagtagcagttgtttggaggctatctacatgtctcagccactcgtattattctccaatctataaaaattcaaattttcaatctccctttcttaagattaaaagtggcaaagttgagattttgatcgtcttcttcctctggaaatttcaatcgaaactatatcttcagagatgcagaatctgtgaaattgtagaaacgaatttcacatttttttttgaagaaatgacgacgcagatatttcagttgccgttaaagtactgtgcttcgagtttttcttccaccggccaacggaattacggtttttcttcttcgccgtctccgattgtaatttgtaagagtaatggaatttccgatggtctttgggtgaagcggaggaagaacaatcggagatttggtagtttaatagttaagcaggagaaaggagacgtgacggagattcgagttccggttccgttaactttggagcaacaagagaaggagaaacaaaatcgagatgatgaagaagatgaaatcgatgaaggagatgtagatcctgaagatctcaaatacgtcaatgaaatcaaacgggtaattgagcttcttaggaggaatagagatatgatcttcagtgaggttaagttgactattatgattgaggatccaagggaactggaaagaaggaggcttcttggaatagaagatgcagatactccaagcagagatgatttggctgaagccttggaacaggtaaatgatgggaaaatccctaaagatcgtgcaactcttcggatgctgcatgaggaaatgatccgttggccaaatttagaggttgaggtttcaaagaagcaacgaggaaagtcaatgtacgctaaatccacagacactggaatagatccaaaagaagcagccaagagactcaacgtcgaatgggattcagctgctgcaattgaagaagtcgatgtcgatgatgaacaaggagtagtaaccaaagtcgcgggctatggagcgttgtacttcgtctcagctttaccagttatcattggtatctctgttgtattaattttgttttacaattccctacagtagagtcaaatccatttagttgttatacacaccaccaccaatgacccatcattgatgttttgtaacttaagaacatgaaatgagtttttcaattatttaatcatcttcttccttatacaacggcttgtggtctgcacaaattccaggtaaagtactccaaaaccttcggtaatattaaaataaatgtggttcgtgcgagcatatctatcatgatcagatcctgtctcaatcttgggcatagtctcatgtcaacgatgttaaatattttaaagcttatattatttgtttatgtttatagtaataaagtcaataacctttggctgagactaatacgcaggaaacgaaaaaaaagctggacgtgcatatcatgactcagtgtagctaccttaagccaccaaacatcgagatttcaggtcggaaaataaaatggtggctgcagtacttatgccaactattagtttcagagacgaaagtgctcgcgaggattggcaagttctaagcagaaacgattcaaagaagaagattctagtcaagcaaacgagtatgatgcaatccgagagagagatatcgatggatccgaaatcaatcaggtcgttgtctatgtcgggttcgttgagaaggaacgatagcttcgatatggttcgtttaccggcaatgtcacctcctagagacttagattcgcctatgcctcttcctttgcagccagtgcagactactggttctcctaaacaacgttcaggtctcatgcgggcgctcagaaacagggaacaagacagcctcccaaactctcctaaacaacgttcaggtctcatgcgggcgttcagaaacaaggaccaagacagccttccaaactcaaccactggttctcctaaacaacgttcaggtctcatgcgggccctcagaaacaaggaacaagacagcctcccaaactcaaccactggttctccaaaacaacgttcaggtctcatgcgggccctcagaaacaaggaacaagactcgtcttcggcgtcgtacaagagaagcaaatcttgtgggtctactagcaagacactctctcataagagcagcggaatcagaaactctttcttcattaaaaccgattcgaacaagagcatcagcaataatagtacattagaagacagattcaaatgcaacgctctgtgtttattcctccccggtttcagtaaaggaaaaccgatcagatcatcacagaaagacgattcttcttccttcacccgaaccaccacgatgacgagatcatcatcctctaccattaccgtttcaagaacagtctccgtcagagaatccaccaccactaccacagtgatctccgctcgagcttcaatggagaaattcgattgcggctcatatacttcggaatcctgcggagaggaaggaggaaatcacttctttgacttaccgtccgagctaatcaaaagtggttcaggtgataacgaccatgacgaaccggtttcagcggctttcgtgttcgacaaggaacctgttgagaaagagatcaaaggtgttttaaaggtttctggttcgaaaaacagaaaagcaatggagtctccttcactgcgtcaggttcgattctccacatcatcgccggtttcatacccgacgtctccggcgatctctccacggttattagaagccaccaagaattttaatgctttcttggaagctcaagccgtttaaatgatggactcttaactacaatataaaatataagctgtaatataccaaagtcttgctaaatatttttctttgggaaattaatatcgtttttcacct

SEQ ID NO: 3411 - protein, 423 aa, Arabidopsis thaliana
MVAAVLMPTISFRDESAREDWQVLSRNDSKKKILVKQTSMMQSEREISMDPKSIRSLSMSGSLRRNDSFDMVRLPAMSPPRDLDSPMPLPLQPVQTTGSPKQRSGLMRALRNREQDSLPNSPKQRSGLMRAFRNKDQDSLPNSTTGSPKQRSGLMRALRNKEQDSLPNSTTGSPKQRSGLMRALRNKEQDSSSASYKRSKSCGSTSKTLSHKSSGIRNSFFIKTDSNKSISNNSTLEDRFKCNALCLFLPGFSKGKPIRSSQKDDSSSFTRTTTMTRSSSSTITVSRTVSVRESTTTTTVISARASMEKFDCGSYTSESCGEEGGNHFFDLPSELIKSGSGDNDHDEPVSAAFVFDKEPVEKEIKGVLKVSGSKNRKAMESPSLRQVRFSTSSPVSYPTSPAISPRLLEATKNFNAFLEAQAV

SEQ ID NO: 3412 - protein, 417 aa, Arabidopsis thaliana
MPTISFRDESAREDWQVLSRNDSKKKILVKQTSMMQSEREISMDPKSIRSLSMSGSLRRNDSFDMVRLPAMSPPRDLDSPMPLPLQPVQTTGSPKQRSGLMRALRNREQDSLPNSPKQRSGLMRAFRNKDQDSLPNSTTGSPKQRSGLMRALRNKEQDSLPNSTTGSPKQRSGLMRALRNKEQDSSSASYKRSKSCGSTSKTLSHKSSGIRNSFFIKTDSNKSISNNSTLEDRFKCNALCLFLPGFSKGKPIRSSQKDDSSSFTRTTTMTRSSSSTITVSRTVSVRESTTTTTVISARASMEKFDCGSYTSESCGEEGGNHFFDLPSELIKSGSGDNDHDEPVSAAFVFDKEPVEKEIKGVLKVSGSKNRKAMESPSLRQVRFSTSSPVSYPTSPAISPRLLEATKNFNAFLEAQAV

SEQ ID NO: 3413 - protein, 384 aa, Arabidopsis thaliana
MMQSEREISMDPKSIRSLSMSGSLRRNDSFDMVRLPAMSPPRDLDSPMPLPLQPVQTTGSPKQRSGLMRALRNREQDSLPNSPKQRSGLMRAFRNKDQDSLPNSTTGSPKQRSGLMRALRNKEQDSLPNSTTGSPKQRSGLMRALRNKEQDSSSASYKRSKSCGSTSKTLSHKSSGIRNSFFIKTDSNKSISNNSTLEDRFKCNALCLFLPGFSKGKPIRSSQKDDSSSFTRTTTMTRSSSSTITVSRTVSVRESTTTTTVISARASMEKFDCGSYTSESCGEEGGNHFFDLPSELIKSGSGDNDHDEPVSAAFVFDKEPVEKEIKGVLKVSGSKNRKAMESPSLRQVRFSTSSPVSYPTSPAISPRLLEATKNFNAFLEAQAV

SEQ ID NO: 3414 - DNA, 1370 bp, Arabidopsis thaliana
aacaactcatatcaattttttaaaaaaaactctccatatatctattacttctacgctaactagagagggagattattgctcttaagtgatggaggaagtaaagaagagggattgtatggagaaggcaaggccattcatttcaatggtagtgttgcaagtagggctagcaggaatggatattctctcaaaggctgttctaaacaaaggcatgagcaattacgtccttgttgtttaccgtcacgccgttgcaaccatcgttatggccccgttcgccttctatttcgacaagaaggtgagaccgaagatgacactgatgatattcttcaagatatcactccttggtttactcgagccagtgatcgaccagaacttatactatctcgggatgaaatatacgacagctacatttgcaaccgccatgtacaacgtcctacccgcaatcactttcgtccttgcctatatatttggcctcgaaagagtaaagctacggtgcattaggagcacgggtaaggtggttggaacattggctactgttggaggagccatgatcatgacacttgtcaaaggcccagttctcgatctgttttggaccaaaggagtctctgcacataacacagctgggaccgacattcatagcgccatcaaaggcgcagtattggtcacgattggttgttttagctatgcatgtttcatgattctccaagcgataacattaaggacttaccctgctgagctctctctcacagcatggatatgtcttatggggacaatagaaggaaccgccgtggcattagtgatggagaaaggaaatcccagcgcatgggccattggttgggacactaaacttcttacagccacctatagtgggatagtgtgctcagcattggcttactacgttggaggagtggtgatgaaaaccagaggtcctgtgtttgtgacagctttcagtcctctttgtatgatcatagtagcgattatgtcgaccatcatctttgctgagcaaatgtaccttggaagggttcttggtgctgtagttatatgtgcaggattataccttgtgatatggggcaaaggaaaagattacaaatataattccacgctgcaattagatgacgaatcagcacaaccaaagctagaactaagcggaaacgggaaggataatgttgatcatgaagtcattactataagtaagcaaggagaacaaagaagaacagctgtagaaacagtctaacttaacggtatcggcacaaatgtttttcatggaggagtaattaacgtatagcagtttcatttgttgtccattatgtttcagagcaacaatgtcatagaattgctaactaccatgggagaataataattgtctaattaag

SEQ ID NO: 3415 - protein, 380 aa, Arabidopsis thaliana
MEEVKKRDCMEKARPFISMVVLQVGLAGMDILSKAVLNKGMSNYVLVVYRHAVATIVMAPFAFYFDKKVRPKMTLMIFFKISLLGLLEPVIDQNLYYLGMKYTTATFATAMYNVLPAITFVLAYIFGLERVKLRCIRSTGKVVGTLATVGGAMIMTLVKGPVLDLFWTKGVSAHNTAGTDIHSAIKGAVLVTIGCFSYACFMILQAITLRTYPAELSLTAWICLMGTIEGTAVALVMEKGNPSAWAIGWDTKLLTATYSGIVCSALAYYVGGVVMKTRGPVFVTAFSPLCMIIVAIMSTIIFAEQMYLGRVLGAVVICAGLYLVIWGKGKDYKYNSTLQLDDESAQPKLELSGNGKDNVDHEVITISKQGEQRRTAVETV

SEQ ID NO: 3416 - protein, 371 aa, Arabidopsis thaliana
MEKARPFISMVVLQVGLAGMDILSKAVLNKGMSNYVLVVYRHAVATIVMAPFAFYFDKKVRPKMTLMIFFKISLLGLLEPVIDQNLYYLGMKYTTATFATAMYNVLPAITFVLAYIFGLERVKLRCIRSTGKVVGTLATVGGAMIMTLVKGPVLDLFWTKGVSAHNTAGTDIHSAIKGAVLVTIGCFSYACFMILQAITLRTYPAELSLTAWICLMGTIEGTAVALVMEKGNPSAWAIGWDTKLLTATYSGIVCSALAYYVGGVVMKTRGPVFVTAFSPLCMIIVAIMSTIIFAEQMYLGRVLGAVVICAGLYLVIWGKGKDYKYNSTLQLDDESAQPKLELSGNGKDNVDHEVITISKQGEQRRTAVETV

SEQ ID NO: 3417 - protein, 362 aa, Arabidopsis thaliana
MVVLQVGLAGMDILSKAVLNKGMSNYVLVVYRHAVATIVMAPFAFYFDKKVRPKMTLMIFFKISLLGLLEPVIDQNLYYLGMKYTTATFATAMYNVLPAITFVLAYIFGLERVKLRCIRSTGKVVGTLATVGGAMIMTLVKGPVLDLFWTKGVSAHNTAGTDIHSAIKGAVLVTIGCFSYACFMILQAITLRTYPAELSLTAWICLMGTIEGTAVALVMEKGNPSAWAIGWDTKLLTATYSGIVCSALAYYVGGVVMKTRGPVFVTAFSPLCMIIVAIMSTIIFAEQMYLGRVLGAVVICAGLYLVIWGKGKDYKYNSTLQLDDESAQPKLELSGNGKDNVDHEVITISKQGEQRRTAVETV

SEQ ID NO: 3418 - DNA, 632 bp, Arabidopsis thaliana
gatttctgatctttgccctcttttcataagatagttagggttttagtcttttgtgtaataattcattgatcatgaacaagggagaagaaggaggagaagacaaggaagtggtttctcttcaaactctgagtaagaaaatggatgattttgcaaaagctagagattgggagaagtatcacagtccaaggaatctccttcttgctatggtgggtgaagtgggagagctatcagagatattccaatggaaaggagaagtagcaagaggatgtccagattggaaagaagaagagaaagtccatcttggagaagagttatcagatgttttgttgtatttggtgaggctttcggatgcgtgtggtgtcgatttaggcaaagccgctctgcgcaagatcgagcttaatgctattaagtatccagttcccaaaaagactgatgatcattgtgttggtgatggtgaagattcaagcagcaagattaagttgaatgaagaaaactaatctctcttattagtggttttgtgagtaagtttattgtgggtattttcttgttatgaagtaggagcatgatcaagaacatataatcttcgaaggcctctaattatatttcagatgaatctacttagtaccactttt

SEQ ID NO: 3419 - protein, 141 aa, Arabidopsis thaliana
MNKGEEGGEDKEVVSLQTLSKKMDDFAKARDWEKYHSPRNLLLAMVGEVGELSEIFQWKGEVARGCPDWKEEEKVHLGEELSDVLLYLVRLSDACGVDLGKAALRKIELNAIKYPVPKKTDDHCVGDGEDSSSKIKLNEEN

SEQ ID NO: 3420 - protein, 119 aa, Arabidopsis thaliana
MDDFAKARDWEKYHSPRNLLLAMVGEVGELSEIFQWKGEVARGCPDWKEEEKVHLGEELSDVLLYLVRLSDACGVDLGKAALRKIELNAIKYPVPKKTDDHCVGDGEDSSSKIKLNEEN

SEQ ID NO: 3421 - protein, 97 aa, Arabidopsis thaliana
MVGEVGELSEIFQWKGEVARGCPDWKEEEKVHLGEELSDVLLYLVRLSDACGVDLGKAALRKIELNAIKYPVPKKTDDHCVGDGEDSSSKIKLNEEN

SEQ ID NO: 3422 - DNA, 801 bp, Arabidopsis thaliana
aacgactttttgaagtgtgaaagcgaagggaccaacttctcataaataagtgaagattcatcgccaaaaatcaacaaaccttaagcaaaaaaaaaaaacctctgcatcaatggcgatttccaaactccatctactctgtcttctctcagtctttctctcccttcatcgtcttgttctttccggcaccgatggagaagatgaccttcttcttacagtattcaacaaatacagaacaggactaaacctaaaaaccttaacaaagaacgaaaacgcagaatgtctcgcagacgaagtcgtagaccaactaaagaaccaaccctgcacaaacactaataactcagctccagtccctggaaataacctcctcgctaaatgcagtctcaacacaaccgtagtcagagacggtgtgatcatgcaagtctgttttcctaagcatgataagaaccctgacttgagcaatttcaacagtgtcgtactcaagaacttgaatgattctaagatcactggaattggtattggttctggtgatatttgggttgttgtcatcctcactacaaacacaccggaaggcggctattctcttttaacaactactaactcaggagcttatgcattcggagttaatggccttgtttcttcaagtttcttgtttcttctcttttgtttcttcatgttttgagtcccttttttggtgttttttatgtcacctcgttgtctttggttcttgaatatgttgtgattatggtgagcaaatcgcctttcttaaagtttcctcttactaattgtgattgagtaaatacc

SEQ ID NO: 3423 - protein, 189 aa, Arabidopsis thaliana [sequence omitted]

SEQ ID NO: 3424 - DNA, 1252 bp, Arabidopsis thaliana
ctctgaaacggacatcgagaaattccaggagtgagttttgacaatcggagagaaatggggtcgacagaaaaagagcagacgacgcaacatcacccgcctcacatcagcagtctcgtcgtacgtccctccggaagcaacgacagagaagacggccgcaacgccgccggagactatgagcccggagaagtctctcgtgaccggccttcgtttaatcgctcggatcggtataagggtgacaatggtggacatagaactcgggcaagttctagctcaccaggccgtcgtggatatgaagatcacaagcatggctctgatcttaatcattcaggcgttccacctcgtggccgtgagttaagcagcagaagggaagcacctgggagacacagagactattccccacccttagctagaggtggagctggtgctcgtccttatcgaagaggtttagatgggcctgaacctccacatggaagggatggcatgagcagaaataatatatcaaaggtgcaaccaagagaaggagattggtactgtcttgatccattatgcagaaacttgaactttgcgagacgcgagtcctgctacaaatgcaagaggcatcgttatgcaccggctaatagtcctccactgcctcgccttcttcctcctcccatgaatcattccccaagaagagactttaatggctacagatctcctccgcgtggctggcccagagactacccgccgccaaggcatgaccatcccacatggagagacagagaacgagaccgtccgcattactcagaccatgagtaccctcctagcagaaggatagcatctgactgggcccatacagagccgctcccaaaacctcattatgacagacgaccacctctcagtccacctcgtggtggcagatggggacgagttttgagagagaggagcagatccccgccattgagagatgttccaccaccgccattgagagatggtccaccaccgtcattgagaggaggcggtccaccgctgcacagagattaccgccgtgacagtcactttgacagagaaagacgagacgatgggcgtggcggcagaggcagaatgggaaactcttactgatgcaaaaactgtgtatgtcttgggattttggtttagacagttcaaattttcgcggaatgtgaccttgtattacaccttagattctttgttcttgttagcaaaactcttgtgccattagtgcaaaaaccaaacaaatgagaagcaattttggtgc

SEQ ID NO: 3425 - protein, 347 aa, Arabidopsis thaliana
MGSTEKEQTTQHHPPHISSLVVRPSGSNDREDGRNAAGDYEPGEVSRDRPSFNRSDRYKGDNGGHRTRASSSSPGRRGYEDHKHGSDLNHSGVPPRGRELSSRREAPGRHRDYSPPLARGGAGARPYRRGLDGPEPPHGRDGMSRNNISKVQPREGDWYCLDPLCRNLNFARRESCYKCKRHRYAPANSPPLPRLLPPPMNHSPRRDFNGYRSPPRGWPRDYPPPRHDHPTWRDRERDRPHYSDHEYPPSRRIASDWAHTEPLPKPHYDRRPPLSPPRGGRWGRVLRERSRSPPLRDVPPPPLRDGPPPSLRGGGPPLHRDYRRDSHFDRERRDDGRGGRGRMGNSY

SEQ ID NO: 3426 - protein, 205 aa, Arabidopsis thaliana
MSRNNISKVQPREGDWYCLDPLCRNLNFARRESCYKCKRHRYAPANSPPLPRLLPPPMNHSPRRDFNGYRSPPRGWPRDYPPPRHDHPTWRDRERDRPHYSDHEYPPSRRIASDWAHTEPLPKPHYDRRPPLSPPRGGRWGRVLRERSRSPPLRDVPPPPLRDGPPPSLRGGGPPLHRDYRRDSHFDRERRDDGRGGRGRMGNSY

SEQ ID NO: 3427 - DNA, 918 bp, Arabidopsis thaliana
tcaacccaccagtccaagtcaaacctcctcaagccatcccctaatcctatatatcagtttcttctcgcaaaccacctcacaatctatcaacagttttaaaaaaagacataactcaaccaatctcactttgaaaaagacatgaacaaaacccgccttcgtgctctctccccaccttccggtatgcaacaccgtaagagatgtcgattgagaggtcgaaactacgtaaggccagaagttaaacaacgcaacttctcaaaagatgaagacgatctcatcctcaagcttcatgcacttcttggcaatagatggtcattgatagcgggaagattgccaggacgaaccgacaacgaagttaggatccattgggaaacttacctaaaaaggaagctcgtaaaaatgggaatcgacccaaccaatcatcgtctccaccatcacaccaactacatttctagacgtcacctccattcttcacataaggaacatgaaaccaagattattagtgatcaatcttcttcggtatccgaatcatgtggtgtaacaattttgcccattccaagtaccaattgctcggaggatagtactagtaccggacgaagtcatttgcctgacctaaacattggtctcatcccggccgtgacttctttgccagctctttgccttcaggactctagcgaatcctctaccaatggttcaacaggtcaagaaacgcttcttctattccgatgagaaatggtgtatttgtttgtacacatttgttatattacaaatgcacatattataatattcactagagagatggtataacgatgtttgaaatatgttaatcctgaattggaccggctggtcattgaacaactattctcttaaatgtccggttctgttttcagtgattagtattatagtagatcgttaataact

SEQ ID NO: 3428 - protein, 195 aa, Arabidopsis thaliana
MNKTRLRALSPPSGMQHRKRCRLRGRNYVRPEVKQRNFSKDEDDLILKLHALLGNRWSLIAGRLPGRTDNEVRIHWETYLKRKLVKMGIDPTNHRLHHHTNYISRRHLHSSHKEHETKIISDQSSSVSESCGVTILPIPSTNCSEDSTSTGRSHLPDLNIGLIPAVTSLPALCLQDSSESSTNGSTGQETLLLFR

SEQ ID NO: 3429 - protein, 181 aa, Arabidopsis thaliana
MQHRKRCRLRGRNYVRPEVKQRNFSKDEDDLILKLHALLGNRWSLIAGRLPGRTDNEVRIHWETYLKRKLVKMGIDPTNHRLHHHTNYISRRHLHSSHKEHETKIISDQSSSVSESCGVTILPIPSTNCSEDSTSTGRSHLPDLNIGLIPAVTSLPALCLQDSSESSTNGSTGQETLLLFR

SEQ ID NO: 3430 - protein, 109 aa, Arabidopsis thaliana
MGIDPTNHRLHHHTNYISRRHLHSSHKEHETKIISDQSSSVSESCGVTILPIPSTNCSEDSTSTGRSHLPDLNIGLIPAVTSLPALCLQDSSESSTNGSTGQETLLLFR

SEQ ID NO: 3431 - DNA, 1032 bp, Arabidopsis thaliana
agaggggtagtttggtaaattttcaaatgcccttatctcatttccgatcctccttcttcttgctaccgccttcgcacccattcataaaaaaggaaagacgcaatcttttcttgtctcttccattgcttcaaatcctcctaataaagctttcctctttcactttctaatctctttaatccgtttaaatccaatcccaaatacagattttgattacaaaaatctaacattttgctgatttgtgttttagggttctctcgtgttttttatgattttgattcccgtaaagattcaatcacttttctcatatctcttgttactgaatttgatccaatcgatcgataaaccaaacccagaagctatgagagtgcacccaattcccagaaacatcaacaacacattgatccatcatcatcatcataacccgacccgagaacccggaaagaatctccgacgattaccacatatcttcaaccgtgttctggagctaccattgaggtcagaagcagatgtagcagtggaagagagacacgactgttttcgatttgtggcggagacggtaggtctctgtaacggcgatggagaaatgagggcttatatggttgagattcatcctggtataaccaagatcgttgtgaggacaaatgggtcttcttctcttggtttgtctttagacgaattagagcttgacgtgtggcgttttaggttaccggaatcaactaggcctgagcttgttactgttgcttgtgttgatggtgatttgattgttactgtgcctaagaatgctgaagaagaagatgatgatggtggtggtggtgattttggacaaggtattggtagtggaaggcttgtgcttgttcagtgaatcaaagtaatgtcctctatgtaacatgagaagaagactaatctctaatcttcttcgtttcgttgatattgtgtagccttctgtttttgttgttggcaataaaagaaaagattgaatctttgatgttctcttattttgtaagatcaacaagggttgtttaaggttgtacc

SEQ ID NO: 3432 - protein, 198 aa, Arabidopsis thaliana
MILIPVKIQSLFSYLLLLNLIQSIDKPNPEAMRVHPIPRNINNTLIHHHHHNPTREPGKNLRRLPHIFNRVLELPLRSEADVAVEERHDCFRFVAETVGLCNGDGEMRAYMVEIHPGITKIVVRTNGSSSLGLSLDELELDVWRFRLPESTRPELVTVACVDGDLIVTVPKNAEEEDDDGGGGDFGQGIGSGRLVLVQ

SEQ ID NO: 3433 - protein, 167 aa, Arabidopsis thaliana
MRVHPIPRNINNTLIHHHHHNPTREPGKNLRRLPHIFNRVLELPLRSEADVAVEERHDCFRFVAETVGLCNGDGEMRAYMVEIHPGITKIVVRTNGSSSLGLSLDELELDVWRFRLPESTRPELVTVACVDGDLIVTVPKNAEEEDDDGGGGDFGQGIGSGRLVLVQ

SEQ ID NO: 3434 - DNA, 1257 bp, Arabidopsis thaliana
gtgatttctttctttgcctttaataaagcttcgtgctcaataggctgccacggaggcgagcctgaaaaatgccgatgacggttgtttccggtcgattctcaacggcgttgctccctacttgcttttccttgtcgcggttgcattccgtcaagtacgccgctcaaagacgggttgttttcgtttccagatcagctcacgcctcttcagcctccgtctccgttgagacaaattcgaattcgaatgtggattttgttatcgagaagaaggataagaacagaggagagaagaagattctagcttgtcccatctgttataactccttagcatggattagtcaacctaatggattaatagaatctgctgcctctggtattcaagtacaatgcaatacatgtaaaaggagttactcgggtaatgagacgcatcttgatttggctgttgctagtggaagcaagagatacagtgaaccgatgcctctttccactgagttatttaggactccactggtctcgtttctctatgagaggggttggcgtcagaatttcatatggggaggttttccaggaccagagaaagagtttgaaatggctaaggcctatctgaagcctgttttgggaggcaatatcattgatgctagttgtggaagtgggatgttctcgaggttattcactagaagtgatctattttctctggttattgctctagattactcagagaatatgctgcgacaatgctatgaactcttaaataaagaagaaaactttcccaacaaagagaaacttgttctagtccgagctgacattgctagactccctttcctttcgggttcagttgacgctgtccatgctggtgctgctctgcattgctggccttcaccatcctcagccgttgctgagataagccgtgttcttagacctggaggagtatttgtggccaccacatttatctatgacggtccattcagttttatccccttcttgaagaatcttcgtcaggaaataatgagatattcaggttctcacattttcctaaatgaacgtgagcttgaagatatctgcaaagcctgtggtctcgttaacttcactcgtgttagaaacgggccatttataatgctatctgcaacaaaacccagctaagctcaccctctttaaagtatatatacttttctgtaaaaaattggtataaagttataaacattataacaacttgagttccatacagtatacctaatttgtaaagctttttgcaaatgttcct

SEQ ID NO: 3435 - protein, 355 aa, Arabidopsis thaliana
MPMTVVSGRFSTALLPTCFSLSRLHSVKYAAQRRVVFVSRSAHASSASVSVETNSNSNVDFVIEKKDKNRGEKKILACPICYNSLAWISQPNGLIESAASGIQVQCNTCKRSYSGNETHLDLAVASGSKRYSEPMPLSTELFRTPLVSFLYERGWRQNFIWGGFPGPEKEFEMAKAYLKPVLGGNIIDASCGSGMFSRLFTRSDLFSLVIALDYSENMLRQCYELLNKEENFPNKEKLVLVRADIARLPFLSGSVDAVHAGAALHCWPSPSSAVAEISRVLRPGGVFVATTFIYDGPFSFIPFLKNLRQEIMRYSGSHIFLNERELEDICKACGLVNFTRVRNGPFIMLSATKPS

SEQ ID NO: 3436 - protein, 353 aa, Arabidopsis thaliana
MTVVSGRFSTALLPTCFSLSRLHSVKYAAQRRVVFVSRSAHASSASVSVETNSNSNVDFVIEKKDKNRGEKKILACPICYNSLAWISQPNGLIESAASGIQVQCNTCKRSYSGNETHLDLAVASGSKRYSEPMPLSTELFRTPLVSFLYERGWRQNFIWGGFPGPEKEFEMAKAYLKPVLGGNIIDASCGSGMFSRLFTRSDLFSLVIALDYSENMLRQCYELLNKEENFPNKEKLVLVRADIARLPFLSGSVDAVHAGAALHCWPSPSSAVAEISRVLRPGGVFVATTFIYDGPFSFIPFLKNLRQEIMRYSGSHIFLNERELEDICKACGLVNFTRVRNGPFIMLSATKPS

SEQ ID NO: 3437 - protein, 221 aa, Arabidopsis thaliana
MPLSTELFRTPLVSFLYERGWRQNFIWGGFPGPEKEFEMAKAYLKPVLGGNIIDASCGSGMFSRLFTRSDLFSLVIALDYSENMLRQCYELLNKEENFPNKEKLVLVRADIARLPFLSGSVDAVHAGAALHCWPSPSSAVAEISRVLRPGGVFVATTFIYDGPFSFIPFLKNLRQEIMRYSGSHIFLNERELEDICKACGLVNFTRVRNGPFIMLSATKPS

SEQ ID NO: 3438 - DNA, 1406 bp, Arabidopsis thaliana
ctcctctcttcaagcttttcacagaaaaccaccacccttctctctctactgcctttttaccacagagaagagagaggatccgtcggtgtgctagtctcactgacactacatccgatcgtcgccggtgacattttataagtgtggagtttacttcagctttattattcaggaattgatggatcagtacgagaaagttgagaagattggtgaaggaacttacggtgtggtttataaggcacgtgacaaagtgactaatgagacaattgctttgaagaagatcaggctagagcaggaggatgaaggtgttcctagcacagcaatcagagaaatctccctcttgaaagaaatgcagcacagcaacattgtcaaattgcaggatgtggtgcacagcgagaaacgtttgtatctggtttttgagtatcttgacttggatctcaaaaagcacatggattctactcctgatttctccaaggatctacatatgatcaaaacatatctttaccagattctccgtggaattgcgtattgccactctcatagggttctccatcgtgatctgaagccacagaatttgttgattgatcgccgcacaaactcactgaagcttgctgattttggactggccagagcattcggtatccctgtcaggacatttactcatgaggttgttactctctggtaccgagcaccagagatactcctaggatctcatcattactctacacctgttgatatttggtctgtggggtgcatatttgctgagatgatcagccaaaagcccttatttcctggagactccgagattgatcaactcttcaagattttcagaatcatgggaactccgtacgaggatacatggcgtggggtaacttctctaccggattataaatctgctttccctaaatggaaaccaacggacctagaaacttttgtccccaatctagatcccgatggagtcgatctcctttctaaaatgctgttaatggatccgaccaaaagaatcaacgcaagagccgccctggagcatgaatacttcaaggatcttggaggcatgccttagaaaggcataaaaccagtaatctccttcattctatatataattatcaatcctaagaaaatgaagaacaatattaatgggttttgtttattctttttctgagttcgtttcctacttatattctattacgaaaaaaaagaaagaagaagatttcgagtgtgtgtgtttttttacttctaagcttttgagatcagtttcttgtatcttattttacccagaatatagtatttccctatatgaaatatggtttttgttttgcaaaatgaccatattatgcaacttctcagctcttgattgtgccttgatagtgatcttttgaaatatatcccaaaaaacatcacttttttcg

SEQ ID NO: 3439 - protein, 294 aa, Arabidopsis thaliana [sequence omitted]

SEQ ID NO: 3440 - protein, 237 aa, Arabidopsis thaliana
MQHSNIVKLQDVVHSEKRLYLVFEYLDLDLKKHMDSTPDFSKDLHMIKTYLYQILRGIAYCHSHRVLHRDLKPQNLLIDRRTNSLKLADFGLARAFGIPVRTFTHEVVTLWYRAPEILLGSHHYSTPVDIWSVGCIFAEMISQKPLFPGDSEIDQLFKIFRIMGTPYEDTWRGVTSLPDYKSAFPKWKPTDLETFVPNLDPDGVDLLSKMLLMDPTKRINARAALEHEYFKDLGGMP

SEQ ID NO: 3441 - protein, 204 aa, Arabidopsis thaliana
MDSTPDFSKDLHMIKTYLYQILRGIAYCHSHRVLHRDLKPQNLLIDRRTNSLKLADFGLARAFGIPVRTFTHEVVTLWYRAPEILLGSHHYSTPVDIWSVGCIFAEMISQKPLFPGDSEIDQLFKIFRIMGTPYEDTWRGVTSLPDYKSAFPKWKPTDLETFVPNLDPDGVDLLSKMLLMDPTKRINARAALEHEYFKDLGGMP

SEQ ID NO: 3442 - DNA, 1190 bp, Arabidopsis thaliana
attttacaatacatttactccttcgtttttctcgagaaatctagagataattaataaggatcccgacgaaattaagctgtccaaattgcttgactagagaaaagcctttttcattgaagataatggcggaagtaaatggagtcattccaacaatagacttggaagaggttaatgatcagattctgaatgagaaaatccgtgaagcgagtgagagatggggatgtttcacggtgataaaccatggagtttctttgtctttgatggctgagatgaagaagactgttagagatctccatgaacgtccatatgagatgaaactgcgaaacaccgatgtgttactagggaatggttacaagcctctaagtgagttcaatcctttttatgaatcatttggtctttttgacatggcatctcctcaagctgtcaatagtttttgtgataaactcgacgcctcgccagatcaaagggagattttgctaaagtatgcaaaagctactgatgatcttgcgaggagtctagcaaggagattagcggagagctacggagtggtagagcccaattttttgagaggatggccaagccaatttcggatgaacaaatatcattttaaaccggattctgttggaaaactcggtgtgatattacacacggatcctggtttcttgacaattcttcaaggtgatgaggatgttggtggacttgaagccatggacaactcttcaggatcctttttccccatacacacattgccgaacacgcttcttgtcaaccttggtgacatggctacgatatggagcaatggaaggttatgcaatgtgaagcatagagtgcaatgcatagaggcaaaaatgaggattactattgcttcgttcctattaggaccagtggatagagatcttgaagctccagatgaatttgtggatgctgaacatccgcgactatacaagcctatcagtgacggaggactaagaaagattagacttagcaagcatcttcatgctggcgaatctctcaagttcataaccataaatgagttaagtgacgtcccaaagatagattaagcggactattaaatgtaccaacatatatctgtcttcaaatattttaattctcatatttttattttttgttaccctgaataatgtaataaatttcattgtgcttatagtatcacgcacgctttctattcc

SEQ ID NO: 3443 - protein, 312 aa, Arabidopsis thaliana
MAEVNGVIPTIDLEEVNDQILNEKIREASERWGCFTVINHGVSLSLMAEMKKTVRDLHERPYEMKLRNTDVLLGNGYKPLSEFNPFYESFGLFDMASPQAVNSFCDKLDASPDQREILLKYAKATDDLARSLARRLAESYGVVEPNFLRGWPSQFRMNKYHFKPDSVGKLGVILHTDPGFLTILQGDEDVGGLEAMDNSSGSFFPIHTLPNTLLVNLGDMATIWSNGRLCNVKHRVQCIEAKMRITIASFLLGPVDRDLEAPDEFVDAEHPRLYKPISDGGLRKIRLSKHLHAGESLKFITINELSDVPKID

SEQ ID NO: 3444 - protein, 266 aa, Arabidopsis thaliana
MAEMKKTVRDLHERPYEMKLRNTDVLLGNGYKPLSEFNPFYESFGLFDMASPQAVNSFCDKLDASPDQREILLKYAKATDDLARSLARRLAESYGVVEPNFLRGWPSQFRMNKYHFKPDSVGKLGVILHTDPGFLTILQGDEDVGGLEAMDNSSGSFFPIHTLPNTLLVNLGDMATIWSNGRLCNVKHRVQCIEAKMRITIASFLLGPVDRDLEAPDEFVDAEHPRLYKPISDGGLRKIRLSKHLHAGESLKFITINELSDVPKID

SEQ ID NO: 3445 - protein, 263 aa, Arabidopsis thaliana
MKKTVRDLHERPYEMKLRNTDVLLGNGYKPLSEFNPFYESFGLFDMASPQAVNSFCDKLDASPDQREILLKYAKATDDLARSLARRLAESYGVVEPNFLRGWPSQFRMNKYHFKPDSVGKLGVILHTDPGFLTILQGDEDVGGLEAMDNSSGSFFPIHTLPNTLLVNLGDMATIWSNGRLCNVKHRVQCIEAKMRITIASFLLGPVDRDLEAPDEFVDAEHPRLYKPISDGGLRKIRLSKHLHAGESLKFITINELSDVPKID

SEQ ID NO: 3446 - DNA, 2707 bp, Arabidopsis thaliana
aatcgaattacaaaccctaaatcattccattagatcttcttgatccctaagcaagtctcttcgttaacttttgtctttctccttaaaatggctacagaggagatagacatgagttattgggacgtgtcatggggagaattcaatgaagacaagaactcgtctatcttctgcgagtcacaccctcacatagtaaattcgcacgggatatgggaggttatgactttcaagagagggatgaacttctgggaatatccgctcccgaatctcgagatcttaatcttttctactttttttatatggcggcttctcgacatctcattcaacaaaattggtcttcgagtacctagattcacatatatgatgatcgcagggataattttaggtcaaacttgccatttcagcaacaagtcttggatccatgacatttttttccctgatgataaccgaccaaaggtggccgagaccctaggggctttcggcttcgttttatattggttcctcaaaggtgtgaccatggatgccgaatcgccatttaggacggagaaaaggtctagtgtgatcggattcattacagtaattatacccttgatttgtggcagcctcacttttagatatagagaacgaagaggggactcaagcatattaaggatggaatacaggttgatcatattcttgcaaagcatatccgcgttcacgagcatcgacacactcctaaaagacctccagatcaaacactcagagtttgggaggatagccctctctggggctatggtgactgacatgttggcttttggtgtaacattttttaatgcaatctactacgaaaaattgtacggcttcatgcaaaccgtaggtttctgcctctttgtcgtcgttatgatatgcgttgtgcggccggctatgtattgggtgatcaagcagactccagaagggaggccggtcaaggatttctacctctactcgatttttgggattgctttcgcctgcttcactttttttaacaaggttattcatctttttggacccgcgggatcatttgttttcggcttgacggttccaaatggatatcctttaggtactactttgattcaaaagtttgagagctttaatcttggctctattttgccactctttggatcattaaccatgatgcaagtagatctcttacggttgttcaaagagagtggagatttaatacggatggagggtcaaatctatgaggtcatttcctttattcttttggtgaataccacaaaattcgttgttaccaccataaccgcgtatgcttttaaaatgcccttgagagactcttttgctttagcccttgtgcttagtaataaggggatcttcgagctcgcctactacacgtacgcggttgaattaaagctaataaggccagaggttttcacaatcctagctgcctacaccctcttgaactctatctttataccaatgctcttggagctcgtgcatgacccaaccaaaagattcagatgctaccgaaaaaggaatttgggcatcttgaaagacggtgcggctctccaatgtattatgtgcgtctacagacctgatcacataacttccatgaccgacctcttggaaacttttagcccatcacaagattccccaatggcgtgtaacatacttcacctcgtcgagcttgtgggtcaagccaatcctatgttcatttcccaccagttgcaaaaaccagagcccggaagtacttctctgtctgacaatgtcataatctccttccgtggcttccaaagacaattctttgaatacacatcgttggatattttcacttccgtctccgtgtcccaacacatgcatgaggacatttgttggctagccctatccagaagcctatctttgattgtgcttcctttccaccgaacctggtccgttgatcgatccacggttatctccaacgatgataatctgagaatgctcaacgttaacgtcctgagacgagccccatgctctgttggaatcttcgtctatcgcaagcccatcgttgaatctcatatggctaagtcccacagcaagatatgtttgatttttaacggtggaaaagacgatagagaagctttggcgataacaaatcgaatgagactgacagaaaaacgaacaaggctaacgatcataagattcattccaaaatcttctgaaatggataacgatgagtgggagcaacagcaatcgattaacctaaaggagtccgtgactagcatcgttgggtccaacatcaaagaaaatgatgccaaggtgacatatatcgataaggcggtttctgatggatctgagacctcaagaatcttacgagcaatggcaaatgattatgacttgtttatcgttggaagcggcagcggaataggaactgaggctactagcggaattagtgaatggacagagttcaatgaattgggacctattggagatttattagcatcacatgaatatccttcaagtgcatcagtgttggttgttcaaaaacaagtgtacattcatcatacaaaaagccaaaggagaaaatctttctaagaaataatgcgagatatgttcaatgctcagcttttcaatgttgtatttctctacatcaataaacattagttttaggctgcttgaagttatggagtaattgattcgagtttcttctggatatgatgatataaacttcacgatttttttaatcaaattttgagtt

SEQ ID NO: 3447 - protein, 818 aa, Arabidopsis thaliana
MATEEIDMSYWDVSWGEFNEDKNSSIFCESHPHIVNSHGIWEVMTFKRGMNFWEYPLPNLEILIFSTFFIWRLLDISFNKIGLRVPRFTYMMIAGIILGQTCHFSNKSWIHDIFFPDDNRPKVAETLGAFGFVLYWFLKGVTMDAESPFRTEKRSSVIGFITVIIPLICGSLTFRYRERRGDSSILRMEYRLIIFLQSISAFTSIDTLLKDLQIKHSEFGRIALSGAMVTDMLAFGVTFFNAIYYEKLYGFMQTVGFCLFVVVMICVVRPAMYWVIKQTPEGRPVKDFYLYSIFGIAFACFTFFNKVIHLFGPAGSFVFGLTVPNGYPLGTTLIQKFESFNLGSILPLFGSLTMMQVDLLRLFKESGDLIRMEGQIYEVISFILLVNTTKFVVTTITAYAFKMPLRDSFALALVLSNKGIFELAYYTYAVELKLIRPEVFTILAAYTLLNSIFIPMLLELVHDPTKRFRCYRKRNLGILKDGAALQCIMCVYRPDHITSMTDLLETFSPSQDSPMACNILHLVELVGQANPMFISHQLQKPEPGSTSLSDNVIISFRGFQRQFFEYTSLDIFTSVSVSQHMHEDICWLALSRSLSLIVLPFHRTWSVDRSTVISNDDNLRMLNVNVLRRAPCSVGIFVYRKPIVESHMAKSHSKICLIFNGGKDDREALAITNRMRLTEKRTRLTIIRFIPKSSEMDNDEWEQQQSINLKESVTSIVGSNIKENDAKVTYIDKAVSDGSETSRILRAMANDYDLFIVGSGSGIGTEATSGISEWTEFNELGPIGDLLASHEYPSSASVLVVQKQVYIHHTKSQRRKSF

SEQ ID NO: 3448 - protein, 811 aa, Arabidopsis thaliana
MSYWDVSWGEFNEDKNSSIFCESHPHIVNSHGIWEVMTFKRGMNFWEYPLPNLEILIFSTFFIWRLLDISFNKIGLRVPRFTYMMIAGIILGQTCHFSNKSWIHDIFFPDDNRPKVAETLGAFGFVLYWFLKGVTMDAESPFRTEKRSSVIGFITVIIPLICGSLTFRYRERRGDSSILRMEYRLIIFLQSISAFTSIDTLLKDLQIKHSEFGRIALSGAMVTDMLAFGVTFFNAIYYEKLYGFMQTVGFCLFVVVMICVVRPAMYWVIKQTPEGRPVKDFYLYSIFGIAFACFTFFNKVIHLFGPAGSFVFGLTVPNGYPLGTTLIQKFESFNLGSILPLFGSLTMMQVDLLRLFKESGDLIRMEGQIYEVISFILLVNTTKFVVTTITAYAFKMPLRDSFALALVLSNKGIFELAYYTYAVELKLIRPEVFTILAAYTLLNSIFIPMLLELVHDPTKRFRCYRKRNLGILKDGAALQCIMCVYRPDHITSMTDLLETFSPSQDSPMACNILHLVELVGQANPMFISHQLQKPEPGSTSLSDNVIISFRGFQRQFFEYTSLDIFTSVSVSQHMHEDICWLALSRSLSLIVLPFHRTWSVDRSTVISNDDNLRMLNVNVLRRAPCSVGIFVYRKPIVESHMAKSHSKICLIFNGGKDDREALAITNRMRLTEKRTRLTIIRFIPKSSEMDNDEWEQQQSINLKESVTSIVGSNIKENDAKVTYIDKAVSDGSETSRILRAMANDYDLFIVGSGSGIGTEATSGISEWTEFNELGPIGDLLASHEYPSSASVLVVQKQVYIHHTKSQRRKSF

SEQ ID NO: 3449 - protein, 775 aa, Arabidopsis thaliana
MTFKRGMNFWEYPLPNLEILIFSTFFIWRLLDISFNKIGLRVPRFTYMMIAGIILGQTCHFSNKSWIHDIFFPDDNRPKVAETLGAFGFVLYWFLKGVTMDAESPFRTEKRSSVIGFITVIIPLICGSLTFRYRERRGDSSILRMEYRLIIFLQSISAFTSIDTLLKDLQIKHSEFGRIALSGAMVTDMLAFGVTFFNAIYYEKLYGFMQTVGFCLFVVVMICVVRPAMYWVIKQTPEGRPVKDFYLYSIFGIAFACFTFFNKVIHLFGPAGSFVFGLTVPNGYPLGTTLIQKFESFNLGSILPLFGSLTMMQVDLLRLFKESGDLIRMEGQIYEVISFILLVNTTKFVVTTITAYAFKMPLRDSFALALVLSNKGIFELAYYTYAVELKLIRPEVFTILAAYTLLNSIFIPMLLELVHDPTKRFRCYRKRNLGILKDGAALQCIMCVYRPDHITSMTDLLETFSPSQDSPMACNILHLVELVGQANPMFISHQLQKPEPGSTSLSDNVIISFRGFQRQFFEYTSLDIFTSVSVSQHMHEDICWLALSRSLSLIVLPFHRTWSVDRSTVISNDDNLRMLNVNVLRRAPCSVGIFVYRKPIVESHMAKSHSKICLIFNGGKDDREALAITNRMRLTEKRTRLTIIRFIPKSSEMDNDEWEQQQSINLKESVTSIVGSNIKENDAKVTYIDKAVSDGSETSRILRAMANDYDLFIVGSGSGIGTEATSGISEWTEFNELGPIGDLLASHEYPSSASVLVVQKQVYIHHTKSQRRKSF

SEQ ID NO: 3450 - DNA, 1693 bp, Arabidopsis thaliana
ataaaaatcccaacatctcctaaaatctcccaaactttcaaaaagttaaccaaaacccccaaacagaaaaatgagaaacaatttcgtccctataattctctccttcatcatcttcttgactccatcaatcgcagaacaagaaccttcaattctttctcccgtcgatcaactcctcaacaaaacaagctcatacctcgatttttcaacaaaattcaaccaaccaagaatcgaactaacaacatcaacgatcatcgccggcatactctctttcctagcttcatcaatctcaagcgccggtggaatcggcggtggaggtttatatgttccgataatgacaatcgtggccggtctcgatctaaagacagcttcaagcttctcagcttttatggttactggtggatctatagctaacgtgggatgcaatctattcgttagaaaccctaaatctggtggcaaaaccctaatcgacttcgatttagctcttttattggaaccatgtatgcttcttggagttagtattggtgtgatctgtaatcttgttttcccgaactggttgattacgagtctcttcgctgtttttcttgcgtggtcgacgttgaagacttttggaaatggactttattattggagattggaatcggagatggtgaagattagagaatcgaatagaatagaagaagatgatgatgaagaagataagattgagagtctaaagttgcctctcttggaggattatcagagaccaaagaggtttccatggattaagcttggagctttggtcattatttggctttcttactttgcagtttatcttcttcgaggaaacaaatatggcgagggaatcatatcgatcgagccatgtggaaacgcctactggctcatttcatcgtctcaaataccactaactctcttcttcactctctggatctgcttcagtgacaatgttcaaagccaacaacaatcagattaccatgtctcagtaaaggatgtagaagatttgagatcaaatgatggagcaagatcaaacaagtgtatgttccctgtaatggctctattagctggagttttgggtggtgtgttcggtattggaggtggaatgctcattagtcctcttcttcttcaagtcggtatcgctcccgaggtaactgcagcgacatgttctttcatggttcttttttcatcaacaatgtctgcgattcaatacttattactaggcatggaacataccggaaccgcaagtatatttacggtcatatgttttgtggcgtcactcgtgggactaaaggtggttcaaaaggtaataaccgagtatggaagggcttcgatcattgtgttctcggttggtatcgtcatggcattgagtattgtgttgatgacaagctatggagctcttgatgtttggaatgattatgtctctggtcgttacatgggtttcaagttaccttgttgagaccaagaaaagaaagttttggtttcttgggttacaagtttcataatacatgtgtatatcatatcaccatgttgttgctctttcatccatttggtcatttagagttaagaagctttctgtttctttcttttgtatgatttttatatcactattcagaatgcacatctcgtgcattcgaatatatggtcaaataaaagttatgttgtgaacctaaattcatatttcaatatcaaatttctatgc

SEQ ID NO: 3451 - protein, 459 aa, Arabidopsis thaliana
MRNNFVPIILSFIIFLTPSIAEQEPSILSPVDQLLNKTSSYLDFSTKFNQPRIELTTSTIIAGILSFLASSISSAGGIGGGGLYVPIMTIVAGLDLKTASSFSAFMVTGGSIANVGCNLFVRNPKSGGKTLIDFDLALLLEPCMLLGVSIGVICNLVFPNWLITSLFAVFLAWSTLKTFGNGLYYWRLESEMVKIRESNRIEEDDDEEDKIESLKLPLLEDYQRPKRFPWIKLGALVIIWLSYFAVYLLRGNKYGEGIISIEPCGNAYWLISSSQIPLTLFFTLWICFSDNVQSQQQSDYHVSVKDVEDLRSNDGARSNKCMFPVMALLAGVLGGVFGIGGGMLISPLLLQVGIAPEVTAATCSFMVLFSSTMSAIQYLLLGMEHTGTASIFTVICFVASLVGLKVVQKVITEYGRASIIVFSVGIVMALSIVLMTSYGALDVWNDYVSGRYMGFKLPC

SEQ ID NO: 3452 - protein, 372 aa, Arabidopsis thaliana
MTIVAGLDLKTASSFSAFMVTGGSIANVGCNLFVRNPKSGGKTLIDFDLALLLEPCMLLGVSIGVICNLVFPNWLITSLFAVFLAWSTLKTFGNGLYYWRLESEMVKIRESNRIEEDDDEEDKIESLKLPLLEDYQRPKRFPWIKLGALVIIWLSYFAVYLLRGNKYGEGIISIEPCGNAYWLISSSQIPLTLFFTLWICFSDNVQSQQQSDYHVSVKDVEDLRSNDGARSNKCMFPVMALLAGVLGGVFGIGGGMLISPLLLQVGIAPEVTAATCSFMVLFSSTMSAIQYLLLGMEHTGTASIFTVICFVASLVGLKVVQKVITEYGRASIIVFSVGIVMALSIVLMTSYGALDVWNDYVSGRYMGFKLPC

SEQ ID NO: 3453 - protein, 354 aa, Arabidopsis thaliana
MVTGGSIANVGCNLFVRNPKSGGKTLIDFDLALLLEPCMLLGVSIGVICNLVFPNWLITSLFAVFLAWSTLKTFGNGLYYWRLESEMVKIRESNRIEEDDDEEDKIESLKLPLLEDYQRPKRFPWIKLGALVIIWLSYFAVYLLRGNKYGEGIISIEPCGNAYWLISSSQIPLTLFFTLWICFSDNVQSQQQSDYHVSVKDVEDLRSNDGARSNKCMFPVMALLAGVLGGVFGIGGGMLISPLLLQVGIAPEVTAATCSFMVLFSSTMSAIQYLLLGMEHTGTASIFTVICFVASLVGLKVVQKVITEYGRASIIVFSVGIVMALSIVLMTSYGALDVWNDYVSGRYMGFKLPC

SEQ ID NO: 3454 - DNA, 1221 bp, Arabidopsis thaliana
aatttcgacacaaaaagccctaatctctgcttctgtaaagttcaacatttggcggagtcaaagaaacagagtgattctctgatccgattccggcgaaagaggacgaaacaaacggaacttgttcatcatcttctccagaaatgacgtcgtttcaggtgatgcgttcttcaaattcgagaaactcggatctatctcgtcgcatctcttctgcttctacttcttcttcgtctataagacctcaacaacagttccggcgagatctaacaagtgtcggttacggcggaagaaacgacggattatacagttcaaattcgatgacggtcgaagggattttacacgatactttcgcatcagatccaccagcaccaacggaatcttcactcttagatgcgtcgataaatctgatggatgcttctccagcaccaatggagataacaacaacgacggcttctgatgttgtggatcacggcggaggaacggagacgacgcgtggtgggaagagtgttgatgagatttggagagagatggtatcaggagaaggtaaagggatgaaggaagagacgtcggaagagataatgacgttagaggattttctagcgaaagctgcggtggaagacgaaacagcggtgacggcgtcggcggaggatttggatgtgaagattccggtgacgaattacggattcgatcattctgcaccgccgcataatccgtttcagatgattgataaagtagaaggatcaatagttgcgtttgggaatggtttagatgtttacggaggaggagctagagggaagagagcgagagtgatggttgagccattggataaagcagctgcacagagacagagaaggatgattaagaatcgtgaatctgcagctaggtctagagagaggaaacaagcttatcaagttgagttagaagctttggctgcgaagcttgaggaagagaatgagttgctttctaaggagattgaagataagaggaaagagagataccagaagttgatggagtttgtgattcctgttgttgagaaaccgaagcagcagccaccacggtttttacgcaggattcggtctttggaatggtgataagaggtatagacttttgaggattttagggtcttaatgttacttactttgtgtatgtgtgtgtgagagttgattcataatctgcagtagagtgtaatgattatggttaataacttatatattatattagatt

SEQ ID NO: 3455 - protein, 315 aa, Arabidopsis thaliana
MTSFQVMRSSNSRNSDLSRRISSASTSSSSIRPQQQFRRDLTSVGYGGRNDGLYSSNSMTVEGILHDTFASDPPAPTESSLLDASINLMDASPAPMEITTTTASDVVDHGGGTETTRGGKSVDEIWREMVSGEGKGMKEETSEEIMTLEDFLAKAAVEDETAVTASAEDLDVKIPVTNYGFDHSAPPHNPFQMIDKVEGSIVAFGNGLDVYGGGARGKRARVMVEPLDKAAAQRQRRMIKNRESAARSRERKQAYQVELEALAAKLEEENELLSKEIEDKRKERYQKLMEFVIPVVEKPKQQPPRFLRRIRSLEW

SEQ ID NO: 3456 - protein, 309 aa, Arabidopsis thaliana
MRSSNSRNSDLSRRISSASTSSSSIRPQQQFRRDLTSVGYGGRNDGLYSSNSMTVEGILHDTFASDPPAPTESSLLDASINLMDASPAPMEITTTTASDVVDHGGGTETTRGGKSVDEIWREMVSGEGKGMKEETSEEIMTLEDFLAKAAVEDETAVTASAEDLDVKIPVTNYGFDHSAPPHNPFQMIDKVEGSIVAFGNGLDVYGGGARGKRARVMVEPLDKAAAQRQRRMIKNRESAARSRERKQAYQVELEALAAKLEEENELLSKEIEDKRKERYQKLMEFVIPVVEKPKQQPPRFLRRIRSLEW

SEQ ID NO: 3457 - protein, 257 aa, Arabidopsis thaliana
MTVEGILHDTFASDPPAPTESSLLDASINLMDASPAPMEITTTTASDVVDHGGGTETTRGGKSVDEIWREMVSGEGKGMKEETSEEIMTLEDFLAKAAVEDETAVTASAEDLDVKIPVTNYGFDHSAPPHNPFQMIDKVEGSIVAFGNGLDVYGGGARGKRARVMVEPLDKAAAQRQRRMIKNRESAARSRERKQAYQVELEALAAKLEEENELLSKEIEDKRKERYQKLMEFVIPVVEKPKQQPPRFLRRIRSLEW

SEQ ID NO: 3458 - DNA, 1144 bp, Arabidopsis thaliana
agctatttggtttctctatccgattcgtctctctcacgccctcacgtttatccacctcatcctcaaaccaaaccacaagacctcttttttaagtaaccaatcacagagagatagagagagagaacagagtcaatgtcaatggcgtctatagcttcttcttcttccaccaccctactctcttcctctagggttcttcttccctccaagtcttctcttttatctcctaccgtctctttccccagaatcataccctcttcctcggcatcatcctcttctctctgttccgggttctccagtctcggttccctcaccaccaaccgctccgcctcacgccggaacttcgccgtcaaggctcaggctgatgatttaccactggtcggtaataaggcgcctgattttgaagctgaggcagtttttgatcaagagttcataaaggtgaagctctctgagtacattggcaaaaagtatgttattctattcttctaccctttggacttcacttttgtctgccccactgagattactgccttcagtgaccgttatgaagaatttgagaagctaaacaccgaagtattaggggtctctgtcgacagtgtgttctcgcatcttgcgtgggtccaaacagacagaaagtcgggagggctcggtgatctgaattatcctcttgtttcggatatcactaaatccatttcaaaatcgtttggagtgctcatccctgatcagggcattgcactgagagggcttttcatcatagacaaggaaggagtcattcagcattccaccatcaacaacctcggtattggccgaagtgttgatgagacaatgagaaccctccaggcattacagtatgttcaagaaaacccggatgaagtgtgccctgcgggatggaagccaggggagaaatcaatgaaacctgaccccaagctcagcaaagaatacttttcagctatctagaggctaagattgaacacatgtttggtgaaaattagcaatcagagttgttttattcgtcttttcaaagttggagcagagttgttatttttagccaaagaacctttgtatctatctcatctttctcctgtttctgctatgtgattctccttaaattgaatcaaaaataaagaaatccttcttttcttttgcc

SEQ ID NO: 3459 - protein, 273 aa, Arabidopsis thaliana
MSMASIASSSSTTLLSSSRVLLPSKSSLLSPTVSFPRIIPSSSASSSSLCSGFSSLGSLTTNRSASRRNFAVKAQADDLPLVGNKAPDFEAEAVFDQEFIKVKLSEYIGKKYVILFFYPLDFTFVCPTEITAFSDRYEEFEKLNTEVLGVSVDSVFSHLAWVQTDRKSGGLGDLNYPLVSDITKSISKSFGVLIPDQGIALRGLFIIDKEGVIQHSTINNLGIGRSVDETMRTLQALQYVQENPDEVCPAGWKPGEKSMKPDPKLSKEYFSAI

SEQ ID NO: 3460 - protein, 271 aa, Arabidopsis thaliana
MASIASSSSTTLLSSSRVLLPSKSSLLSPTVSFPRIIPSSSASSSSLCSGFSSLGSLTTNRSASRRNFAVKAQADDLPLVGNKAPDFEAEAVFDQEFIKVKLSEYIGKKYVILFFYPLDFTFVCPTEITAFSDRYEEFEKLNTEVLGVSVDSVFSHLAWVQTDRKSGGLGDLNYPLVSDITKSISKSFGVLIPDQGIALRGLFIIDKEGVIQHSTINNLGIGRSVDETMRTLQALQYVQENPDEVCPAGWKPGEKSMKPDPKLSKEYFSAI

SEQ ID NO: 3461 - DNA, 1235 bp, Arabidopsis thaliana
gaaaaaaaaaatccaatttagaaaaccgcgcgttggagggaaagccatagaaaactaaaagataacaaacattttaacaaacccaaacccaaaaattctcaaggaggccgaagaagaagaagaagaaatgagcgttaatggtgagaacaaggtctcaggaggagatagttcatcttcagatcgacctgttagagtctacgccgatgggatcttcgatttgttccatttcggccacgctcgtgccatcgaacaagccaaaaaatcgtttccgaatacgtatctgcttgttggatgttgcaatgacgaaattacgaacaaattcaaggggaaaactgtgatgactgaatctgagcgatacgaatctcttcgacattgcaagtgggttgatgaagtgattccagatgcaccatgggttcttacaacagagtttcttgataagcataagatagattacgtagctcacgatgctcttccctatgcggatactagtggagctggaaatgatgtttatgagtttgtaaagtcgattgggaagtttaaggagactaaacgaacagaggggatatcgacatctgatataatcatgagaatagtgaaagattataaccagtatgtgttgcgtaatctggaccgaggttattcaagagaagaactcggtgtcagcttcgttaaggagaagaggcttagagtgaatatgagattgaagaaactacaagagaaagttaaagaacaacaagaaaagatacaaaccgtagcaaaaactgctgggatgcaccatgatgagtggcttgaaaatgctgatcgttgggtggctggatttcttgaaatgtttgaggaaggttgtcataaaatgggaacagccatcagagatgggattcagcaacggctaatgaggcaagaatcggaagagaaccggcgattgcttcaaaatggactgacgatttccaaagacaatgacgatgaacaaatgtctgatgacaacgagtttgcagaagaagactgcgtcaatgtgagcaacaaagggattgaaacagtaaagaaatgagagattttgggtcatggttgaagtatttccagatacagaaccaaaatctactagatttcaccagtaatggtattaggcttgtttattcaactgtacatcaaactctgtttcaaaatctctacttgtgtctaaaactcaaatgcatcagaaatcaaaagcagtcatggatatatctatgatcaaacactcc

SEQ ID NO: 3462 - protein, 305 aa, Arabidopsis thaliana
MSVNGENKVSGGDSSSSDRPVRVYADGIFDLFHFGHARAIEQAKKSFPNTYLLVGCCNDEITNKFKGKTVMTESERYESLRHCKWVDEVIPDAPWVLTTEFLDKHKIDYVAHDALPYADTSGAGNDVYEFVKSIGKFKETKRTEGISTSDIIMRIVKDYNQYVLRNLDRGYSREELGVSFVKEKRLRVNMRLKKLQEKVKEQQEKIQTVAKTAGMHHDEWLENADRWVAGFLEMFEEGCHKMGTAIRDGIQQRLMRQESEENRRLLQNGLTISKDNDDEQMSDDNEFAEEDCVNVSNKGIETVKK

SEQ ID NO: 3463 - protein, 235 aa, Arabidopsis thaliana
MTESERYESLRHCKWVDEVIPDAPWVLTTEFLDKHKIDYVAHDALPYADTSGAGNDVYEFVKSIGKFKETKRTEGISTSDIIMRIVKDYNQYVLRNLDRGYSREELGVSFVKEKRLRVNMRLKKLQEKVKEQQEKIQTVAKTAGMHHDEWLENADRWVAGFLEMFEEGCHKMGTAIRDGIQQRLMRQESEENRRLLQNGLTISKDNDDEQMSDDNEFAEEDCVNVSNKGIETVKK

SEQ ID NO: 3464 - protein, 153 aa, Arabidopsis thaliana
MRIVKDYNQYVLRNLDRGYSREELGVSFVKEKRLRVNMRLKKLQEKVKEQQEKIQTVAKTAGMHHDEWLENADRWVAGFLEMFEEGCHKMGTAIRDGIQQRLMRQESEENRRLLQNGLTISKDNDDEQMSDDNEFAEEDCVNVSNKGIETVKK

SEQ ID NO: 3465 - DNA, 1821 bp, Arabidopsis thaliana
gaaaaaaagattggggaagctgacctctgcctttcctcctccattaatcaaggaatataaatcagctttaaactcagtcctcttatggaagacaaaaaagcaaatatttattcgtaaatataacttcagaaccctttcaacaaaactctctctgttctttctccgtggagaagttaaagatgacgatgtcggagaactcaagaaacttggaagctggtttgctactgaggaagaaccaaaacgacatcaacgaatgtcgtatcactgctgttgtacttttcagtactttcgtttctgtttgtggctctttctgcttcggttgtgcggcaggttattcatcagttgctcaaacagggatcataaatgatttaggtctctctgttgcacaatactccatgtttggttcaatcatgacttttggaggaatgattggtgccatcttcagcgggaaagttgcagatctcatgggtcgaaaagggactatgtggtttgctcaaattttctgcatcttcggttgggttgcagtagcattagcaaaagactccatgtggcttgatattggaagactatccacaggatttgcagttggtttattaagctatgtgataccagtttacattgcagaaataacaccaaaacatgttcgaggagcgtttgtatttgctaatcagctgatgcagagttgtggattgtctttattctacgtcattggaaattttgttcattggcgtaacttggccttaatcggtctcattccatgtgcgttgcaagttgtgactttgttctttattccagagtcccctagactactgggaaaatggggacatgaaaaagaatgtagagcttcattgcaaagtcttcgcggagatgatgcagatatctctgaagaagccaacactatcaaagaaaccatgatcttgtttgatgaaggaccaaaatcgcgggttatggatttgtttcagagaagatatgctccatctgttgttattggtgtgggactaatgcttctacaacaactctctggaagctcaggacttatgtactatgtcggtagcgtatttgataaaggagggtttccaagcagcattggctcaatgattcttgcagtgatcatgataccaaaagctctattgggtctgattttggttgagaaaatgggacgaagaccacttctattggcctctaccggtggaatgtgctttttcagcttgctcctcagtttttccttctgctttcggtcatatggcatgcttgatgagctcactccgattttcacatgtatcggtgtagtgggtttcatctcttcatttgccgtaggcatgggaggcttaccatggatcatcatgtctgagatattcccaatgaatgttaaagtttctgctgggactctggttaccttagccaactggtcctttggttggattgttgctttcgcctacaacttcatgctagagtggaacgcatcaggaacgttcttgatcttctttactatatgtggtgcgggtatagtctttatttatgcgatggtacccgaaactaaaggaagaacattggaagatatacaagcttctcttacagattttctacaatgagatcaagtttgacttgtttaaagttattcattttttcttagattacaattggggggaggtttatagttttttgttgtaattgttacctcatttgatgtgcaattgagaaagagatcacttgaacataaggtttagatatctctctgtctcagtaaattagcccaatgtatgtatagtatagtcccagttttacacccaaaaaaaagaaatataaaattgaactttaagg

SEQ ID NO: 3466 - protein, 470 aa, Arabidopsis thaliana
MTMSENSRNLEAGLLLRKNQNDINECRITAVVLFSTFVSVCGSFCFGCAAGYSSVAQTGIINDLGLSVAQYSMFGSIMTFGGMIGAIFSGKVADLMGRKGTMWFAQIFCIFGWVAVALAKDSMWLDIGRLSTGFAVGLLSYVIPVYIAEITPKHVRGAFVFANQLMQSCGLSLFYVIGNFVHWRNLALIGLIPCALQVVTLFFIPESPRLLGKWGHEKECRASLQSLRGDDADISEEANTIKETMILFDEGPKSRVMDLFQRRYAPSVVIGVGLMLLQQLSGSSGLMYYVGSVFDKGGFPSSIGSMILAVIMIPKALLGLILVEKMGRRPLLLASTGGMCFFSLLLSFSFCFRSYGMLDELTPIFTCIGVVGFISSFAVGMGGLPWIIMSEIFPMNVKVSAGTLVTLANWSFGWIVAFAYNFMLEWNASGTFLIFFTICGAGIVFIYAMVPETKGRTLEDIQASLTDFLQ

SEQ ID NO: 3467 - protein, 468 aa, Arabidopsis thaliana
MSENSRNLEAGLLLRKNQNDINECRITAVVLFSTFVSVCGSFCFGCAAGYSSVAQTGIINDLGLSVAQYSMFGSIMTFGGMIGAIFSGKVADLMGRKGTMWFAQIFCIFGWVAVALAKDSMWLDIGRLSTGFAVGLLSYVIPVYIAEITPKHVRGAFVFANQLMQSCGLSLFYVIGNFVHWRNLALIGLIPCALQVVTLFFIPESPRLLGKWGHEKECRASLQSLRGDDADISEEANTIKETMILFDEGPKSRVMDLFQRRYAPSVVIGVGLMLLQQLSGSSGLMYYVGSVFDKGGFPSSIGSMILAVIMIPKALLGLILVEKMGRRPLLLASTGGMCFFSLLLSFSFCFRSYGMLDELTPIFTCIGVVGFISSFAVGMGGLPWIIMSEIFPMNVKVSAGTLVTLANWSFGWIVAFAYNFMLEWNASGTFLIFFTICGAGIVFIYAMVPETKGRTLEDIQASLTDFLQ

SEQ ID NO: 3468 - protein, 398 aa, Arabidopsis thaliana
MFGSIMTFGGMIGAIFSGKVADLMGRKGTMWFAQIFCIFGWVAVALAKDSMWLDIGRLSTGFAVGLLSYVIPVYIAEITPKHVRGAFVFANQLMQSCGLSLFYVIGNFVHWRNLALIGLIPCALQVVTLFFIPESPRLLGKWGHEKECRASLQSLRGDDADISEEANTIKETMILFDEGPKSRVMDLFQRRYAPSVVIGVGLMLLQQLSGSSGLMYYVGSVFDKGGFPSSIGSMILAVIMIPKALLGLILVEKMGRRPLLLASTGGMCFFSLLLSFSFCFRSYGMLDELTPIFTCIGVVGFISSFAVGMGGLPWIIMSEIFPMNVKVSAGTLVTLANWSFGWIVAFAYNFMLEWNASGTFLIFFTICGAGIVFIYAMVPETKGRTLEDIQASLTDFLQ

SEQ ID NO: 3469 - DNA, 950 bp, Arabidopsis thaliana
catcaccttcaccttcaacatcaaacatcacatttcttcctcttttctctcttttttctcagtcttcaaagagtttcttagtaacccaaatcaatggcaggtatcaaagttttcggacacccagcttccattgccaccaggagagtcctcatcgccctccacgagaaaaacctcgactttgagctcgttcatgtcgaactcaaagacggtgagcacaagaaggagcctttcctctcccgcaacccttttggtcaggttccagcctttgaagatggagacctcaagctcttcgaatcaagagcgattactcagtacatagctcaccgatatgaaaaccaaggaaccaaccttctccaaaccgactccaagaacatatctcagtacgcaatcatggccattggaatgcaagtagaagatcaccagttcgacccagtggcttcaaagcttgcttttgaacaaatattcaagtccatctacggcttgaccacagacgaagccgttgttgcagaagaggaggctaagttagccaaggtccttgatgtctacgaggctaggctcaaggagttcaagtatttggctggtgaaactttcactttgactgatcttcaccacattcccgcgattcaatacctgctcggaactcccaccaagaagctcttcaccgagcgtccacgtgtcaatgagtgggtggctgaaatcaccaagaggccagcttccgagaaggttcagtgagaaatttctaaaaggaaaatatggttttgcttcagtcacagtaataatgctaagattaaataagcggctttctcattgcccaatttctcagtactttctttctgttgtatcctctgttttctttcagttatgtgagtgtgtgtgtatgctcttgagagtatctttggcaaaaactatttatctaatcttcaagctattctaaaataaatcaattagtt

SEQ ID NO: 3470 - protein, 212 aa, Arabidopsis thaliana
MAGIKVFGHPASIATRRVLIALHEKNLDFELVHVELKDGEHKKEPFLSRNPFGQVPAFEDGDLKLFESRAITQYIAHRYENQGTNLLQTDSKNISQYAIMAIGMQVEDHQFDPVASKLAFEQIFKSIYGLTTDEAVVAEEEAKLAKVLDVYEARLKEFKYLAGETFTLTDLHHIPAIQYLLGTPTKKLFTERPRVNEWVAEITKRPASEKVQ

SEQ ID NO: 3471 - protein, 113 aa, Arabidopsis thaliana
MAIGMQVEDHQFDPVASKLAFEQIFKSIYGLTTDEAVVAEEEAKLAKVLDVYEARLKEFKYLAGETFTLTDLHHIPAIQYLLGTPTKKLFTERPRVNEWVAEITKRPASEKVQ

SEQ ID NO: 3472 - protein, 109 aa, Arabidopsis thaliana
MQVEDHQFDPVASKLAFEQIFKSIYGLTTDEAVVAEEEAKLAKVLDVYEARLKEFKYLAGETFTLTDLHHIPAIQYLLGTPTKKLFTERPRVNEWVAEITKRPASEKVQ

SEQ ID NO: 3473 - DNA, 1405 bp, Arabidopsis thaliana
tggcagatattcaaacaactcaatcctcattccctttgtttcgcctctctggatttcgaagagctgagagattagggtttctcgattttcgagattagagtctaatccccaccaccagcatagctgatatcctggaggagagaatgacggattcgggtctaatgatgccggcggagattgctggaattctaaccacggcgattacgagttggtgggatgatgttaatgagtcaactcagtggcaagatgggatctttttcgctctttgtggtgcttatgctcttgtttccgccgttgctcttgttcaactgataaggatccaaatgagagtgcctgagtatggttggactactcagaaggtgtttcatcttatgaactttgtcgtcaatggagttcgtgcggttctgtttggatttcacatgcaagtatttcttgttcatcccaaggctctttgctgggtactattggatcttcctggccttctctttttctcggcatacacgctgcttgtgctgttctgggcagagatatatcaccaggctagaagcttacctacagataagctgcggataacctatatttctgtcaacgtggctgtatatttggctcagattggtatctgggcatacatctgggtacatgataacagcactgtggagttagttggaaagatatttatcgcagttgtgtctttcatcgccgcattaggcttcttgctgtatggaggaagattgtttttcatgctaagaaggttccctatcgagtcaaaaggaagaaggaagaaactccacgaggttggatctgtgacagctatatgcttcacctgcttcctcataagatgcgttgtggtggctgtatcagcttttgacaaggatttaacacttgatgttcttgatcatccggttctgaacttaatctactatatggtggtagaagtacttccatcggcactagtcctcttcattctccgaaagctacctccaaagagagtatcagctcaataccatccgatccagtagaaacctttgtcactgaaccatctcacacggtgagtatgatgctgtttaagagaagagtaaagattaaaaaaaaaattggggcaaaaaatgaaaggtgaagaagaaatcggtgtggaatctgcgtgagtttttggaatgcacgttcatataaatgattttacagcttttagttgttgtagcccgccgtgacttttggtttggtagtttatgtctgttaaaattataaattgctcttctgctactttgaaaaatctggtcagtagtacaagaggtttaacatttgttgcgtcgatggttgattgttatgttatgtttggtaaaaaataaacgaatgctcttctccagtttcctttatgcttttgtcaactgttacatcttcttctcct

SEQ ID NO: 3474 - protein, 291 aa, Arabidopsis thaliana
MTDSGLMMPAEIAGILTTAITSWWDDVNESTQWQDGIFFALCGAYALVSAVALVQLIRIQMRVPEYGWTTQKVFHLMNFVVNGVRAVLFGFHMQVFLVHPKALCWVLLDLPGLLFFSAYTLLVLFWAEIYHQARSLPTDKLRITYISVNVAVYLAQIGIWAYIWVHDNSTVELVGKIFIAVVSFIAALGFLLYGGRLFFMLRRFPIESKGRRKKLHEVGSVTAICFTCFLIRCVVVAVSAFDKDLTLDVLDHPVLNLIYYMVVEVLPSALVLFILRKLPPKRVSAQYHPIQ

SEQ ID NO: 3475 - protein, 285 aa, Arabidopsis thaliana
MMPAEIAGILTTAITSWWDDVNESTQWQDGIFFALCGAYALVSAVALVQLIRIQMRVPEYGWTTQKVFHLMNFVVNGVRAVLFGFHMQVFLVHPKALCWVLLDLPGLLFFSAYTLLVLFWAEIYHQARSLPTDKLRITYISVNVAVYLAQIGIWAYIWVHDNSTVELVGKIFIAVVSFIAALGFLLYGGRLFFMLRRFPIESKGRRKKLHEVGSVTAICFTCFLIRCVVVAVSAFDKDLTLDVLDHPVLNLIYYMVVEVLPSALVLFILRKLPPKRVSAQYHPIQ

SEQ ID NO: 3476 - protein, 284 aa, Arabidopsis thaliana
MPAEIAGILTTAITSWWDDVNESTQWQDGIFFALCGAYALVSAVALVQLIRIQMRVPEYGWTTQKVFHLMNFVVNGVRAVLFGFHMQVFLVHPKALCWVLLDLPGLLFFSAYTLLVLFWAEIYHQARSLPTDKLRITYISVNVAVYLAQIGIWAYIWVHDNSTVELVGKIFIAVVSFIAALGFLLYGGRLFFMLRRFPIESKGRRKKLHEVGSVTAICFTCFLIRCVVVAVSAFDKDLTLDVLDHPVLNLIYYMVVEVLPSALVLFILRKLPPKRVSAQYHPIQ

SEQ ID NO: 3477 - DNA, 1335 bp, Arabidopsis thaliana
acatcttccttgtttcttctctctctctctctcccctcaaacttaaattcacattttaatacttgttacttcaactataataataataataatctttcttcattatatattttcctctcctctcagatcttctctctcaccatcttctcttgagatcaagattgagtattcttgtctcaagaatcgatactcgagagctcttatggaccaaaatggtcataacgacgaagcagaaacagtttcatgcggcaacggcaactgcaaaagcaagatcgtgcctggagatgatcacggtggagatgagagtagtggtaccaagagaaggaagaagagaaaaacgcaacaaaagacaatgaaacgacgtgaattaatgtcgtattgtgagctaccggagtacatgaaagacaacgaatacatattgaattattacagagctgattggtccattagagatgctttcttcagcgtatttagtttccacaatgagtccctcaatgtttggacacatttgattggttttatcttctttgtggcactaaccgtcgccaatattattcatcacgacggattcttccccgtggatgcaaagagtccagggaatgtaacaagatggcccttcttcgttttcttaggaggctcaatgttctgcctactcgcaagcagcatttgtcacctcttctgttgccactcaaaagagcttaatgtcttccttctccgaatagactatgccggtatcaccgccatgatcatcacttccttcttcccaccaatcttctacatcttccagtgcactcctcggtggtacttcatctacctcgcaggcatcacatccatgggaatcttcacaatcatcacacttttcaccccatcactttccgctcccaagtaccgagctttccgcgctttgctctttgcctccatggggctgtttgggattgtcccagctgcccacgcgctagtggtcaattggggaaacccgcaaaggaacgtgacgctcgtgtacgagttgcttatggcagtgttctatcttgttggaacaggattctacgtagggagagtgccagaaaggcttaaaccgggatggtttgatcgtgtgggacatagtcatcagatcttccatgtgttcgttttgttgggtgctttgtctcactatgcagctgctctcttgttcttggactggcgtgaccacgttggttgttaaaccatatatttgtaattcttttaaatataatattattaatttgttgtatcgtggtgaacaaaattgtaataacccatttgttttaaattgaattgtaattcaacttgtgttaattgttatgtttgttgaatacg

SEQ ID NO: 3478 - protein, 332 aa, Arabidopsis thaliana
MDQNGHNDEAETVSCGNGNCKSKIVPGDDHGGDESSGTKRRKKRKTQQKTMKRRELMSYCELPEYMKDNEYILNYYRADWSIRDAFFSVFSFHNESLNVWTHLIGFIFFVALTVANIIHHDGFFPVDAKSPGNVTRWPFFVFLGGSMFCLLASSICHLFCCHSKELNVFLLRIDYAGITAMIITSFFPPIFYIFQCTPRWYFIYLAGITSMGIFTIITLFTPSLSAPKYRAFRALLFASMGLFGIVPAAHALVVNWGNPQRNVTLVYELLMAVFYLVGTGFYVGRVPERLKPGWFDRVGHSHQIFHVFVLLGALSHYAAALLFLDWRDHVGC

SEQ ID NO: 3479 - protein, 282 aa, Arabidopsis thaliana
MKRRELMSYCELPEYMKDNEYILNYYRADWSIRDAFFSVFSFHNESLNVWTHLIGFIFFVALTVANIIHHDGFFPVDAKSPGNVTRWPFFVFLGGSMFCLLASSICHLFCCHSKELNVFLLRIDYAGITAMIITSFFPPIFYIFQCTPRWYFIYLAGITSMGIFTIITLFTPSLSAPKYRAFRALLFASMGLFGIVPAAHALVVNWGNPQRNVTLVYELLMAVFYLVGTGFYVGRVPERLKPGWFDRVGHSHQIFHVFVLLGALSHYAAALLFLDWRDHVGC

SEQ ID NO: 3480 - protein, 276 aa, Arabidopsis thaliana
MSYCELPEYMKDNEYILNYYRADWSIRDAFFSVFSFHNESLNVWTHLIGFIFFVALTVANIIHHDGFFPVDAKSPGNVTRWPFFVFLGGSMFCLLASSICHLFCCHSKELNVFLLRIDYAGITAMIITSFFPPIFYIFQCTPRWYFIYLAGITSMGIFTIITLFTPSLSAPKYRAFRALLFASMGLFGIVPAAHALVVNWGNPQRNVTLVYELLMAVFYLVGTGFYVGRVPERLKPGWFDRVGHSHQIFHVFVLLGALSHYAAALLFLDWRDHVGC

SEQ ID NO: 3481 - DNA, 1335 bp, Arabidopsis thaliana
aaaattacatatccgccattgtttccggcaacgcaaactaccaaaaaaaataatggaggtcgaaagagtccaagacatttcatcttcttctctactaacagaagcaatcccgttggagttcatcagatcagagaaagaacaaccagcgatcacaacattccgaggtccaacgccggcgattcccgtcgtcgatctaagcgatcccgacgaagaaagcgtgaggcgcgcggtggtgaaagcgagtgaagaatgggggctattccaagtggttaaccacgggattccgacggagctgatacgacgtttacaagacgtcggaagaaaattcttcgagcttccttcgtcggagaaagaatccgtcgctaaaccggaagattcgaaagacattgaaggatacggaacaaagcttcagaaagatccagaaggtaaaaaagcttgggtcgatcatctcttccatcgaatctggccaccgtcatgcgtcaattacagattctggcctaagaatccacctgaatacagggaggtgaatgaagagtatgcagtgcatgtgaagaagctatcggagacgttattagggattctctcggatggattagggttaaagcgtgatgcgttgaaagaaggtctcggcggagagatggcggagtatatgatgaagattaactattatccgccgtgtcctcggccggatttagctttaggtgtaccggctcatacagatctcagtggaatcactcttcttgttcctaacgaagttcctggacttcaagttttcaaagatgatcactggttcgatgcagagtatattccctccgccgtcattgttcacatcggcgatcagattctgaggttgagtaatgggaggtataaaaatgtgttgcataggacgacggtggataaagagaagacgaggatgtcgtggccggttttcttggagcctccccgtgaaaagattgttggacctttaccggaactaaccggagatgataatcctccaaagtttaaaccgtttgctttcaaggattacagttaccgcaagctcaataaacttcctctggattgagaaaaatcaatacgagaagaataatttgtggttgtggaataggaagtggttcgttattgagttgttgttttcccgcggttgtgtctcttgcttattgttattttatgtttaaaataaagattaaaacatctacctacattgtgtgtgatgttgacatgtttttattgtgttgcgatgcctttgcaagttatgtcggaccatttttaggcattggaaagagtaggtttgtattttgtaaatttttaacctgtcacggaaaaaaatcggtgatc

SEQ ID NO: 3482 - protein, 353 aa, Arabidopsis thaliana
KLHIRHCFRQRKLPKKIMEVERVQDISSSSLLTEAIPLEFIRSEKEQPAITTFRGPTPAIPVVDLSDPDEESVRRAVVKASEEWGLFQVVNHGIPTELIRRLQDVGRKFFELPSSEKESVAKPEDSKDIEGYGTKLQKDPEGKKAWVDHLFHRIWPPSCVNYRFWPKNPPEYREVNEEYAVHVKKLSETLLGILSDGLGLKRDALKEGLGGEMAEYMMKINYYPPCPRPDLALGVPAHTDLSGITLLVPNEVPGLQVFKDDHWFDAEYIPSAVIVHIGDQILRLSNGRYKNVLHRTTVDKEKTRMSWPVFLEPPREKIVGPLPELTGDDNPPKFKPFAFKDYSYRKLNKLPLD

SEQ ID NO: 3483 - protein, 336 aa, Arabidopsis thaliana
MEVERVQDISSSSLLTEAIPLEFIRSEKEQPAITTFRGPTPAIPVVDLSDPDEESVRRAVVKASEEWGLFQVVNHGIPTELIRRLQDVGRKFFELPSSEKESVAKPEDSKDIEGYGTKLQKDPEGKKAWVDHLFHRIWPPSCVNYRFWPKNPPEYREVNEEYAVHVKKLSETLLGILSDGLGLKRDALKEGLGGEMAEYMMKINYYPPCPRPDLALGVPAHTDLSGITLLVPNEVPGLQVFKDDHWFDAEYIPSAVIVHIGDQILRLSNGRYKNVLHRTTVDKEKTRMSWPVFLEPPREKIVGPLPELTGDDNPPKFKPFAFKDYSYRKLNKLPLD

SEQ ID NO: 3484 - DNA, 1408 bp, Arabidopsis thaliana
atccgttggtgaatctggacagtcccctcaaataaaagttgtgagagctgtttcgtcgctttgatcgaaatggcgtcgtcttctccaactcagctagctcacgtcccgattcctccagaaccaggaggaaggtcgccgacacaagaagctaatgagccaccagttccgatttacattgtgacggatccgtttcaacttcctgctgatttcctaaacccttctcctgaaaagaaattggttatcggttttgactgtgagggtgttgacctctgccgacatgggaaactttgtatcatgcagattgcattctctaatgcaatatacttggttgatgtcatcgaaggtggagaggtgattatgaaagcgtgtaagcctgcactcgagtctaattacatcacgaaagttattcacgattgcaagcgtgacagtgaggctctatacttccagtttgggataagattgcacaatgttgtggacactcagattgcttattctctgattgaagaacaagaagggcggaggagacctctagatgattacatatcgtttgtttcactccttgctgatccacgttactgcggtatatcctatgaagagaaagaagaagttcgagttctcatgcgccaggacccaaagttttggacatacaggcctatgactgagctcatgatccgcgcagctgctgatgatgtccgcttccttctgtatctctatcacaaaatgatgggaaagctaaatcagcggtcactatggcatcttgcagttcgtggtgctttgtactgtcggtgtctctgctgcatgaatgatgctgattttgctgattggccaaccgttcctccaattccagataacctgaagtcagaagatcaatgtcttgaagaagagatcctgtcagtgcttgatgttccaccaggaaagatgggacgtgtgattggaaggaaaggagcatcgatcctcgccattaaggaagcttgcaacgcggaaattctaattggaggggcaaagggtccacctgataagatatttgtgattggaccggtgagagaagtgcgtaaggcggaggctatactgagaggaagaatgatagactattgaaggaaatgagggtcctttgtaatctgtctcattgcccctataaaaaaaaatactaaaaccctcttaaaacttggaaactccatggttcagtacggacccgagagagtcgtcccctcttcaataaaagttacatcattaacttccgtttatactgtggaacttaccattccatttcccgcaagggacttcatagtttgatgaaacaaaaagaccatatcaagtatggtttattggcaaatgcaagagtagtttatctgattgaccgttaagattgattttatttactttgcgactcaaattgagtctgaaaccc

SEQ ID NO: 3485 - protein, 341 aa, Arabidopsis thaliana
MASSSPTQLAHVPIPPEPGGRSPTQEANEPPVPIYIVTDPFQLPADFLNPSPEKKLVIGFDCEGVDLCRHGKLCIMQIAFSNAIYLVDVIEGGEVIMKACKPALESNYITKVIHDCKRDSEALYFQFGIRLHNVVDTQIAYSLIEEQEGRRRPLDDYISFVSLLADPRYCGISYEEKEEVRVLMRQDPKFWTYRPMTELMIRAAADDVRFLLYLYHKMMGKLNQRSLWHLAVRGALYCRCLCCMNDADFADWPTVPPIPDNLKSEDQCLEEEILSVLDVPPGKMGRVIGRKGASILAIKEACNAEILIGGAKGPPDKIFVIGPVREVRKAEAILRGRMIDY

SEQ ID NO: 3486 - protein, 266 aa, Arabidopsis thaliana
MQIAFSNAIYLVDVIEGGEVIMKACKPALESNYITKVIHDCKRDSEALYFQFGIRLHNVVDTQIAYSLIEEQEGRRRPLDDYISFVSLLADPRYCGISYEEKEEVRVLMRQDPKFWTYRPMTELMIRAAADDVRFLLYLYHKMMGKLNQRSLWHLAVRGALYCRCLCCMNDADFADWPTVPPIPDNLKSEDQCLEEEILSVLDVPPGKMGRVIGRKGASILAIKEACNAEILIGGAKGPPDKIFVIGPVREVRKAEAILRGRMIDY

SEQ ID NO: 3487 - protein, 245 aa, Arabidopsis thaliana
MKACKPALESNYITKVIHDCKRDSEALYFQFGIRLHNVVDTQIAYSLIEEQEGRRRPLDDYISFVSLLADPRYCGISYEEKEEVRVLMRQDPKFWTYRPMTELMIRAAADDVRFLLYLYHKMMGKLNQRSLWHLAVRGALYCRCLCCMNDADFADWPTVPPIPDNLKSEDQCLEEEILSVLDVPPGKMGRVIGRKGASILAIKEACNAEILIGGAKGPPDKIFVIGPVREVRKAEAILRGRMIDY

SEQ ID NO: 3488 - DNA, 889 bp, Arabidopsis thaliana
ctctctctttgtttattcgttaggtctcaaaggctctctctgtctctttctcaaaaatcatctgcaggaagtgaatcgtcaaaaccgagtttggaggatctgtcttgaggagtttttttttggttgagaaatggcttcgaaaaggatcttgaaagagctcaaggatctccagaaggatcctccaacttcctgcagtgctggcccagttgctgaagacatgtttcattggcaagctacaataatgggtccatccgatagtccttattcaggcggagtctttctcgtaaccatccacttccctccggattatcctttcaaaccaccaaaggttgcattcaggacaaaagtgttccaccctaatgtcaacagcaatggaagcatttgccttgacattttgaaagaacaatggagtcctgcactcaccatatcgaaggttttgctttcgatatgttcattgttaacggacccaaacccagatgatccattggttccagagattgctcacatgtacaaaaccgatagagcaaagtatgagtctactgcgagaagctggactcagaaatatgcaatgggatgaaagtttgtgtcctttgatccctcaaagactcggttttaatagagagagagagagagaaagagagaggacttcttcacatagggatcttccatgaaataagttagattcctatgttttatcatctctttgtttgaaacctctttaatctcaaacaaaaacattccttctcctctttacccatccctatgtttcctatctttgttttctgtgcttttacaaaaaaaaattataagaacaattatttatgtaaagctgaaaactttgagcttttacctaacaaagtatgaagatgatgaaagatgattaaatggg

SEQ ID NO: 3489 - protein, 148 aa, Arabidopsis thaliana
MASKRILKELKDLQKDPPTSCSAGPVAEDMFHWQATIMGPSDSPYSGGVFLVTIHFPPDYPFKPPKVAFRTKVFHPNVNSNGSICLDILKEQWSPALTISKVLLSICSLLTDPNPDDPLVPEIAHMYKTDRAKYESTARSWTQKYAMG

SEQ ID NO: 3490 - protein, 119 aa, Arabidopsis thaliana
MFHWQATIMGPSDSPYSGGVFLVTIHFPPDYPFKPPKVAFRTKVFHPNVNSNGSICLDILKEQWSPALTISKVLLSICSLLTDPNPDDPLVPEIAHMYKTDRAKYESTARSWTQKYAMG

SEQ ID NO: 3491 - protein, 111 aa, Arabidopsis thaliana
MGPSDSPYSGGVFLVTIHFPPDYPFKPPKVAFRTKVFHPNVNSNGSICLDILKEQWSPALTISKVLLSICSLLTDPNPDDPLVPEIAHMYKTDRAKYESTARSWTQKYAMG

SEQ ID NO: 3492 - DNA, 1166 bp, Arabidopsis thaliana
attggaaacagagtctctcttatgaatcaaagcgacaaactttgagaaggcaggcgaaaatctcggatgggttccatcgctctgcaatcttggagcagaggagcttcaacttctcttcatctcctttttcgtccagttggctcgaaccctaagctatatgatgctcgaagagtacaatttgatgtaagagcctcttcaagtcgtaaatcacttaagaaactcaaaagagagtcacaacaaggtaaagacataggcttaagaaatgttacagatgaagaagtttcttctccaagatttgaggaagctcaagttgattcttcaacttcaaaggactccattgatgtttttgttgctgctcctcgagacaaagtgcttcaggcttgcactgtaacttccggtttgatggctgcactaggtctgatcatcagaaaggcgtctcatgttgcttcgactgaaggattactggttccagactgctctatagatgtaccatttgggtttgaaacttggcatctcggtttaattgctggaatcgttgtgtttatatcgtcaagtaggttcttgctacttaaatcttggccagattttgctgattctagtgaagcagcaaaccgacagattctcacttccctcgaacctctagattaccttgttgttgcaatgttaccgggaataagtgaggagctgctgtttagaggtgcattaatgcctttgttcggaactaattggaatggtattgtagcggttggcctcattttcggtttacttcatctcgggagcggaagaaagtattcttttgcagtttgggcttcgattgtcggtatagtctacggttatgcagctgttttgtcgtcgagtcttatcgttccaatggcctcgcacgcactcaacaatttggtgggaggtctgttgtggcgatatagttccaagatcaagtcattggagtgaaataaacaaaatttacaacagggttgaattaaaaaagtatacaattttaatgggtgggtttgtgaaatctctcaatagtatagggtggttatgtcaaaaatctataatagagggtggttattgtaattttaatgtaccaacttgtcacaaaggacaagtatgaaaaatctataattatagaagtgaaaagtgaaaaaccaatcagaaattgttaccgt

SEQ ID NO: 3493 - protein, 293 aa, Arabidopsis thaliana
MGSIALQSWSRGASTSLHLLFRPVGSNPKLYDARRVQFDVRASSSRKSLKKLKRESQQGKDIGLRNVTDEEVSSPRFEEAQVDSSTSKDSIDVFVAAPRDKVLQACTVTSGLMAALGLIIRKASHVASTEGLLVPDCSIDVPFGFETWHLGLIAGIVVFISSSRFLLLKSWPDFADSSEAANRQILTSLEPLDYLVVAMLPGISEELLFRGALMPLFGTNWNGIVAVGLIFGLLHLGSGRKYSFAVWASIVGIVYGYAAVLSSSLIVPMASHALNNLVGGLLWRYSSKIKSLE

SEQ ID NO: 3494 - protein, 181 aa, Arabidopsis thaliana
MAALGLIIRKASHVASTEGLLVPDCSIDVPFGFETWHLGLIAGIVVFISSSRFLLLKSWPDFADSSEAANRQILTSLEPLDYLVVAMLPGISEELLFRGALMPLFGTNWNGIVAVGLIFGLLHLGSGRKYSFAVWASIVGIVYGYAAVLSSSLIVPMASHALNNLVGGLLWRYSSKIKSLE

SEQ ID NO: 3495 - DNA, 1376 bp, Arabidopsis thaliana
aaattgtccccaaaaaaaaaaaaaaaaagtttctagaggcttcgttagcctaattcattaactaggttctcctagtgtctgctgctaattcccaaatctcagcgaaatcaaacttctctgctctgcttagctctcagctagctgaaatctctctcaatccgtgtagcttagcttccctaatccaaccatggcaaagttcggtgaaggtgacaagagatggatcgtagaagacagacctgacggcaccaacgtccataactggcactggtccgaaaccaattgccttgaatggtctcgcaacttcttcaccaaacaattctccggcgttgatatcctctccggcgaaggtaatcttttcatcaaggtcagtaagatcgagaaagtcgaaggcgaggcttatgtgaatgtgaggaaggggaagattatccctggctacgagcttaacgtctctttatcttgggaaggtgaggctaaagattccgatgggaagacgcttttgaaagctgatggattggtcgatatgccttatatctccgatgagaatgctgatgaagatccggagattaggttttcggtgaaggatgagggaccgattgggaggactttgaaggaagcgatggtgaagaaggggaaggagattattctggagaaggttagggtttatgtggaggctatggcgagaggaggcccgtgtagggatgaattggaatcgaagaaggttgcgccgaaatcggtagcggctggatcagctacggtggcggtggagaagtctggtgctgccccggtggtgtctgctgctgcggtggagagtaaggtagttaaggagaagaagaaggcgaagactaaggaagggtttaagacaattactatgaccgagaagtttaattgcagagctagggatttgtatgagattttaatggatgagaatcgttggaaaggttttacgcagagtaatgctaagattagtaaagatgtgaatggtccgattagtgtctttgatgggtctgttactggaataaatcttgagcttgaagaaggcaaattgattgttcagaagtggagatttgggagctggcctgatggtcttgattcaacggtgaagatcgttttcgaggagcctcaaccaggagtcaccattgtcaatcttactcacactgacgttcctgaagaggacagatacgggaatgcgactgtggtggaaaacactgagagaggatggagagatcttatattccataggatccgtgcagttttcggatttggaatatgaacttatgattttgattatcaaataagttgattatgatttggaccgataaccaatgcaaaatgtatgattttaaagtttttcagttttagttaatgcatttcccttg

SEQ ID NO: 3496 - protein, 360 aa, Arabidopsis thaliana
MAKFGEGDKRWIVEDRPDGTNVHNWHWSETNCLEWSRNFFTKQFSGVDILSGEGNLFIKVSKIEKVEGEAYVNVRKGKIIPGYELNVSLSWEGEAKDSDGKTLLKADGLVDMPYISDENADEDPEIRFSVKDEGPIGRTLKEAMVKKGKEIILEKVRVYVEAMARGGPCRDELESKKVAPKSVAAGSATVAVEKSGAAPVVSAAAVESKVVKEKKKAKTKEGFKTITMTEKFNCRARDLYEILMDENRWKGFTQSNAKISKDVNGPISVFDGSVTGINLELEEGKLIVQKWRFGSWPDGLDSTVKIVFEEPQPGVTIVNLTHTDVPEEDRYGNATVVENTERGWRDLIFHRIRAVFGFGI

SEQ ID NO: 3497 - protein, 249 aa, Arabidopsis thaliana
MPYISDENADEDPEIRFSVKDEGPIGRTLKEAMVKKGKEIILEKVRVYVEAMARGGPCRDELESKKVAPKSVAAGSATVAVEKSGAAPVVSAAAVESKVVKEKKKAKTKEGFKTITMTEKFNCRARDLYEILMDENRWKGFTQSNAKISKDVNGPISVFDGSVTGINLELEEGKLIVQKWRFGSWPDGLDSTVKIVFEEPQPGVTIVNLTHTDVPEEDRYGNATVVENTERGWRDLIFHRIRAVFGFGI

SEQ ID NO: 3498 - protein, 217 aa, Arabidopsis thaliana
MVKKGKEIILEKVRVYVEAMARGGPCRDELESKKVAPKSVAAGSATVAVEKSGAAPVVSAAAVESKVVKEKKKAKTKEGFKTITMTEKFNCRARDLYEILMDENRWKGFTQSNAKISKDVNGPISVFDGSVTGINLELEEGKLIVQKWRFGSWPDGLDSTVKIVFEEPQPGVTIVNLTHTDVPEEDRYGNATVVENTERGWRDLIFHRIRAVFGFGI

SEQ ID NO: 3499 - DNA, 1389 bp, Arabidopsis thaliana
aaaaataaaacctggaagctcagttccatggtgaagtatgttgtgttcaaccatatgagctctgatggtgattctggtaacaggaaattcatgaactttgtgattcattgcatcaagaatagaagactagaagggggaggttaattagattatcttaaggtgtataaaatggaaaaaaagagtgtaccaaattctgataagttgtctctgattagagtgttaagaggtataatatgtctgatggtgttagtttcaacagcttttatgatgttgatattctgggggttcttatcagctgtagtgttgaggcttttcagcattcgctatagccgtaaatgtgtttccttcttctttggctcgtggctcgccttgtggcctttcctctttgagaagattaacaaaaccaaagttatcttctctggtgataaggttccttgcgaggatcgagtattgctcattgcaaaccaccgaacagaagttgattggatgtacttctgggatcttgcactgcgtaaaggccagattgggaatatcaaatatgtgcttaagagtagtttgatgaaattacctctctttggttgggcgtttcacctctttgagtttattccagttgagaggagatgggaagtcgatgaagcaaacttgagacagatagtttcgagttttaaggatccccgagacgctttatggcttgctcttttccccgagggcacagattacacagaggctaaatgccaaaggagtaagaaatttgctgctgaaaatggccttccgatactgaacaacgtgctgcttcccaggacaaaaggtttcgtctcctgcttgcaagaactgagttgctcacttgacgcagtttatgatgtgaccatcggttataaaacccgctgcccatctttcttagacaacgtttatggaattgagccatcagaagttcacatccacatccgtcgtatcaacctgacccaaatcccaaatcaagaaaaggacatcaatgcttggttaatgaacacattccagctcaaagaccagctgctcaatgacttttactccaatggtcatttccctaacgaaggaacagagaaagagttcaacacaaagaagtacctcataaactgtttggcagtgattgccttcaccaccatctgtacacatctcaccttcttctcatcaatgatttggttcaggatttatgtctctttggcctgtgtctacttgacctctgctacgcatttcaatcttcgttctgttccacttgttgagactgcaaaaaattccctcaaattagtaaacaaataaactttcattgctttcagttcacaacttcacatgatggaatattttttacttttgtatttcggggttaacaatcaatccactttctacttatgc

SEQ ID NO: 3500 - protein, 375 aa, Arabidopsis thaliana
MEKKSVPNSDKLSLIRVLRGIICLMVLVSTAFMMLIFWGFLSAVVLRLFSIRYSRKCVSFFFGSWLALWPFLFEKINKTKVIFSGDKVPCEDRVLLIANHRTEVDWMYFWDLALRKGQIGNIKYVLKSSLMKLPLFGWAFHLFEFIPVERRWEVDEANLRQIVSSFKDPRDALWLALFPEGTDYTEAKCQRSKKFAAENGLPILNNVLLPRTKGFVSCLQELSCSLDAVYDVTIGYKTRCPSFLDNVYGIEPSEVHIHIRRINLTQIPNQEKDINAWLMNTFQLKDQLLNDFYSNGHFPNEGTEKEFNTKKYLINCLAVIAFTTICTHLTFFSSMIWFRIYVSLACVYLTSATHFNLRSVPLVETAKNSLKLVNK

SEQ ID NO: 3501 - protein, 351 aa, Arabidopsis thaliana
MVLVSTAFMMLIFWGFLSAVVLRLFSIRYSRKCVSFFFGSWLALWPFLFEKINKTKVIFSGDKVPCEDRVLLIANHRTEVDWMYFWDLALRKGQIGNIKYVLKSSLMKLPLFGWAFHLFEFIPVERRWEVDEANLRQIVSSFKDPRDALWLALFPEGTDYTEAKCQRSKKFAAENGLPILNNVLLPRTKGFVSCLQELSCSLDAVYDVTIGYKTRCPSFLDNVYGIEPSEVHIHIRRINLTQIPNQEKDINAWLMNTFQLKDQLLNDFYSNGHFPNEGTEKEFNTKKYLINCLAVIAFTTICTHLTFFSSMIWFRIYVSLACVYLTSATHFNLRSVPLVETAKNSLKLVNK

SEQ ID NO: 3502 - protein, 343 aa, Arabidopsis thaliana
MMLIFWGFLSAVVLRLFSIRYSRKCVSFFFGSWLALWPFLFEKINKTKVIFSGDKVPCEDRVLLIANHRTEVDWMYFWDLALRKGQIGNIKYVLKSSLMKLPLFGWAFHLFEFIPVERRWEVDEANLRQIVSSFKDPRDALWLALFPEGTDYTEAKCQRSKKFAAENGLPILNNVLLPRTKGFVSCLQELSCSLDAVYDVTIGYKTRCPSFLDNVYGIEPSEVHIHIRRINLTQIPNQEKDINAWLMNTFQLKDQLLNDFYSNGHFPNEGTEKEFNTKKYLINCLAVIAFTTICTHLTFFSSMIWFRIYVSLACVYLTSATHFNLRSVPLVETAKNSLKLVNK

SEQ ID NO: 3503 - DNA, 1150 bp, Arabidopsis thaliana
gagttcagaatatcgacggcgacaatttctctctccggctaacttttttctagagaaagctatggcggacgaagaagatgagttactggagacagaactaagttacgaccagaaaaaggaaatcgccaagtggtttttcctcaacgctcccgctggagaaatcaattacgtcgctaaagatttaaaggcggttttgagcgatgaggaagtgtacaatgaagcagccatggaagcatttccagtgtacaacaaaactcacatgatttgccttgaaatgcccagtggagctggtgatgtgattgtctcatcttacagtgaaattaatgaaaatgagtaccttgatccaagaactgcccaggttgccatagttgatcatgttaaacagatttgtacaaaggtacggcctgcaaatgatgaagaacttccttctttgtatattgaggagtacagatatgctcttgatgctgaaatccagagatatgttagtgaatcttatccgaaaggtatgtctgcagttaattgtgtgaaagggaaagataatgagggtccagggtccgactttgagcttgttgttataattactgctatgagacttagtccccagaacttctgtaatggaagttggagatctgtatggaacatagatttccaggatgaatcccaggtgcttgacataaaagggaaattgcaggtaggagctcattattttgaagagggaaatgtggaattagatgcaaaaaaagatttccaagattcaacaatatttcagtctgcagatgactgcgcgattgccatagccaatattatcaggcaccatgaaacagagtaccttgcatctctagaggtagcttattcaaaattaccggataacactttcaaggatttgaggaggaaacttccggtgacacgaactctgttcccatggcagaacactttacagttcagcctaacaagagaggtcgagaaagaacttggacttggcaagtgactaatcatcaactcgcaaccttttgagtgctatatttcgttgtcaaagtttctgtgatttccattatgtaagtgaaggataagtattatttctgttgtgtcttgtctttcctttggagtaatgtatacaaatcgcattagtaagtatgatagatattgttcc

SEQ ID NO: 3504 - protein, 328 aa, Arabidopsis thaliana
SSEYRRRQFLSPANFFLEKAMADEEDELLETELSYDQKKEIAKWFFLNAPAGEINYVAKDLKAVLSDEEVYNEAAMEAFPVYNKTHMICLEMPSGAGDVIVSSYSEINENEYLDPRTAQVAIVDHVKQICTKVRPANDEELPSLYIEEYRYALDAEIQRYVSESYPKGMSAVNCVKGKDNEGPGSDFELVVIITAMRLSPQNFCNGSWRSVWNIDFQDESQVLDIKGKLQVGAHYFEEGNVELDAKKDFQDSTIFQSADDCAIAIANIIRHHETEYLASLEVAYSKLPDNTFKDLRRKLPVTRTLFPWQNTLQFSLTREVEKELGLGK

SEQ ID NO: 3505 - protein, 308 aa, Arabidopsis thaliana
MADEEDELLETELSYDQKKEIAKWFFLNAPAGEINYVAKDLKAVLSDEEVYNEAAMEAFPVYNKTHMICLEMPSGAGDVIVSSYSEINENEYLDPRTAQVAIVDHVKQICTKVRPANDEELPSLYIEEYRYALDAEIQRYVSESYPKGMSAVNCVKGKDNEGPGSDFELVVIITAMRLSPQNFCNGSWRSVWNIDFQDESQVLDIKGKLQVGAHYFEEGNVELDAKKDFQDSTIFQSADDCAIAIANIIRHHETEYLASLEVAYSKLPDNTFKDLRRKLPVTRTLFPWQNTLQFSLTREVEKELGLGK

SEQ ID NO: 3506 - protein, 253 aa, Arabidopsis thaliana
MEAFPVYNKTHMICLEMPSGAGDVIVSSYSEINENEYLDPRTAQVAIVDHVKQICTKVRPANDEELPSLYIEEYRYALDAEIQRYVSESYPKGMSAVNCVKGKDNEGPGSDFELVVIITAMRLSPQNFCNGSWRSVWNIDFQDESQVLDIKGKLQVGAHYFEEGNVELDAKKDFQDSTIFQSADDCAIAIANIIRHHETEYLASLEVAYSKLPDNTFKDLRRKLPVTRTLFPWQNTLQFSLTREVEKELGLGK

SEQ ID NO: 3507 - DNA, 1792 bp, Arabidopsis thaliana
accatcctaaacattttttcttgaataaaatcagaattacaaacaaaaatggttttgcaaaagcttcctctcattgggctgcttttgctcctgaccatcgtcgcctctccagcaaatgcagatggacctgtttgcccgccgtcgaacaaactaagccgggcaagtttccctgaaggttttttatttggcacggctactgcggcataccaggtcgaaggtgcgattaatgaaacttgtcgtggaccagccttatgggacatctactgtagaagatatccagagaggtgcaataacgataacggcgatgtggccgttgatttcttccatcgttataaggaagatatccaactaatgaagaatctaaacacagacgcctttagaatgtctatcgcatggccaagaatatttcctcatgggagaaaggagaaaggagtgagtcaagctggtgtgcaattctaccacgacctcatcgacgagctcataaaaaatggtataactccattcgttactgtttttcactgggacactccacaagatttagaagatgaatatggcggctttttaagcgaaaggattgtgaaggatttccgagagtatgcagattttgttttccaagaatacggtggaaaagtgaaacattggatcactttcaatgagccatgggttttctcgcacgctggctatgacgtaggcaaaaaggcacctggtcgttgctcttcttacgtcaatgctaaatgccaagacggacgatcaggatacgaggcttaccttgtcactcacaatctccttatctctcacgcagaagcagttgaagcttaccggaaatgcgaaaagtgtaaaggtgggaagatcggaattgcacatagtcctgcttggttcgaagcacatgaccttgctgattcacaagacggtgcgtccatcgaccgtgcacttgactttattttgggatggcatctagacacaactacatttggagattatccacagatcatgaaagacattgttggacatagattgcctaaatttacaactgagcagaaagcaaaactgaaagcttctaccgatttcgttgggctcaactactatacttcagtgttttcaaaccatttggagaaacctgatccttcaaaaccaagatggatgcaagattctcttattacatgggagtctaagaatgcgcaaaattacgccattggtagcaagcctttgaccgctgcattgaacgtttactcgagaggttttagaagtctgttgaagtacattaaggacaaatacgcaaatccggaaattatgatcatggaaaacggatatggagaagaactaggggcctcagattctgttgctgttggtaccgctgatcataacaggaaatattatcttcagaggcatcttttgagtatgcaagaagctgtttgcatcgacaaagtgaatgttacaggatactttgtatggtcattgttggataacttcgagtggcaagatggttacaaaaacagatttggactctactacgttgatttcaaaaataacctcacacgttacgagaaagaatccggcaagtattacaaggatttcctcagtcaaggtgttcgtccatccgcgctcaagaaggatgagctttaagctatttctgtttcaatgtgtttttcctatgttttactttgtgagtgaccaagattcatgaggtcttggttctaataaaaagagtttatttttcttctcatttttcattgtctacatgatttgccagatctacaaggctctggttataataaaatgatcctttgtgcct

SEQ ID NO: 3508 - protein, 524 aa, Arabidopsis thaliana
MVLQKLPLIGLLLLLTIVASPANADGPVCPPSNKLSRASFPEGFLFGTATAAYQVEGAINETCRGPALWDIYCRRYPERCNNDNGDVAVDFFHRYKEDIQLMKNLNTDAFRMSIAWPRIFPHGRKEKGVSQAGVQFYHDLIDELIKNGITPFVTVFHWDTPQDLEDEYGGFLSERIVKDFREYADFVFQEYGGKVKHWITFNEPWVFSHAGYDVGKKAPGRCSSYVNAKCQDGRSGYEAYLVTHNLLISHAEAVEAYRKCEKCKGGKIGIAHSPAWFEAHDLADSQDGASIDRALDFILGWHLDTTTFGDYPQIMKDIVGHRLPKFTTEQKAKLKASTDFVGLNYYTSVFSNHLEKPDPSKPRWMQDSLITWESKNAQNYAIGSKPLTAALNVYSRGFRSLLKYIKDKYANPEIMIMENGYGEELGASDSVAVGTADHNRKYYLQRHLLSMQEAVCIDKVNVTGYFVWSLLDNFEWQDGYKNRFGLYYVDFKNNLTRYEKESGKYYKDFLSQGVRPSALKKDEL

SEQ ID NO: 3509 - protein, 423 aa, Arabidopsis thaliana
MKNLNTDAFRMSIAWPRIFPHGRKEKGVSQAGVQFYHDLIDELIKNGITPFVTVFHWDTPQDLEDEYGGFLSERIVKDFREYADFVFQEYGGKVKHWITFNEPWVFSHAGYDVGKKAPGRCSSYVNAKCQDGRSGYEAYLVTHNLLISHAEAVEAYRKCEKCKGGKIGIAHSPAWFEAHDLADSQDGASIDRALDFILGWHLDTTTFGDYPQIMKDIVGHRLPKFTTEQKAKLKASTDFVGLNYYTSVFSNHLEKPDPSKPRWMQDSLITWESKNAQNYAIGSKPLTAALNVYSRGFRSLLKYIKDKYANPEIMIMENGYGEELGASDSVAVGTADHNRKYYLQRHLLSMQEAVCIDKVNVTGYFVWSLLDNFEWQDGYKNRFGLYYVDFKNNLTRYEKESGKYYKDFLSQGVRPSALKKDEL

SEQ ID NO: 3510 - protein, 413 aa, Arabidopsis thaliana
MSIAWPRIFPHGRKEKGVSQAGVQFYHDLIDELIKNGITPFVTVFHWDTPQDLEDEYGGFLSERIVKDFREYADFVFQEYGGKVKHWITFNEPWVFSHAGYDVGKKAPGRCSSYVNAKCQDGRSGYEAYLVTHNLLISHAEAVEAYRKCEKCKGGKIGIAHSPAWFEAHDLADSQDGASIDRALDFILGWHLDTTTFGDYPQIMKDIVGHRLPKFTTEQKAKLKASTDFVGLNYYTSVFSNHLEKPDPSKPRWMQDSLITWESKNAQNYAIGSKPLTAALNVYSRGFRSLLKYIKDKYANPEIMIMENGYGEELGASDSVAVGTADHNRKYYLQRHLLSMQEAVCIDKVNVTGYFVWSLLDNFEWQDGYKNRFGLYYVDFKNNLTRYEKESGKYYKDFLSQGVRPSALKKDEL

SEQ ID NO: 3511 - DNA, 1200 bp, Arabidopsis thaliana
aattgctcctctcctctttctcacgaagaagaagacgaagcccatcaaattaaacaagaaaaattccattttcctccattgattgtgagtgagaacaaacatttaaagcttcttactcaaagtttctttctttatagatctcaaaaaattcgatatttttctcgattcatccgccattaaggttttattgcgagatcgaagagagaaggagaaaatgacgcatagagtagatcaggaatatgattatttgtttaagattgtgttgattggtgattctggtgttgggaaatcgaatatcttgtcgagattcaccaggaatgagttttgcttggaatctaaatccactattggtgttgaattcgccaccagaactactcaggttgaaggaaagaccattaaggcccagatctgggacactgcaggtcaggagaggtacagggcgatcacaagcgcgtattacagaggcgcagtgggtgcacttcttgtctacgacattactaagagacagacctttgacaatgttttaaggtggctgcgcgaactgagagaccatgcagattccaacattgtgatcatgatggctgggaacaaatccgatctgaaccacttgagatccgttgctgaggaagatggtcaaagtttggctgagaaggaaggtctctctttcctggagacatctgctcttgaagcaacaaacgtcgagaaagcgtttcagaccatcttaggtgagatctaccatatcataagcaaaaaggcactggctgcacaagaagcagcagcagctaattctgcaatccctgggcaaggaactacgattaacgtcgatgacacatctggaggcgcgaaacgagcatgttgctcttcttaaactaaaggtaaactgtttatttcggttgctccttgttcagagattcaaacttttgttttcactggcttctcttcttttcaagttttggctgatgaaacgtaactatgcaagactatgtagaatactctgtttttattctcttcggtttggggtttgtgttcagtttaaagcttgttagtagtatacttagaatcttctggtgcttgcttgctttcccttcttcttcccttggtgtgtttctattgatttctggtttataaagtattttttctatctccggtttagtccggttcgtcttggctttgtttaatcaaatcattgattcctctctc

SEQ ID NO: 3512 - protein, 217 aa, Arabidopsis thaliana
MTHRVDQEYDYLFKIVLIGDSGVGKSNILSRFTRNEFCLESKSTIGVEFATRTTQVEGKTIKAQIWDTAGQERYRAITSAYYRGAVGALLVYDITKRQTFDNVLRWLRELRDHADSNIVIMMAGNKSDLNHLRSVAEEDGQSLAEKEGLSFLETSALEATNVEKAFQTILGEIYHIISKKALAAQEAAAANSAIPGQGTTINVDDTSGGAKRACCSS

SEQ ID NO: 3513 - DNA, 1659 bp, Arabidopsis thaliana
cacgcgtccgggactcattgctcatatcttcttctcaattccaattttgtaatccttatctcaaattaatttctatttttataactacttaatctcaattagaagaagcctgctctctaataacaaaaaaaaaaaagccgtttgggatttcttttacacgaacacattcttccgatctttcttgtttttaacttaccggtaataacgaagatatgcagaggtttttctccgccagatcgattctcggttacgccgtcaagacgcggaggaggtctttctcttctcgttcttcgtctctcctattcgacgacactcagttacagtttaaagaaagtgtatccaagtttgcgcaagatattatcgctcctcatgcagaacgaattgataaaactaattcatttccaaaggatgtaaacttatggaagctaatgggtgagtttaatctccatggaatcactgcgccagaggaatatggagggctaggtcttggttacttgtatcattgtattgcaatggaggaaatcagtcgggcctcgggttcagttgctttgtcttatggtgctcattccaacctttgcatcaatcaattggtgaggaatggaactgcagcccaaaaggaaaagtatttgccaaagcttatcagtggagagcatgttggtgctcttgcaatgagtgaacctaatgctggttcagatgttgttggcatgaaatgcaaggctgagaaggtagatggtggttatatactaaatggcaacaagatgtggtgcactaatggtccatctgctgaaacactggttgtttacgcgaaaactgatacaaaagcaggttccaaaggaatcacggctttcatcatagagaaaggaatgaccggattcagtactgctcagaaattggacaaactaggaatgcggggaagcgatacgtgtgagcttgtttttgagaattgcttcgttccagaggaaaatattctagacaaggaaggaaaaggagtgtatgttctgatgtcaggtctggatttggagagacttgttttagcagctgggcccttagggatcatgcaggcatgcctcgacaatgtacttccctatattcgccagagagaacaatttggtcgtccagttggggaatttcagtttatacagggtaaagttgctgatatgtacactgcattacaatcttcaaggtcatacgtttactctgttgcgagggactgtgacaatgggaaagttgacccaaaggactgcgccggaactattctttgtgcggccgagagagcaacgcaggtcgctttacaggcgatacaatgtttaggcggaaatggatacataaacgaatatgcaacaggacgccttctaagagatgcaaagctatatgaaatcggtgcagggacaagcgagatcagaaggattgtcatcggtcgcgagcttttcaaagaagaatagagataagtctgttttctgcattgccaatgcgacattttcattctgtacacgtatatataattcacagtgtccttaataacctcacaataagaaaaatagcttcaagcaatcctctagaaaccatatcaattattagtcacattatgtgtgacatgttatcacgataccagcatgccaatctaacactgacacttctggttaaacttactattttgtc

SEQ ID NO: 3514 - protein, 409 aa, Arabidopsis thaliana
MQRFFSARSILGYAVKTRRRSFSSRSSSLLFDDTQLQFKESVSKFAQDIIAPHAERIDKTNSFPKDVNLWKLMGEFNLHGITAPEEYGGLGLGYLYHCIAMEEISRASGSVALSYGAHSNLCINQLVRNGTAAQKEKYLPKLISGEHVGALAMSEPNAGSDVVGMKCKAEKVDGGYILNGNKMWCTNGPSAETLVVYAKTDTKAGSKGITAFIIEKGMTGFSTAQKLDKLGMRGSDTCELVFENCFVPEENILDKEGKGVYVLMSGLDLERLVLAAGPLGIMQACLDNVLPYIRQREQFGRPVGEFQFIQGKVADMYTALQSSRSYVYSVARDCDNGKVDPKDCAGTILCAAERATQVALQAIQCLGGNGYINEYATGRLLRDAKLYEIGAGTSEIRRIVIGRELFKEE

SEQ ID NO: 3515 - protein, 337 aa, Arabidopsis thaliana
MGEFNLHGITAPEEYGGLGLGYLYHCIAMEEISRASGSVALSYGAHSNLCINQLVRNGTAAQKEKYLPKLISGEHVGALAMSEPNAGSDVVGMKCKAEKVDGGYILNGNKMWCTNGPSAETLVVYAKTDTKAGSKGITAFIIEKGMTGFSTAQKLDKLGMRGSDTCELVFENCFVPEENILDKEGKGVYVLMSGLDLERLVLAAGPLGIMQACLDNVLPYIRQREQFGRPVGEFQFIQGKVADMYTALQSSRSYVYSVARDCDNGKVDPKDCAGTILCAAERATQVALQAIQCLGGNGYINEYATGRLLRDAKLYEIGAGTSEIRRIVIGRELFKEE

SEQ ID NO: 3516 - protein, 309 aa, Arabidopsis thaliana
MEEISRASGSVALSYGAHSNLCINQLVRNGTAAQKEKYLPKLISGEHVGALAMSEPNAGSDVVGMKCKAEKVDGGYILNGNKMWCTNGPSAETLVVYAKTDTKAGSKGITAFIIEKGMTGFSTAQKLDKLGMRGSDTCELVFENCFVPEENILDKEGKGVYVLMSGLDLERLVLAAGPLGIMQACLDNVLPYIRQREQFGRPVGEFQFIQGKVADMYTALQSSRSYVYSVARDCDNGKVDPKDCAGTILCAAERATQVALQAIQCLGGNGYINEYATGRLLRDAKLYEIGAGTSEIRRIVIGRELFKEE

SEQ ID NO: 3517 - DNA, 1114 bp, Arabidopsis thaliana
atagacgagtcacgacgactcacgcgtatcgaaacaaaacgttgttgttagagagaaaattccagttcttggattccggcgacctcattggtgaaagatcttcagagattattatatttctcttgaccggtttcgatggcggatggaaacgccagttcgcgttacgtgaaattgaggaaagagcaggctcctgtcgaagaagatatcacacccggtgaactcaatcagcccattgatgttcctcagttgaatgtccgcaagtgccatgaatgtatgcaagttctacctgaaacctatgaacctccttctgatgaaaactggaccaccggcatttttggttgtgctgaagatccagagagctgcaggactggtctcttttgtccgtgtgttctgtttgggcgtaacattgaagctgtgagggaagagattccttggacccaaccatgtgtatgccatgctgtatgtgtcgaaggaggtatggcacttgcagcagtaaccgcactcttcagtggctacattgatccacaaacaacagttgtgatctgcgaaggcctcttctttgcttggtggatgtgtggaatctattcaggcttgttccgccaagaactccagaagaaatatcatctcaagaatgcgccttgtgatcattgcatggttcactgttgcttgcactggtgtgctttgtgccaggaacacagggagatgaagaatcatctttctgatacagaagcctcatcatcaactactatggatcctcccccagttcaagagatgaacactgaggagagaagagacgcttcatcttcttcgtcctcatccccatcatctgccaaaagccaacacaatgatctcgagatggtccctctataggaaacgttccttattaatctctgctgcttatgctttaagctgttttttctgtgcagagaagttttcgtaccagatgactctattgtccttaggttttaaatatgcaaaagtttgttctaagaacaagttcaatagtactcttaagttttacagaacttaaattcatgacttcattgaatctcttggaagaaggaagaaaactattttgtgattaaacactgcatgattggtaaatttgtttcgt

SEQ ID NO: 3518 - protein, 244 aa, Arabidopsis thaliana
MADGNASSRYVKLRKEQAPVEEDITPGELNQPIDVPQLNVRKCHECMQVLPETYEPPSDENWTTGIFGCAEDPESCRTGLFCPCVLFGRNIEAVREEIPWTQPCVCHAVCVEGGMALAAVTALFSGYIDPQTTVVICEGLFFAWWMCGIYSGLFRQELQKKYHLKNAPCDHCMVHCCLHWCALCQEHREMKNHLSDTEASSSTTMDPPPVQEMNTEERRDASSSSSSSPSSAKSQHNDLEMVPL

SEQ ID NO: 3519 - protein, 198 aa, Arabidopsis thaliana
MQVLPETYEPPSDENWTTGIFGCAEDPESCRTGLFCPCVLFGRNIEAVREEIPWTQPCVCHAVCVEGGMALAAVTALFSGYIDPQTTVVICEGLFFAWWMCGIYSGLFRQELQKKYHLKNAPCDHCMVHCCLHWCALCQEHREMKNHLSDTEASSSTTMDPPPVQEMNTEERRDASSSSSSSPSSAKSQHNDLEMVPL

SEQ ID NO: 3520 - protein, 130 aa, Arabidopsis thaliana
MALAAVTALFSGYIDPQTTVVICEGLFFAWWMCGIYSGLFRQELQKKYHLKNAPCDHCMVHCCLHWCALCQEHREMKNHLSDTEASSSTTMDPPPVQEMNTEERRDASSSSSSSPSSAKSQHNDLEMVPL

SEQ ID NO: 3521 - DNA, 1324 bp, Arabidopsis thaliana
acaagtgtcgcagctacagagcacacaaaagaaagagagaaagatgacgtcaccgagccatgcctctgatcgcggcggcggcgacggtgactcagtcgagaatcagtcccctgagctcaggaaagatccggtaactaaccgctgggtcatattctctcccgccagagccaagagaccgactgatttcaaatccaaatctccccagaaccctaatcccaaaccttcctcatgcccattttgcatcggtcgtgagcaagagtgtgccccggagttatttcgtgtgccagatcatgacccgaattggaaactccgggtcatcgagaatctgtacccggctcttagtaggaatctcgagacccaatcgacccaacctgagacgggaacaagtcggacaatagtcggattcggattccacgacgtagtgatcgaatcccctgttcattcgattcagctctccgatatcgatccggtgggtatcggcgatatcttgatcgcttataagaagaggatcaatcagattgcgcaacatgattccatcaattacatccaggttttcaagaaccaaggtgcgtcggctggagcatcaatgagtcactcccacagtcaaatgatggctctaccagttgttcctccaacggtttcttcacgccttgatggtactaaagattatttcgaggagactgggaaatgttgtctctgtgaagctaaatcaaaacattttgtgatcgatgagtcgtctcattttgtttctgttgctccttttgctgctacgtatccctttgagatttggattattccgaaagatcattcttcccacttccatcatctcgatgacgttaaggctgttgaccttggaggacttctgaaactcatgcttcagaagatagcaaagcaacttaacgatccaccgtataactatatgatccatacttctccactcaaggttacagaatcacaattaccttatacgcactggttcttacagattgtacctcagctttctggggtaggtgggtttgagattggcacaggttgttacataaaccctgttttcccagaggatgtagcaaaggttatgcgggaagttagccttacttgaacccggttttttagtctcaacctaaagttcagctggaagtgattagtgttgagttattggcctaatgtgcaagtctctaaaaaacactattcaattgtctttttctcctctgttgaagaggaagatgtttcagcttgattcaaataacactgatgtaaacaatgcatgtactgtagttctttgtaaaacaagctcatatcagggcattaagaagattctttgatc

SEQ ID NO: 3522 - protein, 365 aa, Arabidopsis thaliana
QVSQLQSTQKKERKMTSPSHASDRGGGDGDSVENQSPELRKDPVTNRWVIFSPARAKRPTDFKSKSPQNPNPKPSSCPFCIGREQECAPELFRVPDHDPNWKLRVIENLYPALSRNLETQSTQPETGTSRTIVGFGFHDVVIESPVHSIQLSDIDPVGIGDILIAYKKRINQIAQHDSINYIQVFKNQGASAGASMSHSHSQMMALPVVPPTVSSRLDGTKDYFEETGKCCLCEAKSKHFVIDESSHFVSVAPFAATYPFEIWIIPKDHSSHFHHLDDVKAVDLGGLLKLMLQKIAKQLNDPPYNYMIHTSPLKVTESQLPYTHWFLQIVPQLSGVGGFEIGTGCYINPVFPEDVAKVMREVSLT

SEQ ID NO: 3523 - protein, 351 aa, Arabidopsis thaliana
MTSPSHASDRGGGDGDSVENQSPELRKDPVTNRWVIFSPARAKRPTDFKSKSPQNPNPKPSSCPFCIGREQECAPELFRVPDHDPNWKLRVIENLYPALSRNLETQSTQPETGTSRTIVGFGFHDVVIESPVHSIQLSDIDPVGIGDILIAYKKRINQIAQHDSINYIQVFKNQGASAGASMSHSHSQMMALPVVPPTVSSRLDGTKDYFEETGKCCLCEAKSKHFVIDESSHFVSVAPFAATYPFEIWIIPKDHSSHFHHLDDVKAVDLGGLLKLMLQKIAKQLNDPPYNYMIHTSPLKVTESQLPYTHWFLQIVPQLSGVGGFEIGTGCYINPVFPEDVAKVMREVSLT

SEQ ID NO: 3524 - DNA, 1281 bp, Arabidopsis thaliana
agctttccataatttggaaaaaagtgaattgaaaaaaagaacagtgacactcttgtttctataaattggtgagaccgtcctcaaaaccccttcgtcaccttcagtgtctctctctcaagatctagctccggtcatgaagtcgtcggaattccaataccacgaggaatacgtgagaaattcaagaggtgtagagttgttcgcatgtagatggatcccatcttcttcgtcttctcccaaagctctggttttcctctgccatggttatggaatggagtgtagcgactccatgaaagaatgcggaatcaggctggcttcagctggatacgcggtttttggtatggactatgaaggtcatggaaggtccatgggatctcgttgctacatcaagaagtttgcgaatgttgtgaatgattgctatgactactacacatctatttgtgcgcaagaggagtacatggacaaaggcagattcttgtatggagaatccatgggaggcgcagtcactttattgcttcacaaaaaagatcctttgttttggaacggcgccattctagttgctccaatgtgtaagatatctgagaaggtgaagccacaccctatagtgattaatctgttaactagagtcgaagaaatcatacctaaatggaaaatagttccaacaaaagacgtgattgacgctgctttcaaggacctcgtcaagcgagaagaggtaaggaacaacaagctgatatatcaagacaagcctaggctcaaaaccgcacttgagatgcttaggacaagcatgaacctagaagacactctccacgagataacaatgccattctttgtattacacggagaagcagatacagtgacggatccagaggtaagcaaagctctgtacgagaaagctagcacaagggacaagacgctcaagttgtatccagggatgtggcacgctctgacgtcaggtgagcctgactgtaacgtggaccttgtttttgctgacatcatcaattggcttgaccttcgaaccgctgaccctgcctctctcactgtcactcctatacgagttggtaacactacgagcgtccagagggtaactactgttaacggcgttagtaacggtcataggaggcctaaacgtcccttcttcaatctcctttgtggtttgaaccgtggccgtttggttccacgatccactgtgtaataaaattttatcaaggcaaacaaaaaacaatttatgaaaaagagagttatgattttgtgtgaattattaaagattggtggtctcatggtttg

SEQ ID NO: 3525 - protein, 351 aa, Arabidopsis thaliana
MKSSEFQYHEEYVRNSRGVELFACRWIPSSSSSPKALVFLCHGYGMECSDSMKECGIRLASAGYAVFGMDYEGHGRSMGSRCYIKKFANVVNDCYDYYTSICAQEEYMDKGRFLYGESMGGAVTLLLHKKDPLFWNGAILVAPMCKISEKVKPHPIVINLLTRVEEIIPKWKIVPTKDVIDAAFKDLVKREEVRNNKLIYQDKPRLKTALEMLRTSMNLEDTLHEITMPFFVLHGEADTVTDPEVSKALYEKASTRDKTLKLYPGMWHALTSGEPDCNVDLVFADIINWLDLRTADPASLTVTPIRVGNTTSVQRVTTVNGVSNGHRRPKRPFFNLLCGLNRGRLVPRSTV

SEQ ID NO: 3526 - protein, 306 aa, Arabidopsis thaliana
MECSDSMKECGIRLASAGYAVFGMDYEGHGRSMGSRCYIKKFANVVNDCYDYYTSICAQEEYMDKGRFLYGESMGGAVTLLLHKKDPLFWNGAILVAPMCKISEKVKPHPIVINLLTRVEEIIPKWKIVPTKDVIDAAFKDLVKREEVRNNKLIYQDKPRLKTALEMLRTSMNLEDTLHEITMPFFVLHGEADTVTDPEVSKALYEKASTRDKTLKLYPGMWHALTSGEPDCNVDLVFADIINWLDLRTADPASLTVTPIRVGNTTSVQRVTTVNGVSNGHRRPKRPFFNLLCGLNRGRLVPRSTV

SEQ ID NO: 3527 - protein, 300 aa, Arabidopsis thaliana
MKECGIRLASAGYAVFGMDYEGHGRSMGSRCYIKKFANVVNDCYDYYTSICAQEEYMDKGRFLYGESMGGAVTLLLHKKDPLFWNGAILVAPMCKISEKVKPHPIVINLLTRVEEIIPKWKIVPTKDVIDAAFKDLVKREEVRNNKLIYQDKPRLKTALEMLRTSMNLEDTLHEITMPFFVLHGEADTVTDPEVSKALYEKASTRDKTLKLYPGMWHALTSGEPDCNVDLVFADIINWLDLRTADPASLTVTPIRVGNTTSVQRVTTVNGVSNGHRRPKRPFFNLLCGLNRGRLVPRSTV

SEQ ID NO: 3528 - DNA, 1314 bp, Arabidopsis thaliana
tggaatgaagaaggtggaagatgatgttaacttcggattggcgcgaaataagataaaaaagcttgttcttcagagaagaaagtgtttatgattggacaaagaaagaaagaagcaaagcctatccacttctcatcttctctattaccaacaaaccttccccttctctgtcggttcctccttttctattatttttaattccagataataaaaagaaaatctttttttgcttaaagagctcaaaccgaaacccatttcaagatttcatcttccggagtgtttcaacgaagcttgggtacataagtctgatatgagaggtttcgtcataacttgtcttctaaggtaagtttcctcacctgtggcgtagattgcatcatcaatccatggacgttgaagaaaagagggtttcatctggttatgccaagcctccatggatattcaaaggaagtgcgttgtaccagattcatcttgtgaaggctgcgactgctcgagcattcatccccaaggagtttcgactagttgaagcttttggatacactcttggcggtttcttccttgctagctacgatgatagccccgctggtgtctttgatgagcttgtagtaattgcagggattgtatggaaccctcctacatcatgcgcatgggccgcgagggtacttgtgaacagcgatgaggcttgtcatcacggacgcaaggaagtaggactcccaagccaagttgcaagattttcaaaaaacattactgcagtcccaaaacaaaaaagggacagagcttttggtttcttggacacatttggtttgggaactactctgtctcatcctgagaatttgatggaggttaaggttagtgaagttgatagtgctgcttctactgatatctgcaacatccaaattagatcagacgagaccaaagttggaaactggatgggacctgcaatcaaaatggctctcccaagttttagtggcaatacaatttacaactcaaacttgctcaagtactcatgccatctccactgcagggtgaggccggtgagacctgcggttgtatcaggggctttggaagatgagacagagaagtttacagaacagaatcacacatcacaagagtcacttgaaaatgaaaggcagctaagcaaagccgtgatgctatcgaaaccaatcatagctcttcaattcaaatgcttaacaatgcaagtagaagctcctgttgtaatttacccttcaaagtaaacacaacactcaaattccaagaacatacagcttccttcctaaaaggttcacatctttacaaaaacaaatatttccgctttttgcc

SEQ ID NO: 3529 - protein, 282 aa, Arabidopsis thaliana
MDVEEKRVSSGYAKPPWIFKGSALYQIHLVKAATARAFIPKEFRLVEAFGYTLGGFFLASYDDSPAGVFDELVVIAGIVWNPPTSCAWAARVLVNSDEACHHGRKEVGLPSQVARFSKNITAVPKQKRDRAFGFLDTFGLGTTLSHPENLMEVKVSEVDSAASTDICNIQIRSDETKVGNWMGPAIKMALPSFSGNTIYNSNLLKYSCHLHCRVRPVRPAVVSGALEDETEKFTEQNHTSQESLENERQLSKAVMLSKPIIALQFKCLTMQVEAPVVIYPSK

SEQ ID NO: 3530 - DNA, 1350 bp, Arabidopsis thaliana
aaaagaaaagtagaaaccccaagaaaaaataaaaaaaataatgggtcatcgaacaagaatgatccttgtcctaaccctagttgtaatgtccatatggggttcggacgcatcagcaatgcaaaagacgaaattcgacgccccacttttgactgaaaaaatcgcgacaaatagatcgataattgtagatatcgaaggcaaaggagactacacttcggttcagaaagccatcgatgctgtccctgttggtaactctaattggattattgtccatgtccgtaaaggaatctacaaggagagagtgcacattccggagaacaagccgttcatattcatgaggggtaatggaaaaggaaaaacggtgatcgaatcttcgcaaagttcggtcgacaatgttgcttcagctactttcaaagtcgaggctaatcactttgtcgcttttggtatcagcatccgaaatgatgcacctgtcggaatggcattcacatctgagaaccaatcggtggcagcgtttgtggctgctgacaaagtagcgttttaccattgtgcgttctacagcttacacaacactttgtttgataacaaaggtagacattactaccatgagtgttacatccaaggctccatagacttcatcttcggtcgcgcaacttccattttcaacaattgtgagatatttgtgatatcagacaagagggtgaaaccgtatgggtcaatcacagcacaccatagggaaagcgcagaggaaaaaacgggttacgtgttcataagaggcaaagtgtacggaattgatgaggtttacttgggccgagccaaaggaccttattctcgagtcatctttgccaagacttacttgtccaagaccgttgtgcctgatggttggacaaactggagttaccatggctcgacccagaatctataccatggggagtataaatgtcatggaccaggagctgagaggcaaaagagatctgactgggccaaagatcttaccaaacaagaagttgagtctttcttgtccattgattttattgatggcacttcttggctccctgtttggcttcaggaaaagttttagagttccttatgctgtcgcgtttggcttttgacatttcgcgttttggtgtggcttggaaaaaaaacatatgaagaaagaagagtacttcatcctttcttcgacggtatactatacgaaatagttttctctcttttttttttgtgtacttctactctaaaatgttcttagagtgattggaaactcttatgttgtttgcaaacattatataagattgtttccatcttaataatatatgtaacctaaatttaaatcctataaatttaaaatattttccc

SEQ ID NO: 3531 - protein, 344 aa, Arabidopsis thaliana
MGHRTRMILVLTLVVMSIWGSDASAMQKTKFDAPLLTEKIATNRSIIVDIEGKGDYTSVQKAIDAVPVGNSNWIIVHVRKGIYKERVHIPENKPFIFMRGNGKGKTVIESSQSSVDNVASATFKVEANHFVAFGISIRNDAPVGMAFTSENQSVAAFVAADKVAFYHCAFYSLHNTLFDNKGRHYYHECYIQGSIDFIFGRATSIFNNCEIFVISDKRVKPYGSITAHHRESAEEKTGYVFIRGKVYGIDEVYLGRAKGPYSRVIFAKTYLSKTVVPDGWTNWSYHGSTQNLYHGEYKCHGPGAERQKRSDWAKDLTKQEVESFLSIDFIDGTSWLPVWLQEKF

SEQ ID NO: 3532 - protein, 338 aa, Arabidopsis thaliana
MILVLTLVVMSIWGSDASAMQKTKFDAPLLTEKIATNRSIIVDIEGKGDYTSVQKAIDAVPVGNSNWIIVHVRKGIYKERVHIPENKPFIFMRGNGKGKTVIESSQSSVDNVASATFKVEANHFVAFGISIRNDAPVGMAFTSENQSVAAFVAADKVAFYHCAFYSLHNTLFDNKGRHYYHECYIQGSIDFIFGRATSIFNNCEIFVISDKRVKPYGSITAHHRESAEEKTGYVFIRGKVYGIDEVYLGRAKGPYSRVIFAKTYLSKTVVPDGWTNWSYHGSTQNLYHGEYKCHGPGAERQKRSDWAKDLTKQEVESFLSIDFIDGTSWLPVWLQEKF

SEQ ID NO: 3533 - protein, 329 aa, Arabidopsis thaliana
MSIWGSDASAMQKTKFDAPLLTEKIATNRSIIVDIEGKGDYTSVQKAIDAVPVGNSNWIIVHVRKGIYKERVHIPENKPFIFMRGNGKGKTVIESSQSSVDNVASATFKVEANHFVAFGISIRNDAPVGMAFTSENQSVAAFVAADKVAFYHCAFYSLHNTLFDNKGRHYYHECYIQGSIDFIFGRATSIFNNCEIFVISDKRVKPYGSITAHHRESAEEKTGYVFIRGKVYGIDEVYLGRAKGPYSRVIFAKTYLSKTVVPDGWTNWSYHGSTQNLYHGEYKCHGPGAERQKRSDWAKDLTKQEVESFLSIDFIDGTSWLPVWLQEKF

SEQ ID NO: 3534 - DNA, 798 bp, Arabidopsis thaliana
ataaattattacaaccaacaaaaaaaaaagcttcgtgtctctcttctccaaaaatgacgaactacggggcgattccgacgtcgtctcatccatcaccggcgatagatctcgaatacatctcacgcgccaaacaccgtataaaatccggtctagctacgcgccgcccatggaaatcaatgttcgatttcgaatcaatgactctccctcacggtttcttcgacgcgatctcgaggatcaaaacgaatctcggctatttcagagctaattacgccatcggagttctcttcatcctcttcctaagccttctatatcacccaacctcgttgatcgtgttatcaatcttggtcgtcttctggatctttctctatttcctccgtgacgagcctcttgttgtttttggttatcagattgatgatcggacggttcttattggtttatcggttttgacggttgtgatgcttttgttgactcacgctacttcgaatattctgggatctttgttaaccgccgccgtgttggttctgattcatgcggcggttagaagaagtgataatttgtttcttgatgaagaagctgcggcggttactgaagcttcagggctgatgtcatacccttcgtcgtaaatccaaaaatttgttttttttttttgtatgttactgagtttggtgcgatttgagaaaacttgacatgttcttctactttgttcaatttgttgacaacagtacaatttttgagtatgttttgttggttaattacgttattacatgattagcactacaaacactaatcactttggat

SEQ ID NO: 3535 - protein, 206 aa, Arabidopsis thaliana
KLLQPTKKKASCLSSPKMTNYGAIPTSSHPSPAIDLEYISRAKHRIKSGLATRRPWKSMFDFESMTLPHGFFDAISRIKTNLGYFRANYAIGVLFILFLSLLYHPTSLIVLSILVVFWIFLYFLRDEPLVVFGYQIDDRTVLIGLSVLTVVMLLLTHATSNILGSLLTAAVLVLIHAAVRRSDNLFLDEEAAAVTEASGLMSYPSS

SEQ ID NO: 3536 - protein, 189 aa, Arabidopsis thaliana
MTNYGAIPTSSHPSPAIDLEYISRAKHRIKSGLATRRPWKSMFDFESMTLPHGFFDAISRIKTNLGYFRANYAIGVLFILFLSLLYHPTSLIVLSILVVFWIFLYFLRDEPLVVFGYQIDDRTVLIGLSVLTVVMLLLTHATSNILGSLLTAAVLVLIHAAVRRSDNLFLDEEAAAVTEASGLMSYPSS

SEQ ID NO: 3537 - protein, 148 aa, Arabidopsis thaliana
MFDFESMTLPHGFFDAISRIKTNLGYFRANYAIGVLFILFLSLLYHPTSLIVLSILVVFWIFLYFLRDEPLVVFGYQIDDRTVLIGLSVLTVVMLLLTHATSNILGSLLTAAVLVLIHAAVRRSDNLFLDEEAAAVTEASGLMSYPSS

SEQ ID NO: 3538 - DNA, 1571 bp, Arabidopsis thaliana
aattcagaacttcagaaatcagaaagcaaaaacagaattgtgtattattctcttctattcaggaaattgatccaacaaatgaaagattactcgaagatcggcgataaacttgtgatgcagagacctagacgacgtttggaaggcaccgccatgggcgccaccgtgttcgatctccgtcccggcgtcggcatcggacctttctctatcggaatgccgatttgtgaagcatttgctcaaatagagcagcagcctaacatatatgatgttgttcatgttaaatactacgacgaggatcctttgaaactggatgttgttattagctttccagatcatgggtttcatcttcgatttgatccctggtctcagaggttacggcttgttgaaatatttgatgtcaagcggcttcagatgcgctacgccacttctatgattgggggtccatcaactctggcaacgtttgtggctgtttatgcactttttggaccaacctttcctgggatttatgataaagaaagagggatttattctctgttctacccggggctatccttcgagtttccaattccaaaccagtacacggactgctgccatgatggagaagcggcactaccgttagagtttccagatggcaccacaccagtaacatgccgggtctctatatatgacaactcaagtgacaaaaaagttggtgtcggaaaattgatggatagagcttctgttcctcctctacctcctggcagtctgtatatggaagaagttcatgtcaagcctggcaaggaactatactttactgttggaggccagcatatgccttttggtgcatcaccacaggatgtatggactgaattaggtcgaccttgtgggatccacccaaagcaggtagatcaaatggttattcattctgcgtcagatcctcgaccaaaaacaactatctgtggtgattacttttacaactattttactcgtggtttggacatcctgtttgatggcgagactcacaaagttaaaaagtttgttcttcacaccaactatccgggtcatgctgatttcaactcatacataaagtgcaactttgtgatttcggctggagcggatgcggcagaagcaaacagaagtggaaacaagatcactccaagcactaactgggatcaggtcaaggaaatactcggggaatgtgggccagcagctattcagacgcaaggctcaacgagcaacccttttggatctacatatgtgtatggctatcagaatgttgcttttgaggtgatgaagaacggtcatatagccactataaccttgttccagtcatgatgcgtatccaccgctgaggggctcaagatgctatcttcaaccagactctgtaaatctaacgtcacaagaagctacgaaaactatcgatgataccaaaaacgacaaatgttgtacagttatacatttgtctagttactatcacccgggttataataacagttattctggttataattcttttcagactttattatgactaattatatatcatttatctgttaaaagttcataaaatagcctcatcatttgagttttttgcg

SEQ ID NO: 3539 - protein, 436 aa, Arabidopsis thaliana
NSELQKSESKNRIVYYSLLFRKLIQQMKDYSKIGDKLVMQRPRRRLEGTAMGATVFDLRPGVGIGPFSIGMPICEAFAQIEQQPNIYDVVHVKYYDEDPLKLDVVISFPDHGFHLRFDPWSQRLRLVEIFDVKRLQMRYATSMIGGPSTLATFVAVYALFGPTFPGIYDKERGIYSLFYPGLSFEFPIPNQYTDCCHDGEAALPLEFPDGTTPVTCRVSIYDNSSDKKVGVGKLMDRASVPPLPPGSLYMEEVHVKPGKELYFTVGGQHMPFGASPQDVWTELGRPCGIHPKQVDQMVIHSASDPRPKTTICGDYFYNYFTRGLDILFDGETHKVKKFVLHTNYPGHADFNSYIKCNFVISAGADAAEANRSGNKITPSTNWDQVKEILGECGPAAIQTQGSTSNPFGSTYVYGYQNVAFEVMKNGHIATITLFQS

SEQ ID NO: 3540 - protein, 410 aa, Arabidopsis thaliana
MKDYSKIGDKLVMQRPRRRLEGTAMGATVFDLRPGVGIGPFSIGMPICEAFAQIEQQPNIYDVVHVKYYDEDPLKLDVVISFPDHGFHLRFDPWSQRLRLVEIFDVKRLQMRYATSMIGGPSTLATFVAVYALFGPTFPGIYDKERGIYSLFYPGLSFEFPIPNQYTDCCHDGEAALPLEFPDGTTPVTCRVSIYDNSSDKKVGVGKLMDRASVPPLPPGSLYMEEVHVKPGKELYFTVGGQHMPFGASPQDVWTELGRPCGIHPKQVDQMVIHSASDPRPKTTICGDYFYNYFTRGLDILFDGETHKVKKFVLHTNYPGHADFNSYIKCNFVISAGADAAEANRSGNKITPSTNWDQVKEILGECGPAAIQTQGSTSNPFGSTYVYGYQNVAFEVMKNGHIATITLFQS

SEQ ID NO: 3541 - protein, 398 aa, Arabidopsis thaliana
MQRPRRRLEGTAMGATVFDLRPGVGIGPFSIGMPICEAFAQIEQQPNIYDVVHVKYYDEDPLKLDVVISFPDHGFHLRFDPWSQRLRLVEIFDVKRLQMRYATSMIGGPSTLATFVAVYALFGPTFPGIYDKERGIYSLFYPGLSFEFPIPNQYTDCCHDGEAALPLEFPDGTTPVTCRVSIYDNSSDKKVGVGKLMDRASVPPLPPGSLYMEEVHVKPGKELYFTVGGQHMPFGASPQDVWTELGRPCGIHPKQVDQMVIHSASDPRPKTTICGDYFYNYFTRGLDILFDGETHKVKKFVLHTNYPGHADFNSYIKCNFVISAGADAAEANRSGNKITPSTNWDQVKEILGECGPAAIQTQGSTSNPFGSTYVYGYQNVAFEVMKNGHIATITLFQS

SEQ ID NO: 3542 - DNA, 1941 bp, Arabidopsis thaliana
aatgtccacccataattcctcctcagtctttttataaacaaaccattttcttgcttttgctcgcaaaactttaaccttaaaaaccaaaccaaaaaaaaaaaaactaaattaaacttatggatgtgtcaaatgagacagtggaaagaaccgatctccggacacctttagtagatccggcagacacggaggtgaaacctctaccagaggtcgggctcgagagcgtattaacggagagtagcttgtcataccggaggcgtgtgtacttaggagccggtatagagttgaaagtacttttccggttggcactaccggcgatacttatctatttagtcaactccggaatgggtatatccgctcgtgtcttcgccggtcatgttggtagtcaagaacttgcggccgcgtccatcggaaatagctgcttcaatctcgtctatggacttatgttaggtatgggcagtgcagtcgaaacactatgtggacaagcctatggagcccatcgttacgagatgcttgggatctatctccaaagagcaacaatagtcctcgctctagttggcttgcccatgacattactatacaccttctcgtaccctattctaatcctactaggggaacccaaaacggtgtcgtacatgggatccaaatacatcgccgggctcatccctcaaatcttcgcttacgccgtcaacttcacggcccaaaagttcctccaggcccaaagcgtggttgccccgagcgccttcatctcagccgccgccctcatcctccagatattgttgacgtggatcaccgtttatgtaatggacatgggctttatgggcatagcttatgttcttacaatttcttggtgggtcattgttggatcccagtgtttttacattgcggttagtcccaagtttagacacacgtggactggtcttagctggagatcgctccaaggtctttggagcttctttaaactctctgctggctcagctgttatgatttgtctggaaatgtggtattcgcagattcttgttcttcttgctggtttgctcgaaaatcctgctcgctctctagattctctttccatctgtatgtcaatttcagcattatcattcatggtctctgtcggctttaatgctgctgtaagtgtacggacaagtaatgagcttggagcaggaaatccgaaatcagcatggttctctacatggacggctacttttgtatccttcgtgatctccgtgacggaagccctcgccgtgatttggtttcgtgattacgttagctacattttcacggaggatgctgacgtggctaaagccgtctctgacctctgtccttttcttgccatcaccatcattctcaacggaattcaacctgtcttgtccggagtggcagtgggatgtggatggcaaacatacgtggcatatgtgaatgttggttgttactacgttgttggtattccggttgggtgtattctcggcttcactttcgattttcaagccaagggaatatggaccgggatgattggaggtaccctcatgcaaacactcattttactttacgtcacgtaccgaacagattgggataaagaggtggaaaaagcgaggaaacgtttggatctgtgggacgacaagaaggagcctctccaaaactagttataacaagtttggtggagtgatagacaataaagaaaaggaaataagtgtcgtgtgtgcaggtgatttcaatgtacgtagcttttcatggttattatgcttgttctatggaaatagaacaattaaaatatatttttgtctgatggattattctttatttacgaaaagttgttcttaaattgatgtttctttcctttctcagaatgatttattatgtcttcactctatagacagttattaattatttattatggaattttgatgtaattgggtgtagtaagtaaagtagcacatcaatgcg

SEQ ID NO: 3543 - protein, 507 aa, Arabidopsis thaliana
MDVSNETVERTDLRTPLVDPADTEVKPLPEVGLESVLTESSLSYRRRVYLGAGIELKVLFRLALPAILIYLVNSGMGISARVFAGHVGSQELAAASIGNSCFNLVYGLMLGMGSAVETLCGQAYGAHRYEMLGIYLQRATIVLALVGLPMTLLYTFSYPILILLGEPKTVSYMGSKYIAGLIPQIFAYAVNFTAQKFLQAQSVVAPSAFISAAALILQILLTWITVYVMDMGFMGIAYVLTISWWVIVGSQCFYIAVSPKFRHTWTGLSWRSLQGLWSFFKLSAGSAVMICLEMWYSQILVLLAGLLENPARSLDSLSICMSISALSFMVSVGFNAAVSVRTSNELGAGNPKSAWFSTWTATFVSFVISVTEALAVIWFRDYVSYIFTEDADVAKAVSDLCPFLAITIILNGIQPVLSGVAVGCGWQTYVAYVNVGCYYVVGIPVGCILGFTFDFQAKGIWTGMIGGTLMQTLILLYVTYRTDWDKEVEKARKRLDLWDDKKEPLQN

SEQ ID NO: 3544 - protein, 432 aa, Arabidopsis thaliana
MGISARVFAGHVGSQELAAASIGNSCFNLVYGLMLGMGSAVETLCGQAYGAHRYEMLGIYLQRATIVLALVGLPMTLLYTFSYPILILLGEPKTVSYMGSKYIAGLIPQIFAYAVNFTAQKFLQAQSVVAPSAFISAAALILQILLTWITVYVMDMGFMGIAYVLTISWWVIVGSQCFYIAVSPKFRHTWTGLSWRSLQGLWSFFKLSAGSAVMICLEMWYSQILVLLAGLLENPARSLDSLSICMSISALSFMVSVGFNAAVSVRTSNELGAGNPKSAWFSTWTATFVSFVISVTEALAVIWFRDYVSYIFTEDADVAKAVSDLCPFLAITIILNGIQPVLSGVAVGCGWQTYVAYVNVGCYYVVGIPVGCILGFTFDFQAKGIWTGMIGGTLMQTLILLYVTYRTDWDKEVEKARKRLDLWDDKKEPLQN

SEQ ID NO: 3545 - protein, 399 aa, Arabidopsis thaliana
MLGMGSAVETLCGQAYGAHRYEMLGIYLQRATIVLALVGLPMTLLYTFSYPILILLGEPKTVSYMGSKYIAGLIPQIFAYAVNFTAQKFLQAQSVVAPSAFISAAALILQILLTWITVYVMDMGFMGIAYVLTISWWVIVGSQCFYIAVSPKFRHTWTGLSWRSLQGLWSFFKLSAGSAVMICLEMWYSQILVLLAGLLENPARSLDSLSICMSISALSFMVSVGFNAAVSVRTSNELGAGNPKSAWFSTWTATFVSFVISVTEALAVIWFRDYVSYIFTEDADVAKAVSDLCPFLAITIILNGIQPVLSGVAVGCGWQTYVAYVNVGCYYVVGIPVGCILGFTFDFQAKGIWTGMIGGTLMQTLILLYVTYRTDWDKEVEKARKRLDLWDDKKEPLQN

SEQ ID NO: 3546 - DNA, 2929 bp, Arabidopsis thaliana
aaaatagtccaacaccaaaataaaaaatgtcatctcttcactggtttcccaatatcttcatcgttgtcgtcgtcttcttctccttgagaagttcacaagttgtactagaagaagaagaatccacagtcgttggatacggctacgtcgttagatcagtgggcgttgattctaaccggcaagttttgacggcgaagcttgatctgataaaaccatcgtccgtttacgcaccagatattaaatcgcttaatcttcatgtcagcttggagacaagtgagcgtttgagaatcagaatcacagactctagtcaacaaagatgggagataccggaaaccgttattcctcgtgccggaaaccactctcctcgccgtttctcaacggaggaagacggaggaaactctccggagaacaatttcttagcagatccctcatcggacttggttttcactctccacaacacgacgccgtttggtttctccgtctcccgacgttcctccggcgatatcctcttcgacacatcgccggattcatcagattcaaacacttacttcatcttcaaagaccaattccttcaactatcatccgcgttaccggaaaacagatcgaatctgtacggaatcggagagcacacgaagcgatcgttcaggctaattcccggtgagaccatgactttgtggaacgccgacatcggcagcgaaaatccggatgtcaacctttacggatcgcacccgttttacatggatgtaagaggatcaaagggaaacgaggaagcagggacgactcatggggttctcttgctgaacagcaatggaatggatgtgaagtatgaaggacatcggataacttacaatgtgattggaggcgtcattgatctctatgtgttcgcgggaccatcgccggagatggtcatgaatcagtacactgagcttattggaagacctgcccctatgccttactggtcatttggatttcaccaatgtagatatgggtacaagaatgtatcagaccttgaatatgtagttgatggatatgcaaaagctggaatacctcttgaggtgatgtggactgacattgattacatggatgggtacaaagacttcactttggatcctgtaaatttcccggaggacaagatgcaatcatttgtcgatacacttcacaagaatggtcagaaatacgtgctgatcttggatcccggtattggtgtggatagctcttatgggacatataatagaggaatggaagctgatgttttcataaaaagaaatggtgagccttatcttggtgaggtttggcccggaaaagtatacttccccgacttcttgaatccagctgctgcaactttctggagcaacgaaatcaagatgttccaggagattctccctttggatggtctgtggattgacatgaatgagttatcaaatttcataacttcgcctctatcctctggatcttcactcgatgatcctccttacaagatcaacaattcaggggataaaaggccgataaacaataagacagtacccgcaacatctatccattttggaaacattagtgaatacgatgcgcataacttgtatgggctcttggaagctaaagccactcaccaagctgtggtggatataacgggaaagagaccgtttattttgtcaagatccacgtttgtaagctcggggaaatacacggctcactggactggtgataatgctgcaaaatgggaggatttggcttactcaatccccggaatcctcaactttggcctgtttgggattccaatggttggagctgatatttgcggtttctcacatgataccaccgaggaattatgccgtcgatggatccagcttggagctttttacccttttgcaagagaccattcgtcccttggtaccgccagacaagaactatacctctgggattcagttgcttcttctgcaagaaaggttctcggcctcagaatgagactgctcccacatctctacacattgatgtatgaggctcatgtcagcggcaacccaatcgcgcgcccgctcttcttctcatttcctcaagacactaaaacctatgagattgattcccagttcttgattggtaaaagcataatggtttctccagcgctgaagcaaggggcggtagcagtggatgcatatttccctgctggaaattggttcgatctttttaactattcctttgccgttggtggagattctggcaagcacgttagacttgatactcccgctgatcacgtcaacgttcatgttcgagaaggtagcattgtggctatgcaaggagaggcattgacgactagggacgccagaaagacaccgtatcagcttctagttgtagccagccggcttgagaacatctccggcgaactgtttcttgatgacggagaaaatttacggatgggagctggaggaggaaaccgtgattggacccttgttaagttccggtgctatgtgaccggaaaatccgttgtactgagatcagaagtggtgaacccagagtatgcgtcgaaaatgaaatggagcatcgggaaagtgacgtttgttgggttcgagaacgtggagaacgtgaaaacgtacgaggttaggacaagtgagagattgaggagtcctagaatctctcttataaagacggtttcggacaatgatgatccgaggtttctaagtgtggaggtttctaaactgtcgttacttgttgggaagaagttcgaaatgagactgagattgacttgaagaagtatataaagtataaaacaatattgatgggaaattgtggatgcttaatgaataaggagtgaagaagaacatttagcaaagaaaagatttcatgatttttataaactccaaatcacatagatttgatttttttttttttctatttttgagaaacaaatgtgacttaattaatactagtggattaaatttct

SEQ ID NO: 3547 - protein, 902 aa, Arabidopsis thaliana
MSSLHWFPNIFIVVVVFFSLRSSQVVLEEEESTVVGYGYVVRSVGVDSNRQVLTAKLDLIKPSSVYAPDIKSLNLHVSLETSERLRIRITDSSQQRWEIPETVIPRAGNHSPRRFSTEEDGGNSPENNFLADPSSDLVFTLHNTTPFGFSVSRRSSGDILFDTSPDSSDSNTYFIFKDQFLQLSSALPENRSNLYGIGEHTKRSFRLIPGETMTLWNADIGSENPDVNLYGSHPFYMDVRGSKGNEEAGTTHGVLLLNSNGMDVKYEGHRITYNVIGGVIDLYVFAGPSPEMVMNQYTELIGRPAPMPYWSFGFHQCRYGYKNVSDLEYVVDGYAKAGIPLEVMWTDIDYMDGYKDFTLDPVNFPEDKMQSFVDTLHKNGQKYVLILDPGIGVDSSYGTYNRGMEADVFIKRNGEPYLGEVWPGKVYFPDFLNPAAATFWSNEIKMFQEILPLDGLWIDMNELSNFITSPLSSGSSLDDPPYKINNSGDKRPINNKTVPATSIHFGNISEYDAHNLYGLLEAKATHQAVVDITGKRPFILSRSTFVSSGKYTAHWTGDNAAKWEDLAYSIPGILNFGLFGIPMVGADICGFSHDTTEELCRRWIQLGAFYPFARDHSSLGTARQELYLWDSVASSARKVLGLRMRLLPHLYTLMYEAHVSGNPIARPLFFSFPQDTKTYEIDSQFLIGKSIMVSPALKQGAVAVDAYFPAGNWFDLFNYSFAVGGDSGKHVRLDTPADHVNVHVREGSIVAMQGEALTTRDARKTPYQLLVVASRLENISGELFLDDGENLRMGAGGGNRDWTLVKFRCYVTGKSVVLRSEVVNPEYASKMKWSIGKVTFVGFENVENVKTYEVRTSERLRSPRISLIKTVSDNDDPRFLSVEVSKLSLLVGKKFEMRLRLT

SEQ ID NO: 3548 - protein, 690 aa, Arabidopsis thaliana
MTLWNADIGSENPDVNLYGSHPFYMDVRGSKGNEEAGTTHGVLLLNSNGMDVKYEGHRITYNVIGGVIDLYVFAGPSPEMVMNQYTELIGRPAPMPYWSFGFHQCRYGYKNVSDLEYVVDGYAKAGIPLEVMWTDIDYMDGYKDFTLDPVNFPEDKMQSFVDTLHKNGQKYVLILDPGIGVDSSYGTYNRGMEADVFIKRNGEPYLGEVWPGKVYFPDFLNPAAATFWSNEIKMFQEILPLDGLWIDMNELSNFITSPLSSGSSLDDPPYKINNSGDKRPINNKTVPATSIHFGNISEYDAHNLYGLLEAKATHQAVVDITGKRPFILSRSTFVSSGKYTAHWTGDNAAKWEDLAYSIPGILNFGLFGIPMVGADICGFSHDTTEELCRRWIQLGAFYPFARDHSSLGTARQELYLWDSVASSARKVLGLRMRLLPHLYTLMYEAHVSGNPIARPLFFSFPQDTKTYEIDSQFLIGKSIMVSPALKQGAVAVDAYFPAGNWFDLFNYSFAVGGDSGKHVRLDTPADHVNVHVREGSIVAMQGEALTTRDARKTPYQLLVVASRLENISGELFLDDGENLRMGAGGGNRDWTLVKFRCYVTGKSVVLRSEVVNPEYASKMKWSIGKVTFVGFENVENVKTYEVRTSERLRSPRISLIKTVSDNDDPRFLSVEVSKLSLLVGKKFEMRLRLT

SEQ ID NO: 3549 - protein, 666 aa, Arabidopsis thaliana
MDVRGSKGNEEAGTTHGVLLLNSNGMDVKYEGHRITYNVIGGVIDLYVFAGPSPEMVMNQYTELIGRPAPMPYWSFGFHQCRYGYKNVSDLEYVVDGYAKAGIPLEVMWTDIDYMDGYKDFTLDPVNFPEDKMQSFVDTLHKNGQKYVLILDPGIGVDSSYGTYNRGMEADVFIKRNGEPYLGEVWPGKVYFPDFLNPAAATFWSNEIKMFQEILPLDGLWIDMNELSNFITSPLSSGSSLDDPPYKINNSGDKRPINNKTVPATSIHFGNISEYDAHNLYGLLEAKATHQAVVDITGKRPFILSRSTFVSSGKYTAHWTGDNAAKWEDLAYSIPGILNFGLFGIPMVGADICGFSHDTTEELCRRWIQLGAFYPFARDHSSLGTARQELYLWDSVASSARKVLGLRMRLLPHLYTLMYEAHVSGNPIARPLFFSFPQDTKTYEIDSQFLIGKSIMVSPALKQGAVAVDAYFPAGNWFDLFNYSFAVGGDSGKHVRLDTPADHVNVHVREGSIVAMQGEALTTRDARKTPYQLLVVASRLENISGELFLDDGENLRMGAGGGNRDWTLVKFRCYVTGKSVVLRSEVVNPEYASKMKWSIGKVTFVGFENVENVKTYEVRTSERLRSPRISLIKTVSDNDDPRFLSVEVSKLSLLVGKKFEMRLRLT

SEQ ID NO: 3550 - DNA, 543 bp, Arabidopsis thaliana
aaggatttatgatcttcaaattcaagtatgaattataaagtttcgatttttacgaatcattaattttgtattcaggtactgctaaaaaaatggcttctcctattcccgtcggcgttactaaggaaaaggcgtttagtatggcacaaacggagatggagtatcgcgtggaactctttaacaagcttgctcaaacatgctttaataaatgtgtggataaaaggtacaaggaagctgagctaaacatgggtgagaatagttgcatcgaccgttgtgtttccaagtactggcaggtaaatggaatggttggacagcttctaagtgctggcaagcctcccgtgtaatccagtttaaaggcaattattacagaccaaaaagctcatggagggaacacaactctgttctttgtttttctaaagtttaaggcaatcttgtttttattgtcaagaaagttgcatcacatttttggcgctgatttggacaaattatgcaattccatgtgaacccattattattacctaaggggtgaaatgaaataacaaatcg

SEQ ID NO: 3551 - protein, 83 aa, Arabidopsis thaliana
MASPIPVGVTKEKAFSMAQTEMEYRVELFNKLAQTCFNKCVDKRYKEAELNMGENSCIDRCVSKYWQVNGMVGQLLSAGKPPV

SEQ ID NO: 3552 - protein, 67 aa, Arabidopsis thaliana
MAQTEMEYRVELFNKLAQTCFNKCVDKRYKEAELNMGENSCIDRCVSKYWQVNGMVGQLLSAGKPPV

SEQ ID NO: 3553 - protein, 62 aa, Arabidopsis thaliana
MEYRVELFNKLAQTCFNKCVDKRYKEAELNMGENSCIDRCVSKYWQVNGMVGQLLSAGKPPV

SEQ ID NO: 3554 - DNA, 1277 bp, Arabidopsis thaliana
ctctccactctctcaatctcttaacttaaacaaaaccaacaattatcaatcttcaatgacgcatctcaacaaaaaacagaggttagagaataaccataacaatactgtgaacaaccatttcgaagacttacatgacgatctcatcatctctatcctccgcaaactcgctacctccgcttcttctccttccgatttcctcaccgttctctccacatgcaagagattgaatcggttaggattacatcctctggttttatctaaagccggtactcaaaccctagccgtcacggcggagaaatggtcagattcttctcataaattcctcaaactctgtgttaatgccggaaacatcgacgcttcgtactctctcggaatgatccgattttactgtctacaaaatccagtgagcggcgcgtcattaatggctaaagcggcgattaaatcacacgcgccggcgctttattcgttatcggtgattcagtttaacggaagcggcggttcaaaaaccgataagaatctacgcgccggcgttgctctttgtgcacgctctgcttatttaggccacgtcgatgcgttacgagagcttggtcactgtcttcaagacggttacggtgttcctcgtgacgtctccgaaggtcgtcgtcttttgattcaagctaacgcgcgtgagctcgcgtgttctctacgctcttacctctctctgaaatctggggacgagaacgagaccttaactgatttaagcgtggttccggttcaggagattcatccggttaaccggtttttaaaagagtggtttagttcgggtcgggttgatttagcggaagggttaaggatgtgttcgcatggtggttgtggaaggccggagactcgggctcatgagtttcggcgatgttctgtttgtgggaaggttaattattgctcgcgtggttgtcaggcgttggattggagagcgaagcataaggttgaatgtacgccgttggatttgtgggttgcggcagcggcggagattggcgacgacggtgaagcggtggcggtggagattgatgataatcatggtgagcggtaacggctctaacgctttttttcaaggaaatgactgaaatgccaacagtttctttgactgttgagtttttttttttttttgggttatttaattatgttttaaaaaatttaatgttaatttcttctcttaattaattagttttggctaatggcgtttctgaatcttctgatactaaactggcatgttattttaaataatatagttttttgccgtt

SEQ ID NO: 3555 - protein, 354 aa, Arabidopsis thaliana
SPLSQSLNLNKTNNYQSSMTHLNKKQRLENNHNNTVNNHFEDLHDDLIISILRKLATSASSPSDFLTVLSTCKRLNRLGLHPLVLSKAGTQTLAVTAEKWSDSSHKFLKLCVNAGNIDASYSLGMIRFYCLQNPVSGASLMAKAAIKSHAPALYSLSVIQFNGSGGSKTDKNLRAGVALCARSAYLGHVDALRELGHCLQDGYGVPRDVSEGRRLLIQANARELACSLRSYLSLKSGDENETLTDLSVVPVQEIHPVNRFLKEWFSSGRVDLAEGLRMCSHGGCGRPETRAHEFRRCSVCGKVNYCSRGCQALDWRAKHKVECTPLDLWVAAAAEIGDDGEAVAVEIDDNHGER

SEQ ID NO: 3556 - protein, 336 aa, Arabidopsis thaliana
MTHLNKKQRLENNHNNTVNNHFEDLHDDLIISILRKLATSASSPSDFLTVLSTCKRLNRLGLHPLVLSKAGTQTLAVTAEKWSDSSHKFLKLCVNAGNIDASYSLGMIRFYCLQNPVSGASLMAKAAIKSHAPALYSLSVIQFNGSGGSKTDKNLRAGVALCARSAYLGHVDALRELGHCLQDGYGVPRDVSEGRRLLIQANARELACSLRSYLSLKSGDENETLTDLSVVPVQEIHPVNRFLKEWFSSGRVDLAEGLRMCSHGGCGRPETRAHEFRRCSVCGKVNYCSRGCQALDWRAKHKVECTPLDLWVAAAAEIGDDGEAVAVEIDDNHGER

SEQ ID NO: 3557 - protein, 230 aa, Arabidopsis thaliana
MIRFYCLQNPVSGASLMAKAAIKSHAPALYSLSVIQFNGSGGSKTDKNLRAGVALCARSAYLGHVDALRELGHCLQDGYGVPRDVSEGRRLLIQANARELACSLRSYLSLKSGDENETLTDLSVVPVQEIHPVNRFLKEWFSSGRVDLAEGLRMCSHGGCGRPETRAHEFRRCSVCGKVNYCSRGCQALDWRAKHKVECTPLDLWVAAAAEIGDDGEAVAVEIDDNHGER

SEQ ID NO: 3558 - DNA, 932 bp, Arabidopsis thaliana
atctttaggccaatgaacaaattaactctctcataattcatcttcccatcctcacttctctttctttctgatcataattaatcttgctaagccagctagggcttatagaaatggagggtggtgcgagtaatgaagtagcagagagcagcaagaagatagggagagggaagatagagataaagaggatagagaacactacgaatcgtcaagtcactttctgcaaacgacgcaatggtttactcaagaaagcttatgagctctctgtcttgtgtgacgctgaggttgctcttgtcatcttctccactcgaggccgtctctacgagtacgccaacaacagtgtgagaggaacaatagaaaggtacaagaaagcttgctccgacgccgttaaccctccgaccatcaccgaagctaatactcagtactatcagcaagaggcgtctaaactccggagacagattcgggacattcagaatttgaacagacacattcttggtgaatctcttggttccttgaactttaaggaactcaagaaccttgaaagtaggcttgagaaaggaatcagtcgtgtccgatccaagaagcacgagatgttagttgcagagattgaatacatgcaaaaaagggtaaaagaaatcgagctgcaaaacgataacatgtatctccgctccaagattactgaaagaacaggtctacagcaacaagaatcgagtgtgatacatcaagggacagtttacgagtcgggtgttacttcttctcaccagtcggggcagtataaccggaattatattgcggttaaccttcttgaaccgaatcagaattcctccaaccaagaccaaccacctctgcaacttgtttgattcagtctaacataagcttctttcctcagcctgagatcgatcttatgcatatatatattcatgttacacttactg

SEQ ID NO: 3559 - protein, 248 aa, Arabidopsis thaliana
MEGGASNEVAESSKKIGRGKIEIKRIENTTNRQVTFCKRRNGLLKKAYELSVLCDAEVALVIFSTRGRLYEYANNSVRGTIERYKKACSDAVNPPTITEANTQYYQQEASKLRRQIRDIQNLNRHILGESLGSLNFKELKNLESRLEKGISRVRSKKHEMLVAEIEYMQKRVKEIELQNDNMYLRSKITERTGLQQQESSVIHQGTVYESGVTSSHQSGQYNRNYIAVNLLEPNQNSSNQDQPPLQLV

SEQ ID NO: 3560 - DNA, 1245 bp, Arabidopsis thaliana
ctcataagtcattataatagtttcccccggattgttttttctttctttttgctaatcatcatcggtttcttctaatcaaaaaaaaaaacaaaaaaaaaagagggactacgttcgtacaatcccatccttggtatggatttctggccggagtttatggcgaccagctggggaagagagttcgtcgccggtggtttcggtggcgtcgccggcatcatctccggctaccccttggacaccctcagaattcgccagcaacagagctcgaaatctggatctgccttctccattctccggcggatgctcgccattgagggtccctcctctctctacagaggcatggctgcgcctttggcctccgtcacttttcagaatgctatggtattccagatatacgccatattctctcgctcttttgattcctctgttcctctggtagagcctccttcctacagaggcgttgctcttggtggtgttgccaccggtgctgtacagagcctcttgctcacccctgtcgagctcatcaagattcgtctccagcttcagcagactaagtctggtcccatcaccttggccaagagcatccttaggagacagggccttcaggggctttacagaggcctcaccatcaccgtgctccgagatgctcccgctcatggcctctacttctggacctatgagtacgtcagagaaaggcttcaccccggctgcagaaagaccggacaagaaaacctcaggaccatgctcgtggctggtggccttgctggagtggccagctgggtcgcttgttatcctcttgatgtcgtcaagaccagactccaacaaggtcatggggcttacgagggcattgccgattgttttcgcaagagcgtcaaacaggaaggctatacggttctctggcgtggcctcgggactgcagttgccagggcctttgtggtcaacggtgctatctttgctgcttatgaggtagccttgcggtgtctattcaatcaatcgccatccccagatattgtcacaggagattgagtgagtaaagggcaaagaaggttcattagttgcagtctggacctgtgaatgtagttaatattagcacatagtttgagatggatttggattgcatagcattggtcaaacaaatctgactcgctttagggatcaggcagtttactaatcacagttgatcatagagacgttccagaaatgattacaaaccccaaagaaaacagatgaaatgaaaattctgttact

SEQ ID NO: 3561 - protein, 296 aa, Arabidopsis thaliana
MDFWPEFMATSWGREFVAGGFGGVAGIISGYPLDTLRIRQQQSSKSGSAFSILRRMLAIEGPSSLYRGMAAPLASVTFQNAMVFQIYAIFSRSFDSSVPLVEPPSYRGVALGGVATGAVQSLLLTPVELIKIRLQLQQTKSGPITLAKSILRRQGLQGLYRGLTITVLRDAPAHGLYFWTYEYVRERLHPGCRKTGQENLRTMLVAGGLAGVASWVACYPLDVVKTRLQQGHGAYEGIADCFRKSVKQEGYTVLWRGLGTAVARAFVVNGAIFAAYEVALRCLFNQSPSPDIVTGD

SEQ ID NO: 3562 - protein, 289 aa, Arabidopsis thaliana
MATSWGREFVAGGFGGVAGIISGYPLDTLRIRQQQSSKSGSAFSILRRMLAIEGPSSLYRGMAAPLASVTFQNAMVFQIYAIFSRSFDSSVPLVEPPSYRGVALGGVATGAVQSLLLTPVELIKIRLQLQQTKSGPITLAKSILRRQGLQGLYRGLTITVLRDAPAHGLYFWTYEYVRERLHPGCRKTGQENLRTMLVAGGLAGVASWVACYPLDVVKTRLQQGHGAYEGIADCFRKSVKQEGYTVLWRGLGTAVARAFVVNGAIFAAYEVALRCLFNQSPSPDIVTGD

SEQ ID NO: 3563 - protein, 241 aa, Arabidopsis thaliana
MLAIEGPSSLYRGMAAPLASVTFQNAMVFQIYAIFSRSFDSSVPLVEPPSYRGVALGGVATGAVQSLLLTPVELIKIRLQLQQTKSGPITLAKSILRRQGLQGLYRGLTITVLRDAPAHGLYFWTYEYVRERLHPGCRKTGQENLRTMLVAGGLAGVASWVACYPLDVVKTRLQQGHGAYEGIADCFRKSVKQEGYTVLWRGLGTAVARAFVVNGAIFAAYEVALRCLFNQSPSPDIVTGD

SEQ ID NO: 3564 - DNA, 1261 bp, Arabidopsis thaliana
tgaaatccaaaacaaacatttttagtttgcgattctcggattcgatcagtgaaattcgaatcgaagcgccgccggaagaatcatcgccggtgtgggagcgtttcccggagcggcgatggaggtccatggctccggattccgtcgaattctgttgttggcgttgtgtatctccgggatctggtccgcctacatctaccaaggcgttcttcaagagactctgtccacgaagagatttggtccagatgagaagaggttcgagcatcttgcattcttgaacttagctcaaagtgtagtctgcttgatctggtcttatataatgatcaagctctggtcaaatgctggtaacggtggagcaccatggtggacgtattggagtgcaggcattactaatacaattggtcctgccatgggaattgaagccttgaagtatatcagttatccagctcaggttttggcaaaatcgtcaaaaatgattccagttatgctaatgggaactttagtttacggaataagatacactttccctgaatacatgtgcacctttcttgtcgctggaggagtatccatctttgctcttcttaagacaagctctaagacaattagcaagctagcacatccaaatgctcccctcggttacgcactttgttccttaaacctcgcctttgacggattcacaaatgccacacaagactccattgcctcaaggtacccgaaaaccgaagcgtgggacataatgctgggaatgaacttatggggcacaatatacaacatgatctacatgtttggcttgccacaagggataggattcaaagcaattcagttctgtaagctacacccggaagcggcatgggacattctaaagtattgtatatgcggtgccgtgggacaaaacttcatcttcatgacaataagtaacttcgggtcactagctaacacgaccataaccacgaccaggaagtttgttagcattgttgtatcatcagtaatgagcggaaatccattgtcgttgaagcaatggggatgtgtttcgatggtctttggtggtttggcatatcaaatttatcttaaatggaagaaattgcagagagtggagaagaagaagcaaaagagttgaagtttttccctcatatctctaaattacgtatcagttattcttagtttatttatgtcactagtcaatacaaagaaactcaaaccagattagttaactgtataagtaacattactaatcactaaaatatatgatttgaattttgtgggt

SEQ ID NO: 3565 - protein, 332 aa, Arabidopsis thaliana [sequence omitted]

SEQ ID NO: 3566 - protein, 265 aa, Arabidopsis thaliana
MIKLWSNAGNGGAPWWTYWSAGITNTIGPAMGIEALKYISYPAQVLAKSSKMIPVMLMGTLVYGIRYTFPEYMCTFLVAGGVSIFALLKTSSKTISKLAHPNAPLGYALCSLNLAFDGFTNATQDSIASRYPKTEAWDIMLGMNLWGTIYNMIYMFGLPQGIGFKAIQFCKLHPEAAWDILKYCICGAVGQNFIFMTISNFGSLANTTITTTRKFVSIVVSSVMSGNPLSLKQWGCVSMVFGGLAYQIYLKWKKLQRVEKKKQKS

SEQ ID NO: 3567 - protein, 235 aa, Arabidopsis thaliana
MGIEALKYISYPAQVLAKSSKMIPVMLMGTLVYGIRYTFPEYMCTFLVAGGVSIFALLKTSSKTISKLAHPNAPLGYALCSLNLAFDGFTNATQDSIASRYPKTEAWDIMLGMNLWGTIYNMIYMFGLPQGIGFKAIQFCKLHPEAAWDILKYCICGAVGQNFIFMTISNFGSLANTTITTTRKFVSIVVSSVMSGNPLSLKQWGCVSMVFGGLAYQIYLKWKKLQRVEKKKQKS

SEQ ID NO: 3568 - DNA, 1232 bp, Arabidopsis thaliana
aattccccaatttctccaatctgagaaaatagggtttccgatttggatccttaattcagacacctgactcgtcttctcatcctacccccaattcaatattcgtcgccaatatgccgcaaagacactcgaagaacaacaatgatcttgcgtatttcacttacgacgagaagaagaagttaggttatggaactcagagagagagattggggagagactcgatcaaaccctttgatgcttgttctctctgcttgaagcctttcattgatccgatgtgttgccataagggtcatgtcttttgcagagagtgtatgcttgaatgtttccttgctcagaagaaagatatccaaaggaggcttgctgcacattcgtctcaaaagaagcaagataaggatgaagaagaagagaggctaatgttacaaaaggcgagagagctcgacgaatttgatcagcaaaaccatagtgcaatgcctcgaaacagtgacaagaatcacgacgaagataagaatggttttcatggggcaaacagtgtgaagacgacttcctttgaagaagaagcgcttaggacaatgaaagccttctggctcccatcagctacaccagcagcttcggtcagagtagatgctccagaaactcacacagtctgtccagagggcaaagagaagctcaagcttaagaacctctttgcaattcgtttcacagaagacaacagcgaagaggaagagaccaagacaaaatcagcatcttcaagctcttatgataaatcctacatctgcccgagctgcaaagtcactctcaccaacacaatgtccctcgtggcacttagctcatgcggacatgttttctgcaagaagtgtgctgagaagtttatgcccgtcgacaaagtctgtcttgtgtgtgacaaaccttgcaaggataggaacttggttgggttaaagaaagtaggcacgggtttcgctgagcacgacgatcatcttgaggctaaggagtacaagcatttgggtagtggatctggtttggggcttgtgaggccggttaagacatgatgtaaccacatcaaatgttctgttccagttacagaaaatatccttgattttgtaatacttatggcttgtatcctttgctacaactaagagacgctgctttctccattttggctcttggtttgtccttttgatcggatcctatttgtgtttcttccctacggagatcaaatggaaatttaacatttaagt

SEQ ID NO: 3569 - protein, 310 aa, Arabidopsis thaliana
MPQRHSKNNNDLAYFTYDEKKKLGYGTQRERLGRDSIKPFDACSLCLKPFIDPMCCHKGHVFCRECMLECFLAQKKDIQRRLAAHSSQKKQDKDEEEERLMLQKARELDEFDQQNHSAMPRNSDKNHDEDKNGFHGANSVKTTSFEEEALRTMKAFWLPSATPAASVRVDAPETHTVCPEGKEKLKLKNLFAIRFTEDNSEEEETKTKSASSSSYDKSYICPSCKVTLTNTMSLVALSSCGHVFCKKCAEKFMPVDKVCLVCDKPCKDRNLVGLKKVGTGFAEHDDHLEAKEYKHLGSGSGLGLVRPVKT

SEQ ID NO: 3570 - protein, 257 aa, Arabidopsis thaliana
MCCHKGHVFCRECMLECFLAQKKDIQRRLAAHSSQKKQDKDEEEERLMLQKARELDEFDQQNHSAMPRNSDKNHDEDKNGFHGANSVKTTSFEEEALRTMKAFWLPSATPAASVRVDAPETHTVCPEGKEKLKLKNLFAIRFTEDNSEEEETKTKSASSSSYDKSYICPSCKVTLTNTMSLVALSSCGHVFCKKCAEKFMPVDKVCLVCDKPCKDRNLVGLKKVGTGFAEHDDHLEAKEYKHLGSGSGLGLVRPVKT

SEQ ID NO: 3571 - protein, 244 aa, Arabidopsis thaliana
MLECFLAQKKDIQRRLAAHSSQKKQDKDEEEERLMLQKARELDEFDQQNHSAMPRNSDKNHDEDKNGFHGANSVKTTSFEEEALRTMKAFWLPSATPAASVRVDAPETHTVCPEGKEKLKLKNLFAIRFTEDNSEEEETKTKSASSSSYDKSYICPSCKVTLTNTMSLVALSSCGHVFCKKCAEKFMPVDKVCLVCDKPCKDRNLVGLKKVGTGFAEHDDHLEAKEYKHLGSGSGLGLVRPVKT

SEQ ID NO: 3572 - DNA, 1448 bp, Arabidopsis thaliana
tgggagaagctattctcagattcacgacaccagttcgtcacaagcttcgagcccagctcggaaaacaaaattggaacttgctgcataaagtttagtttttttattgaatttggaaggatgattgggaatccagtaattcaagttccatcatcactaatgccatcatcctccatgattgcttgtcctcgagtttcacccaatggggttccttatcttccaccaaaacctagaactaggcatttagtggtcagagctgcatccaattccgatgctgctcatggtcaaccatcgtctgatggggggaagaatcctctcaccgttgttttggatgtgcccaggaatatatggagacagactttaaaacctttgagtgattttgggtttggtaagagaagtatttgggaaggtggtgttggtttgtttattgtctctggagctactcttcttgctcttagctgggcttggttgcgaggttttcaaatgcggtcgaagtttaggaaatatcagactgtgtttgagcttagtcatgcttctggtatttgcacgggaacaccggttaggatccgtggggttactgttggtacgattatccgtgttaatccttccttgaagaatattgaagctgttgctgagatagaagatgataagattattatcccgaggaattcattggttgaggtgaatcagtctggtcttctaatggaaactatgatcgacattatgcctaggaatccgataccagaaccttcagtaggacctctgcatcctgaatgtggtaaggaaggtctgatcgtttgtgataggcagacaataaaaggagtgcaaggagttagtttagatgaattagttggaattttcactcgtattggacgcgaagttgaggccattggtgttgccaatacgtattcgcttgctgagagagctgcttcggttattgaggaagcaaggccattgctcaaaaagattcaagccatggctgaagatgctcaacctttgctctctgagtttcgtgatagcggcttgctcaaggaagttgagtgtcttactcgaagccttacccaagcttctgacgatttgagaaaggttaattcgtcaattatgactcctgagaatacagaactcatacagaagtcaatctacactctggtttatactttgaagaacgtcgagagtataagctcagatattctgggattcacaggagatgaagccacaagaaaaaaccttaaactactcatcaaatccctaagcaggctactatgatcagcctgtagattttagactggataaataaaatccagaattttatggtaagcaagttttaaaaattcgaaaaatgtgttgtttcttctttagagttatttttgttttcgttttgtgttctgagattggggtttaatggagagacataattcagtttttataagaacaaaaatgtttgtttctct

SEQ ID NO: 3573 - protein, 420 aa, Arabidopsis thaliana
WEKLFSDSRHQFVTSFEPSSENKIGTCCIKFSFFIEFGRMIGNPVIQVPSSLMPSSSMIACPRVSPNGVPYLPPKPRTRHLVVRAASNSDAAHGQPSSDGGKNPLTVVLDVPRNIWRQTLKPLSDFGFGKRSIWEGGVGLFIVSGATLLALSWAWLRGFQMRSKFRKYQTVFELSHASGICTGTPVRIRGVTVGTIIRVNPSLKNIEAVAEIEDDKIIIPRNSLVEVNQSGLLMETMIDIMPRNPIPEPSVGPLHPECGKEGLIVCDRQTIKGVQGVSLDELVGIFTRIGREVEAIGVANTYSLAERAASVIEEARPLLKKIQAMAEDAQPLLSEFRDSGLLKEVECLTRSLTQASDDLRKVNSSIMTPENTELIQKSIYTLVYTLKNVESISSDILGFTGDEATRKNLKLLIKSLSRLL

SEQ ID NO: 3574 - protein, 381 aa, Arabidopsis thaliana
MIGNPVIQVPSSLMPSSSMIACPRVSPNGVPYLPPKPRTRHLVVRAASNSDAAHGQPSSDGGKNPLTVVLDVPRNIWRQTLKPLSDFGFGKRSIWEGGVGLFIVSGATLLALSWAWLRGFQMRSKFRKYQTVFELSHASGICTGTPVRIRGVTVGTIIRVNPSLKNIEAVAEIEDDKIIIPRNSLVEVNQSGLLMETMIDIMPRNPIPEPSVGPLHPECGKEGLIVCDRQTIKGVQGVSLDELVGIFTRIGREVEAIGVANTYSLAERAASVIEEARPLLKKIQAMAEDAQPLLSEFRDSGLLKEVECLTRSLTQASDDLRKVNSSIMTPENTELIQKSIYTLVYTLKNVESISSDILGFTGDEATRKNLKLLIKSLSRLL

SEQ ID NO: 3575 - protein, 368 aa, Arabidopsis thaliana
MPSSSMIACPRVSPNGVPYLPPKPRTRHLVVRAASNSDAAHGQPSSDGGKNPLTVVLDVPRNIWRQTLKPLSDFGFGKRSIWEGGVGLFIVSGATLLALSWAWLRGFQMRSKFRKYQTVFELSHASGICTGTPVRIRGVTVGTIIRVNPSLKNIEAVAEIEDDKIIIPRNSLVEVNQSGLLMETMIDIMPRNPIPEPSVGPLHPECGKEGLIVCDRQTIKGVQGVSLDELVGIFTRIGREVEAIGVANTYSLAERAASVIEEARPLLKKIQAMAEDAQPLLSEFRDSGLLKEVECLTRSLTQASDDLRKVNSSIMTPENTELIQKSIYTLVYTLKNVESISSDILGFTGDEATRKNLKLLIKSLSRLL

SEQ ID NO: 3576 - DNA, 1393 bp, Arabidopsis thaliana
aacattctcatttcatagcaaaacaccaaaacagagttcacagaaacatattcaaagatttttcacaaatattaccattttaaatctataaacaatgacgaactcggtggctaagttggcactactagggttttgcattctgcaagtgacgagcttacttgttccgcaagcaaatgctagggctttccttgtgtttggagattctctcgttgacaatggtaacaatgactttcttgctaccactgctcgtgccgataattacccttatggtatcgatttcccaactcatcgtcctacgggccgtttctccaatggtctaaacattccagatctcatcagtgaacatttgggtcaagagtctccaatgccgtaccttagtccaatgctgaagaaggacaaactcttaaggggagctaacttcgcctccgcgggtattggaatccttaacgacaccggaatccagtttctgaatattattaggatcacaaagcagctagagtacttcgagcagtacaaggttcgagtaagcgggttggtcggagaagaagagatgaatcggctcgtgaacggagctcttgtcctaataacacttggaggcaatgatttcgtcaacaactactacttggtccctttctctgcaagatctcgtcaattctctcttcctgactacgttgtctttgtcatttctgaataccgcaaagtcttacggaaaatgtacgatttgggtgctcgacgtgtccttgtgactggaacaggaccaatgggttgcgtcccggccgagctggcgcaacgtagccgcaacggcgagtgtgctaccgaactccaacgagccgcgtcactattcaacccacaactaattcaaatgataacagacctcaacaacgaagttggatcttcggccttcattgccgctaatactcaacaaatgcacatggacttcattagcgacccacaagcatatggattcgtcacgtcgaaggtggcttgttgtggacaagggccgtacaatgggatagggctatgcactccattatcaaatctttgcccaaacagagatctctttgccttttgggatccttttcacccatcagaaaaagcaagtagaatcatagctcaacaaatcctcaatggctctcctgaatacatgcatcccatgaatcttagcaccatcctcaccgttgattccatgacctaagcttctattcctcatctatcccaaatccactttatgctttgtttttgttttgcctttctcgtttattatatatttttacattggcactttaattagtttccttgagttatgttgtgagttttgtgttgttcatcaataattagtcaccaattgtgagctgagaagtaatattcaacaatcttacgaatgttcactatc

SEQ ID NO: 3577 - protein, 366 aa, Arabidopsis thaliana
MTNSVAKLALLGFCILQVTSLLVPQANARAFLVFGDSLVDNGNNDFLATTARADNYPYGIDFPTHRPTGRFSNGLNIPDLISEHLGQESPMPYLSPMLKKDKLLRGANFASAGIGILNDTGIQFLNIIRITKQLEYFEQYKVRVSGLVGEEEMNRLVNGALVLITLGGNDFVNNYYLVPFSARSRQFSLPDYVVFVISEYRKVLRKMYDLGARRVLVTGTGPMGCVPAELAQRSRNGECATELQRAASLFNPQLIQMITDLNNEVGSSAFIAANTQQMHMDFISDPQAYGFVTSKVACCGQGPYNGIGLCTPLSNLCPNRDLFAFWDPFHPSEKASRIIAQQILNGSPEYMHPMNLSTILTVDSMT

SEQ ID NO: 3578 - protein, 276 aa, Arabidopsis thaliana
MPYLSPMLKKDKLLRGANFASAGIGILNDTGIQFLNIIRITKQLEYFEQYKVRVSGLVGEEEMNRLVNGALVLITLGGNDFVNNYYLVPFSARSRQFSLPDYVVFVISEYRKVLRKMYDLGARRVLVTGTGPMGCVPAELAQRSRNGECATELQRAASLFNPQLIQMITDLNNEVGSSAFIAANTQQMHMDFISDPQAYGFVTSKVACCGQGPYNGIGLCTPLSNLCPNRDLFAFWDPFHPSEKASRIIAQQILNGSPEYMHPMNLSTILTVDSMT

SEQ ID NO: 3579 - protein, 270 aa, Arabidopsis thaliana
MLKKDKLLRGANFASAGIGILNDTGIQFLNIIRITKQLEYFEQYKVRVSGLVGEEEMNRLVNGALVLITLGGNDFVNNYYLVPFSARSRQFSLPDYVVFVISEYRKVLRKMYDLGARRVLVTGTGPMGCVPAELAQRSRNGECATELQRAASLFNPQLIQMITDLNNEVGSSAFIAANTQQMHMDFISDPQAYGFVTSKVACCGQGPYNGIGLCTPLSNLCPNRDLFAFWDPFHPSEKASRIIAQQILNGSPEYMHPMNLSTILTVDSMT

SEQ ID NO: 3580 - DNA, 1247 bp, Arabidopsis thaliana
gtgttttggttactatacttgtgtgccacttgggttctagggttccacgccatctgaatgatctgactcgttcgaattgcaaagtagtcttagaatggagaaagaagctgataacaagttcagatgggtgattaaaaatttctcatctttgggatccgagagagtcttttctgatatattcgtagttggttcttgcaaatggcgtcttatggcctatcccaaaggagttagggataatagatgtttctctctgtttctggttgttactgatttcaaaactttgccttgtgactggaaacgacacacaagattgcgcctaaatgttgttaatcaactctcggaagaactttccatactgaaagaaacacaaatgtggtttgatcaaaagactccggcctggggtttcttagcaatgcttcctcttaccgaacttaaggctgaaaatggtgggtttctggtgaatgaagaggtcaaaattgttgtggaggttgatgttgttgaagctcttggcaaattagaggaatctgaagaggcaacacaacctctgaaaaaggtaaagctagaggcttttgtggaatcgaaaggtttgcttaaggaaacttcatcagtaaaggaagaaatcattgatgtcaatgtgtttcatgttcttccttcccaggtggaatttgtaagccgtgtttttgaaagatacccagaaattgcatcaatattccaagcaaagaagcaacatttgagaacagcatgcatgtatgtcctcctaagtcttattgagacactgtgcaagtcactggaagagctctccaatgatgatcttgtgggaggagacaatgcgttacaatacctgaagttttctggctttaaggttgattggttggagaagaagctggaggaagttaaggaaaagaagaaggaagaacagattggtgaaactcgtatgcaagaaatgaaagtttttaagcagaagtgctcagatatagaagctcttatggagagagagaagtcaaagttgttggtcaccagaggttctcctctaacgttggatgatgttctttgaagacttacgttctctactacgtttgttctggtactgtgcgtttgctgtctaggtttcaaaataagagacttccccatgaaataagaagttcccattgtaaagacctttaacgcaagttttttggttatagatgttagcaaaaatctgtctttaacgctagttttcaattgttataagaagctgaggattattt

SEQ ID NO: 3581 - protein, 319 aa, Arabidopsis thaliana
MEKEADNKFRWVIKNFSSLGSERVFSDIFVVGSCKWRLMAYPKGVRDNRCFSLFLVVTDFKTLPCDWKRHTRLRLNVVNQLSEELSILKETQMWFDQKTPAWGFLAMLPLTELKAENGGFLVNEEVKIVVEVDVVEALGKLEESEEATQPLKKVKLEAFVESKGLLKETSSVKEEIIDVNVFHVLPSQVEFVSRVFERYPEIASIFQAKKQHLRTACMYVLLSLIETLCKSLEELSNDDLVGGDNALQYLKFSGFKVDWLEKKLEEVKEKKKEEQIGETRMQEMKVFKQKCSDIEALMEREKSKLLVTRGSPLTLDDVL

SEQ ID NO: 3582 - protein, 281 aa, Arabidopsis thaliana
MAYPKGVRDNRCFSLFLVVTDFKTLPCDWKRHTRLRLNVVNQLSEELSILKETQMWFDQKTPAWGFLAMLPLTELKAENGGFLVNEEVKIVVEVDVVEALGKLEESEEATQPLKKVKLEAFVESKGLLKETSSVKEEIIDVNVFHVLPSQVEFVSRVFERYPEIASIFQAKKQHLRTACMYVLLSLIETLCKSLEELSNDDLVGGDNALQYLKFSGFKVDWLEKKLEEVKEKKKEEQIGETRMQEMKVFKQKCSDIEALMEREKSKLLVTRGSPLTLDDVL

SEQ ID NO: 3583 - protein, 227 aa, Arabidopsis thaliana
MWFDQKTPAWGFLAMLPLTELKAENGGFLVNEEVKIVVEVDVVEALGKLEESEEATQPLKKVKLEAFVESKGLLKETSSVKEEIIDVNVFHVLPSQVEFVSRVFERYPEIASIFQAKKQHLRTACMYVLLSLIETLCKSLEELSNDDLVGGDNALQYLKFSGFKVDWLEKKLEEVKEKKKEEQIGETRMQEMKVFKQKCSDIEALMEREKSKLLVTRGSPLTLDDVL

SEQ ID NO: 3584 - DNA, 1088 bp, Arabidopsis thaliana
ctcatcattttctcgtttgctccatttttttcttctttctgcaaattttattttcccgagaaaatcatcactgagaaaaatgctcgctgtgtttgagaagacggtggcgaatagccctgaagctttacagagtccacactcgtctgagtctgctttcgcgttgaaagatggatctctcgctactcatttcgcttccgtgaatcccaactccgtcacgcttaacttcggatcttctggatttgttgcttactctcttgataatcctgatcctcgtgttcctagattatttgctgtggtggatgatattttctgtctcttccaaggacacattgagaacctaccgtttctgaagcagcagtatggactgaacaaaatcacaaacgaggccatcattgtgattgaggcttacaggacactacgtgatcgaggtccttaccctgtggacaaagttgttagagatttccatggaaagtttgcgtttatactcttcgatagcgtcaagaaaactgtctttgctgctgctgacgccgatgggagtgtgccgttcttctggggaaccgatgctgaagggcaccttgtgttttctgataacaccgagatggtgaagaaaggttgcgccaaatcttatggtcctttccctaaaggttgtttctttacgtcgtcgggtggattgaggagctttgagcacccaaagaacgagttgaagccagtgccgagagtggacagctcaggtgacgtgtgtggtgcaaccttcaaggttgacgctgagactaagagagagggtaccaaaatgcctagagtcgatagctcccaaaattgggccggtcatatctaaaccggaaatcatacacaaatcacaagctcagcatcttctccctcttgtcttgtcccctctctttcgttacatgtttgagttacattgagaaaataatttcaaaccacaatgttctaaacgcgtttatgtacatgtttgaggtgggatttggaaaggatgtcgagttttgtgaaactttggaattacgagactactagacttttgtttctctgtttacgtttcttaaatcaataaataaataagtttttattcc

SEQ ID NO: 3585 - protein, 277 aa, Arabidopsis thaliana
SSFSRLLHFFLLSANFIFPRKSSLRKMLAVFEKTVANSPEALQSPHSSESAFALKDGSLATHFASVNPNSVTLNFGSSGFVAYSLDNPDPRVPRLFAVVDDIFCLFQGHIENLPFLKQQYGLNKITNEAIIVIEAYRTLRDRGPYPVDKVVRDFHGKFAFILFDSVKKTVFAAADADGSVPFFWGTDAEGHLVFSDNTEMVKKGCAKSYGPFPKGCFFTSSGGLRSFEHPKNELKPVPRVDSSGDVCGATFKVDAETKREGTKMPRVDSSQNWAGHI

SEQ ID NO: 3586 - protein, 251 aa, Arabidopsis thaliana
MLAVFEKTVANSPEALQSPHSSESAFALKDGSLATHFASVNPNSVTLNFGSSGFVAYSLDNPDPRVPRLFAVVDDIFCLFQGHIENLPFLKQQYGLNKITNEAIIVIEAYRTLRDRGPYPVDKVVRDFHGKFAFILFDSVKKTVFAAADADGSVPFFWGTDAEGHLVFSDNTEMVKKGCAKSYGPFPKGCFFTSSGGLRSFEHPKNELKPVPRVDSSGDVCGATFKVDAETKREGTKMPRVDSSQNWAGHI

SEQ ID NO: 3587 - DNA, 1856 bp, Arabidopsis thaliana
atgactcagtcttctctctctcttctctcaatgcccatgataacaccaaaccacttgcttctgcttctcacaccacaaaattctctattcaataaataaatctctcagaagaaatttcttcgaattggagaagataaaaaaagttttatcttttcttgattttttttcttttttttctaatcattcacacccaatttaaacgagacttgtccaatctctatccatcaatattgtatcatttcttgtaaagtactctgttttagcttcacacgccattttttgtttttccatttgacttctgtaaaatcctgacaaagaattgtttaagacatacatatacgtgttatatatttgtaaaggaagcaaaaagtgtttggcttttaatttctctctgttgggatgggtctttgttggggatctccatctgattctcctccaacaacaacaccttcctctactggtaacatcagttcagtagggacttttaagtcatcaaacaacacgacgactacaggaacatcaaggggaagtaacatatctagcaatagtgggttctctgtggcaagtggtgaagatgcttaccccgatggtcagatacttcccattccgaatttgaggatattcagcttagcagaacttagagcttcaacaaggaatttcaggtctgagaatgttcttggagagggaggatttgggaaagtctttaaaggctggcttgaagacaagactccagggaaacaaagcaacggaactgtgattgctgttaagaaactgaatgcagaaagcttccaaggattcgaagaatggcaatgtgaagtgaattttcttgggagggtttctcatccaaacctcgtgaagctgttgggatactgcttggaaggtgaagagttgcttcttgtgtatgagtatatgcaaaaagggagcttagagaatcatctcttccgaaaggggtctgccgttcagccactctcatgggagataaggcttaagattgcaataggagcagctaaaggcttagcattcttacacgcttcagagaagcaagtaatttatcgagacttcaaagcgtcaaacattctacttgatgggtcatataacgcaaagatatcagattttggattggcgaaattaggaccttccgctagtcaatctcacatcacaacacgggttatgggtacacacggttacgcagctccagagtatgttgctacaggtcacttgtatgtaaagagcgatgtttacgggtttggcgttgttttggctgagatcttaactggtttacatgcgcttgatcctactcgtcctaccgggcaacacaatctaaccgaatggatcaaacctcatctatccgaaagaagaaagctaagaagcataatggaccctcgtctagaaggaaaataccctttcaaatctgctttccgagtagctcaactggctctgaaatgccttggacccgaacccaaaaaccgtccatcgatgaaagaagtggtggaatcgctcgaactcatcgaagctgccaatgagaaaccgttagaacgaaggaccactagagcttccccatccatccgtcaacaacaaggccattatcgcccgcaacaactctcttcgtttcgtcctagacaaaacgtgtctcgagctcactagtgttgtttgaagacactgagattcttttcttagttttgtatttgttaagattatcaaaacccattcgtatgtatactacatgaaagagaaaacaaatgttgtacctgtattagtatgtagtgtttggtgtgtgtaatataactacttaaacggttaaaccagattatgaaaaggtttaactaatggtcatcaatatataagccattgttcac

SEQ ID NO: 3588 - protein, 414 aa, Arabidopsis thaliana
MGLCWGSPSDSPPTTTPSSTGNISSVGTFKSSNNTTTTGTSRGSNISSNSGFSVASGEDAYPDGQILPIPNLRIFSLAELRASTRNFRSENVLGEGGFGKVFKGWLEDKTPGKQSNGTVIAVKKLNAESFQGFEEWQCEVNFLGRVSHPNLVKLLGYCLEGEELLLVYEYMQKGSLENHLFRKGSAVQPLSWEIRLKIAIGAAKGLAFLHASEKQVIYRDFKASNILLDGSYNAKISDFGLAKLGPSASQSHITTRVMGTHGYAAPEYVATGHLYVKSDVYGFGVVLAEILTGLHALDPTRPTGQHNLTEWIKPHLSERRKLRSIMDPRLEGKYPFKSAFRVAQLALKCLGPEPKNRPSMKEVVESLELIEAANEKPLERRTTRASPSIRQQQGHYRPQQLSSFRPRQNVSRAH

SEQ ID NO: 3589 - protein, 244 aa, Arabidopsis thaliana
MQKGSLENHLFRKGSAVQPLSWEIRLKIAIGAAKGLAFLHASEKQVIYRDFKASNILLDGSYNAKISDFGLAKLGPSASQSHITTRVMGTHGYAAPEYVATGHLYVKSDVYGFGVVLAEILTGLHALDPTRPTGQHNLTEWIKPHLSERRKLRSIMDPRLEGKYPFKSAFRVAQLALKCLGPEPKNRPSMKEVVESLELIEAANEKPLERRTTRASPSIRQQQGHYRPQQLSSFRPRQNVSRAH

SEQ ID NO: 3590 - DNA, 1455 bp, Arabidopsis thaliana
taaaaaaaaaaaaataaaaatctaggaaggagaaggagagaggagaagtgattcgatcgattctctttttggtgatcgaagctaaatctataaggaatttgaatctttgtatgtgtttttttcgtggagatgagaagcggcggcttggaaatgatgtcatcttcagcaatcgtagcgtttaatttgaaggagggtaagaattggtggtgggatgtgaatgaatctccggtgtggcaggatcgtatcttccatgttcttgctgttctatatggaatcgtttccgtcattgctgtgattcaattggtaagaatacaattgagagttccagaatatggctggacgacgcagaaggtctttcattttctcaatttcatggttaacggagttcgagctctggtttttctcttccggcgagatgcacagaacatgcagccagagattctgcaacatatcttacttgatattccaagtcttgctttcttcactacatatgcgcttctggttctcttttgggcagagatttactaccaggcacgtgctgtatcgactgatggactgaggccaagtttcttcacaattaatgcagttgtatacgtaattcagattgctctttggttggttttgtggtggaagcctgttcaccttatggtaatcatttctaagatgttctttgcaggtgtctcattgtttgcggcccttggctttttattatatggaggaaggcttttcctgatgctgcaacgatttccagtagagtctaaagggcggcgcaagaagctacaagaggttggctacgtgacaaccatatgctttacatgtttcctcatcagatgtatcatgatgtgctttgatgcgtttgacgatgcagcagatcttgatgtcttagatcatccaatcctaaacttcatatattacttgttggtggagatattgccatcgtctctggtcctctttatcctaagaaagcttccgccaaaacgcggtatcacacagtaccatcaaatccaatgaacatgttcagagaatcgaaacactgaggtaccggtaaaccgaggggttcatgtttctttcatagacaaaagtgtaaattgtaaggggtttcagaacaatggattgtgatttctctctaactaattcaatgcggttgattagtataagtctctcttgtttatactgattcaaagtagtttggtgtgagaatgatagaatcatagttactgagatatccagcttctggttctgacttctgagacggaagaacaattggtattttgatgatatattatggacattggcttgttgtcagttcatacgaagtagttttttaagaaatgcaaatagtcatttgttgactggttggtcttttctctaccggtcttttccacttggttaattgaaagttaggtgatatctgcacgtactaatttcggttattattaattaattacaatcggc

SEQ ID NO: 3591 - protein, 293 aa, Arabidopsis thaliana
MRSGGLEMMSSSAIVAFNLKEGKNWWWDVNESPVWQDRIFHVLAVLYGIVSVIAVIQLVRIQLRVPEYGWTTQKVFHFLNFMVNGVRALVFLFRRDAQNMQPEILQHILLDIPSLAFFTTYALLVLFWAEIYYQARAVSTDGLRPSFFTINAVVYVIQIALWLVLWWKPVHLMVIISKMFFAGVSLFAALGFLLYGGRLFLMLQRFPVESKGRRKKLQEVGYVTTICFTCFLIRCIMMCFDAFDDAADLDVLDHPILNFIYYLLVEILPSSLVLFILRKLPPKRGITQYHQIQ

SEQ ID NO: 3592 - protein, 286 aa, Arabidopsis thaliana
MMSSSAIVAFNLKEGKNWWWDVNESPVWQDRIFHVLAVLYGIVSVIAVIQLVRIQLRVPEYGWTTQKVFHFLNFMVNGVRALVFLFRRDAQNMQPEILQHILLDIPSLAFFTTYALLVLFWAEIYYQARAVSTDGLRPSFFTINAVVYVIQIALWLVLWWKPVHLMVIISKMFFAGVSLFAALGFLLYGGRLFLMLQRFPVESKGRRKKLQEVGYVTTICFTCFLIRCIMMCFDAFDDAADLDVLDHPILNFIYYLLVEILPSSLVLFILRKLPPKRGITQYHQIQ

SEQ ID NO: 3593 - protein, 285 aa, Arabidopsis thaliana
MSSSAIVAFNLKEGKNWWWDVNESPVWQDRIFHVLAVLYGIVSVIAVIQLVRIQLRVPEYGWTTQKVFHFLNFMVNGVRALVFLFRRDAQNMQPEILQHILLDIPSLAFFTTYALLVLFWAEIYYQARAVSTDGLRPSFFTINAVVYVIQIALWLVLWWKPVHLMVIISKMFFAGVSLFAALGFLLYGGRLFLMLQRFPVESKGRRKKLQEVGYVTTICFTCFLIRCIMMCFDAFDDAADLDVLDHPILNFIYYLLVEILPSSLVLFILRKLPPKRGITQYHQIQ

SEQ ID NO: 3594 - DNA, 1250 bp, Arabidopsis thaliana
aacaagaacacagtaacgcaatcacagactccacagtccaaggagttttgcatactcaccaagccacaatcatttctctcttctctatctctctggttttgaatcggcgacgactgagtcaactcggtgttgttactggtttcgtcgtatgtgttgtaactgattaagttgatggatccgagtgggatgatgaacgaaggaggaccgtttaatctagcggagatctggcagtttccgttgaacggagtttcaaccgccggagattcttctagaagaagcttcgttggaccgaatcagttcggtgatgctgatctaaccacagctgctaacggtgatccagcgcgtatgagtcacgcgttgtctcaggcggttattgaaggtatctccggcgcttggaaacggagggaagatgagtctaagtcggcgaagatcgtctccaccattggcgctagtgaaggtgagaacaaaagacagaagatagatgaagtgtgtgatgggaaagcagaagcagaatcgctaggaacagagacggaacaaaagaagcaacagatggaaccaacgaaagattatattcatgttcgagctagaagaggtcaagctactgatagtcacagtttagctgaaagagcgagaagagagaaaataagtgagcggatgaaaatcttgcaagatcttgttccgggatgtaacaaggttattggaaaagcacttgttctagatgagataattaactatatacaatcattgcaacgtcaagttgagttcttatcgatgaagcttgaagcagtcaactcaagaatgaaccctggtatcgaggtttttccacccaaagagtttggtcagcaagcgtttgaaaatccggagatacagttcgggtcgcagtctacgagggaatacagtagaggagcatcaccagagtggttgcacatgcagataggatcaggtggtttcgaaagaacgtcttgataaagaaacaacacttggtcatcatcttactacaaataagatctaaaagctctaatatcccgagaagaaaaagcatacatacatataaatctcattctcattataggtttaaatatatggatgtgaatatacacatcatattgttgttctgaagaaagcaaaatagaaaagaagatatagttagtttcgacatcaagaaaaaacaagctgggaagggtttaaagtagaagaaacctcttgtaaaagaaaaaacgtttgttgttataaaattgtatctcattctt

SEQ ID NO: 3595 - protein, 264 aa, Arabidopsis thaliana
MDPSGMMNEGGPFNLAEIWQFPLNGVSTAGDSSRRSFVGPNQFGDADLTTAANGDPARMSHALSQAVIEGISGAWKRREDESKSAKIVSTIGASEGENKRQKIDEVCDGKAEAESLGTETEQKKQQMEPTKDYIHVRARRGQATDSHSLAERARREKISERMKILQDLVPGCNKVIGKALVLDEIINYIQSLQRQVEFLSMKLEAVNSRMNPGIEVFPPKEFGQQAFENPEIQFGSQSTREYSRGASPEWLHMQIGSGGFERTS

SEQ ID NO: 3596 - protein, 259 aa, Arabidopsis thaliana
MMNEGGPFNLAEIWQFPLNGVSTAGDSSRRSFVGPNQFGDADLTTAANGDPARMSHALSQAVIEGISGAWKRREDESKSAKIVSTIGASEGENKRQKIDEVCDGKAEAESLGTETEQKKQQMEPTKDYIHVRARRGQATDSHSLAERARREKISERMKILQDLVPGCNKVIGKALVLDEIINYIQSLQRQVEFLSMKLEAVNSRMNPGIEVFPPKEFGQQAFENPEIQFGSQSTREYSRGASPEWLHMQIGSGGFERTS

SEQ ID NO: 3597 - protein, 258 aa, Arabidopsis thaliana
MNEGGPFNLAEIWQFPLNGVSTAGDSSRRSFVGPNQFGDADLTTAANGDPARMSHALSQAVIEGISGAWKRREDESKSAKIVSTIGASEGENKRQKIDEVCDGKAEAESLGTETEQKKQQMEPTKDYIHVRARRGQATDSHSLAERARREKISERMKILQDLVPGCNKVIGKALVLDEIINYIQSLQRQVEFLSMKLEAVNSRMNPGIEVFPPKEFGQQAFENPEIQFGSQSTREYSRGASPEWLHMQIGSGGFERTS

SEQ ID NO: 3598 - DNA, 1267 bp, Arabidopsis thaliana
agatctgaccaaagcaagaagggcttttactaagagtaaaacagaggaatatggagaccaccgtgaaaaacaagcaagtgatactgagaaattatgtgaagggtatccctaaagaatctgacctaatgattatcacagcttcagaccccgtggaactcaaggttaagcccggatcagcggcggttatggtgaggaatctttacttgtcttgtgacccttacatggggattctcatgagagaaccaactccttccactctagcacttttggatgccttcatccccggaaagcctatagctggaattggagtgtctcaagtaatagattctgatgatccatcttttacgaaaggcgatatgatttggggaattgtgaactgggaggagtttagtactatcaacccggctgctatattcaaaatcgacgtcaatatcaatgttcctctcagctactatactggaatcctcggtatgataggtttaactgcttacgccgggtttttcgagatatgttcacctaagaaaggagacacagtgttcgtgtctgctgcttctggcgcggttggacagctcgtgggtcagtttgcaaagttgatgggctgctatgttgttggaagtgccggaagtaaacaaaaggtcgatctcctgctgaacaaattcggttacgatgatgcattcaattataaggaagagcctgaccttgactccgccttgaagaggtgtgtaccaaaaggtattgacatatactttgagaacgtgggaggcaaaatgcttgacgcggttctacttaacatgaaaacgtatggacgaatcgctgtatgtgggatgatatctcagtaccatcttgaaaccagagacaggttacaaaatctacctgacatcatattcaagaagataaggatgcaagggtttgcttcttatgactttatagatagattcccaaagttcttggagtttgttcttccctacataaaagaagagaaattagcgtacgtggaagacattgttgaaggactcgagaatggtcctgctgctcttgtaggacttcttcatggaaaaaacgttggtaagcaagttctcaaggttgcttgagagtaaagaaatctatccatgtatggatatatgtaaaattacaaaaaaactaccttgtatgtcgtattttaagggtatgggttctaattggaatttatatgaaataaaagggcatatagttaaattccatattttcgtgtttaaatgggcccaagtgaagcgcagcttaataatcc

SEQ ID NO: 3599 - protein, 346 aa, Arabidopsis thaliana
METTVKNKQVILRNYVKGIPKESDLMIITASDPVELKVKPGSAAVMVRNLYLSCDPYMGILMREPTPSTLALLDAFIPGKPIAGIGVSQVIDSDDPSFTKGDMIWGIVNWEEFSTINPAAIFKIDVNINVPLSYYTGILGMIGLTAYAGFFEICSPKKGDTVFVSAASGAVGQLVGQFAKLMGCYVVGSAGSKQKVDLLLNKFGYDDAFNYKEEPDLDSALKRCVPKGIDIYFENVGGKMLDAVLLNMKTYGRIAVCGMISQYHLETRDRLQNLPDIIFKKIRMQGFASYDFIDRFPKFLEFVLPYIKEEKLAYVEDIVEGLENGPAALVGLLHGKNVGKQVLKVA

SEQ ID NO: 3600 - protein, 321 aa, Arabidopsis thaliana
MIITASDPVELKVKPGSAAVMVRNLYLSCDPYMGILMREPTPSTLALLDAFIPGKPIAGIGVSQVIDSDDPSFTKGDMIWGIVNWEEFSTINPAAIFKIDVNINVPLSYYTGILGMIGLTAYAGFFEICSPKKGDTVFVSAASGAVGQLVGQFAKLMGCYVVGSAGSKQKVDLLLNKFGYDDAFNYKEEPDLDSALKRCVPKGIDIYFENVGGKMLDAVLLNMKTYGRIAVCGMISQYHLETRDRLQNLPDIIFKKIRMQGFASYDFIDRFPKFLEFVLPYIKEEKLAYVEDIVEGLENGPAALVGLLHGKNVGKQVLKVA

SEQ ID NO: 3601 - protein, 301 aa, Arabidopsis thaliana
MVRNLYLSCDPYMGILMREPTPSTLALLDAFIPGKPIAGIGVSQVIDSDDPSFTKGDMIWGIVNWEEFSTINPAAIFKIDVNINVPLSYYTGILGMIGLTAYAGFFEICSPKKGDTVFVSAASGAVGQLVGQFAKLMGCYVVGSAGSKQKVDLLLNKFGYDDAFNYKEEPDLDSALKRCVPKGIDIYFENVGGKMLDAVLLNMKTYGRIAVCGMISQYHLETRDRLQNLPDIIFKKIRMQGFASYDFIDRFPKFLEFVLPYIKEEKLAYVEDIVEGLENGPAALVGLLHGKNVGKQVLKVA

SEQ ID NO: 3602 - DNA, 2061 bp, Arabidopsis thaliana
agagagacatttcgccattagatcctcttttttttcttcgtaggtcgaacgaaattttgtgtttcgttgaggagaaaattgagccgtgtttgtgttgagatgtctatgatcgatgagccgttgtacccaatcgccgtacttatagacgagttaaaaaacgatgatattcagctaagattgaattccatcagaaggctttctacgatcgctcgtgctcttggggaagagaggactagaaaggaattgatccctttccttagcgaaaacaatgacgatgatgatgaggttttattagcaatggctgaagaattgggtgtgtttattccttatgttggtggtgttgagtatgcacatgttcttcttccacctttggaaactctttcgactgtcgaagaaacttgtgttagggagaaagctgttgagtcgctttgtagagttggctctcagatgagggagagtgacttggttgatcatttcatttcgttagttaagcgacttgccgctggtgagtggttcacagctagagtatcggcttgcggtgttttccatattgcatacccgagcgcgccggatatgttgaagactgagttaagatcgttgtatactcagctttgtcaggatgatatgccgatggtaaggagagctgcagcaactaatcttgggaaatttgctgctacggttgaatcagcgcatttgaagaccgacgttatgtccatgtttgaggatcttactcaagatgatcaagattctgttagattattggccgttgagggttgtgctgctcttgggaaattgttggagcctcaggattgtgtccaacacattcttcccgtgattgttaatttctcgcaggataagtcttggcgtgtgcgctatatggttgcaaatcaactctacgagctttgtgaagccgtgggacctgagcctactaggacggagctggtgcctgcatatgtgcgcctacttcgtgataatgaagctgaagtacgcatagcagctgccggaaaagttacaaagttttgtcggattctaaaccctgaaattgctatccagcacattctcccctgtgtgaaggagctatcatcagactcttctcagcatgtcagatctgcattggcctcagttataatgggaatggctccagtcttgggtaaggatgcaacaattgagcatctccttccaatctttctttctctattgaaagatgagttcccggatgtacgcttgaacattatcagcaaacttgaccaagtgaatcaggttattgggattgatctactatcacaatccttgttgccagctattgtagaacttgctgaagatagacactggagagtaagacttgctataatcgagtatatccctttgttggcaagtcagttaggtgttggcttctttgacgataagcttggtgctctttgcatgcaatggttacaagacaaggttcactcaatccgcgatgctgctgctaacaatctcaagcggcttgctgaggaatttggtcctgaatgggcaatgcaacatatagttcctcaggttcttgagatggttaacaaccctcactatctctaccgaatgaccattttgcgtgcggtgtctcttcttgcacctgtaatgggctcagagattacatgctctaagctcttacctgtagtaatgactgcatctaaagacagagttccaaacatcaaattcaacgtcgctaaagtacttcaatccctcattccaatagttgatcaatcggttgtggagaagacgattcgtcctgggcttgtggagctaagcgaggatccagatgttgatgtcaggtttttcgcaaaccaagctctacaatctattgacaatgtgatgatgtctagctaaaaacattagatcttgtctctctgcttataatcgttttctatttgattgaaaaaaaaaacaaatctcaagacttttgtaacgtagtagtggattctcgtcttgtgttttttattacacgcaaactactagagtgcctcggtacgggttttgtccattgtcttgctactaatgtgtttaaaactctatgttgataactaa

SEQ ID NO: 3603 - protein, 587 aa, Arabidopsis thaliana
MSMIDEPLYPIAVLIDELKNDDIQLRLNSIRRLSTIARALGEERTRKELIPFLSENNDDDDEVLLAMAEELGVFIPYVGGVEYAHVLLPPLETLSTVEETCVREKAVESLCRVGSQMRESDLVDHFISLVKRLAAGEWFTARVSACGVFHIAYPSAPDMLKTELRSLYTQLCQDDMPMVRRAAATNLGKFAATVESAHLKTDVMSMFEDLTQDDQDSVRLLAVEGCAALGKLLEPQDCVQHILPVIVNFSQDKSWRVRYMVANQLYELCEAVGPEPTRTELVPAYVRLLRDNEAEVRIAAAGKVTKFCRILNPEIAIQHILPCVKELSSDSSQHVRSALASVIMGMAPVLGKDATIEHLLPIFLSLLKDEFPDVRLNIISKLDQVNQVIGIDLLSQSLLPAIVELAEDRHWRVRLAIIEYIPLLASQLGVGFFDDKLGALCMQWLQDKVHSIRDAAANNLKRLAEEFGPEWAMQHIVPQVLEMVNNPHYLYRMTILRAVSLLAPVMGSEITCSKLLPVVMTASKDRVPNIKFNVAKVLQSLIPIVDQSVVEKTIRPGLVELSEDPDVDVRFFANQALQSIDNVMMSS

SEQ ID NO: 3604 - protein, 585 aa, Arabidopsis thaliana
MIDEPLYPIAVLIDELKNDDIQLRLNSIRRLSTIARALGEERTRKELIPFLSENNDDDDEVLLAMAEELGVFIPYVGGVEYAHVLLPPLETLSTVEETCVREKAVESLCRVGSQMRESDLVDHFISLVKRLAAGEWFTARVSACGVFHIAYPSAPDMLKTELRSLYTQLCQDDMPMVRRAAATNLGKFAATVESAHLKTDVMSMFEDLTQDDQDSVRLLAVEGCAALGKLLEPQDCVQHILPVIVNFSQDKSWRVRYMVANQLYELCEAVGPEPTRTELVPAYVRLLRDNEAEVRIAAAGKVTKFCRILNPEIAIQHILPCVKELSSDSSQHVRSALASVIMGMAPVLGKDATIEHLLPIFLSLLKDEFPDVRLNIISKLDQVNQVIGIDLLSQSLLPAIVELAEDRHWRVRLAIIEYIPLLASQLGVGFFDDKLGALCMQWLQDKVHSIRDAAANNLKRLAEEFGPEWAMQHIVPQVLEMVNNPHYLYRMTILRAVSLLAPVMGSEITCSKLLPVVMTASKDRVPNIKFNVAKVLQSLIPIVDQSVVEKTIRPGLVELSEDPDVDVRFFANQALQSIDNVMMSS

SEQ ID NO: 3605 - protein, 521 aa, Arabidopsis thaliana
MAEELGVFIPYVGGVEYAHVLLPPLETLSTVEETCVREKAVESLCRVGSQMRESDLVDHFISLVKRLAAGEWFTARVSACGVFHIAYPSAPDMLKTELRSLYTQLCQDDMPMVRRAAATNLGKFAATVESAHLKTDVMSMFEDLTQDDQDSVRLLAVEGCAALGKLLEPQDCVQHILPVIVNFSQDKSWRVRYMVANQLYELCEAVGPEPTRTELVPAYVRLLRDNEAEVRIAAAGKVTKFCRILNPEIAIQHILPCVKELSSDSSQHVRSALASVIMGMAPVLGKDATIEHLLPIFLSLLKDEFPDVRLNIISKLDQVNQVIGIDLLSQSLLPAIVELAEDRHWRVRLAIIEYIPLLASQLGVGFFDDKLGALCMQWLQDKVHSIRDAAANNLKRLAEEFGPEWAMQHIVPQVLEMVNNPHYLYRMTILRAVSLLAPVMGSEITCSKLLPVVMTASKDRVPNIKFNVAKVLQSLIPIVDQSVVEKTIRPGLVELSEDPDVDVRFFANQALQSIDNVMMSS

SEQ ID NO: 3606 - DNA, 1289 bp, Arabidopsis thaliana
gagaaacgaaaattaaaaaaaaaagagaagaaaagccaaaagcttcggtcgcgcaagatcgcttcatttgtttctagagtgattcatggattctttaaactactaataatggatttttgttgtgtcttaatgaaataatgggagcagctgaagcaagagcattgtggcaaagaacagctagtcgttgctttgttgttcatgaggatgctaagatggctccgaggttagcttgttgccaacaccaacaatcttcttcgggcaacaccgaaaaaaacagcttttcttccggaagttttggagattcctctgatttctcttgtgataccaaatggtggcttaagggatcaactggttttgatgaggaggttacaaactcctttcttgaagataccaaatgcaagaaattgcatgaatttgtcgacttaatcggaatacgagaagaagaagactacagctttattagcaagaaagctgacgctacaacaccgtggtggagaagcacgacggataaagatgaattagctctcatggtggcgactaaatcggttgatcataatatccagaattgtgatcttcctccacctcaaaaactccacaagagtattcactcctcgagtggagaaaaagggtttaaaacagcggttaaatcgccatggaagcaaggagtttggaaggatcggtttgagagatctttgagttacaatggtagcacagagagcaagaacacgagtccaatgtcttcccctagaagtgatgatctaagcaaaggtcagcttttagaagcactaaggcattctcaaaccagggcaagagaagcagagagagcagcgagagaagcttgcgctgagaaagaccgtgtgataacaatcttgttgaaacaagcgagtcagatgttggcttataagcaatggttaaagcttcttgaaatggaagctctttatctgcagatgaagaaggaagaagaacaagaggaacaggtcaaaggaatgaatctgaagaagagaaaacagagaggggagaagaagaaaaagggtgagactgggagatatatgatggcttttgcattagggtttagtctcattggtgctggtttgctcttaggttggactgttggatggttgcttcccttctagaatcttgaaatgtcttctctttggtcactcatcttttcaagagttttaggttttataacttttcactttacctctaaaattgtgtgtatattttgttaatgtatgtattgtgtgatgtttgtgtaaatttaatcttctgtagaagtttatttggct

SEQ ID NO: 3607 - protein, 331 aa, Arabidopsis thaliana
MGAAEARALWQRTASRCFVVHEDAKMAPRLACCQHQQSSSGNTEKNSFSSGSFGDSSDFSCDTKWWLKGSTGFDEEVTNSFLEDTKCKKLHEFVDLIGIREEEDYSFISKKADATTPWWRSTTDKDELALMVATKSVDHNIQNCDLPPPQKLHKSIHSSSGEKGFKTAVKSPWKQGVWKDRFERSLSYNGSTESKNTSPMSSPRSDDLSKGQLLEALRHSQTRAREAERAAREACAEKDRVITILLKQASQMLAYKQWLKLLEMEALYLQMKKEEEQEEQVKGMNLKKRKQRGEKKKKGETGRYMMAFALGFSLIGAGLLLGWTVGWLLPF

SEQ ID NO: 3608 - protein, 306 aa, Arabidopsis thaliana
MAPRLACCQHQQSSSGNTEKNSFSSGSFGDSSDFSCDTKWWLKGSTGFDEEVTNSFLEDTKCKKLHEFVDLIGIREEEDYSFISKKADATTPWWRSTTDKDELALMVATKSVDHNIQNCDLPPPQKLHKSIHSSSGEKGFKTAVKSPWKQGVWKDRFERSLSYNGSTESKNTSPMSSPRSDDLSKGQLLEALRHSQTRAREAERAAREACAEKDRVITILLKQASQMLAYKQWLKLLEMEALYLQMKKEEEQEEQVKGMNLKKRKQRGEKKKKGETGRYMMAFALGFSLIGAGLLLGWTVGWLLPF

SEQ ID NO: 3609 - protein, 201 aa, Arabidopsis thaliana
MVATKSVDHNIQNCDLPPPQKLHKSIHSSSGEKGFKTAVKSPWKQGVWKDRFERSLSYNGSTESKNTSPMSSPRSDDLSKGQLLEALRHSQTRAREAERAAREACAEKDRVITILLKQASQMLAYKQWLKLLEMEALYLQMKKEEEQEEQVKGMNLKKRKQRGEKKKKGETGRYMMAFALGFSLIGAGLLLGWTVGWLLPF

SEQ ID NO: 3610 - DNA, 1234 bp, Arabidopsis thaliana
  misc_feature (1155)..(1155): n is a, c, g, or t
attaattcgtcttgtgcaaaaaaagacacttcttaagcttcaacaagaaagaaatagtattcgcatagtatcagaagatggattttttcaatcaagctaaagccgtaaggatgcgtaacgtccatgataagtatctaacagcggatgaggacgaggaaacggtgactcaagacaggaatggttccgacaagagagctagatggattgtcgagccggttcgtggttcctttgaagtgatccgtttaaggagctgctacggtaactatctcaccgcttcgaatgagcggttcttgctcggagccactggacgtaaagtggtcttgtctaaaccggctcgactcgactcctccgtagagtgggaaccggtgagagaaggttccaaaatgaagctcaagactagatacggaaacttgcttcgagccaacggtggacttcctccatggcgtaactctgtcacgcatgacacttctcatgtattggattctttcttgtgggatgttgatgtggttgagattttggtgggaacgacgactccggctccagctccagctccggtgacaactcctccgccacataggaggccgtcgtacacgtattctccggtttctagaacatcttcagaaaaatccgaagaagagttgaccgtgccgccaccgaaatctgaagggaggcctatttactaccacatcgcggacgaagaaggacacgtggaggaagaatcagccgttggatatgcgttgactttcaaaggaaatagcgtggaacagttgacgcaggcgttgcaagaagagactagtatggatgatgttgtggtctgtacacgccatccttcaaacggcaagctgtttcctcttcgtttgcaacttccacctaatagtggaacaatgcatgtcattctagtaccctcaagtacttaacggcaagctgtgtggttcccctttatttcgaatgtattatataagtagactagtagttgaagtattaggctcaagattgagagtttggtccttgcctagttgcctccattagatacgagtgtggaattaatcatagaaagttcagatagactattattgtggatttgatttaatctttcattttattgtacataagcttattttgtaaacgaagcatttaagtttcgtcctcccattntttatgtgaattcgccataaaaaattgtttgtactataaaagttttttttttttttttttaaatattaaagtgtaaccc

SEQ ID NO: 3611 - protein, 279 aa, Arabidopsis thaliana
MDFFNQAKAVRMRNVHDKYLTADEDEETVTQDRNGSDKRARWIVEPVRGSFEVIRLRSCYGNYLTASNERFLLGATGRKVVLSKPARLDSSVEWEPVREGSKMKLKTRYGNLLRANGGLPPWRNSVTHDTSHVLDSFLWDVDVVEILVGTTTPAPAPAPVTTPPPHRRPSYTYSPVSRTSSEKSEEELTVPPPKSEGRPIYYHIADEEGHVEEESAVGYALTFKGNSVEQLTQALQEETSMDDVVVCTRHPSNGKLFPLRLQLPPNSGTMHVILVPSST

SEQ ID NO: 3612 - protein, 268 aa, Arabidopsis thaliana
MRNVHDKYLTADEDEETVTQDRNGSDKRARWIVEPVRGSFEVIRLRSCYGNYLTASNERFLLGATGRKVVLSKPARLDSSVEWEPVREGSKMKLKTRYGNLLRANGGLPPWRNSVTHDTSHVLDSFLWDVDVVEILVGTTTPAPAPAPVTTPPPHRRPSYTYSPVSRTSSEKSEEELTVPPPKSEGRPIYYHIADEEGHVEEESAVGYALTFKGNSVEQLTQALQEETSMDDVVVCTRHPSNGKLFPLRLQLPPNSGTMHVILVPSST

SEQ ID NO: 3613 - protein, 177 aa, Arabidopsis thaliana
MKLKTRYGNLLRANGGLPPWRNSVTHDTSHVLDSFLWDVDVVEILVGTTTPAPAPAPVTTPPPHRRPSYTYSPVSRTSSEKSEEELTVPPPKSEGRPIYYHIADEEGHVEEESAVGYALTFKGNSVEQLTQALQEETSMDDVVVCTRHPSNGKLFPLRLQLPPNSGTMHVILVPSST

SEQ ID NO: 3614 - DNA, 1273 bp, Arabidopsis thaliana
ctttggatttggaatcgcttctacttcactctcaccttcctcctattctctctctctttctatgtcaagttagcttagccgtctcaccagaaagctaaccttacctcacaaacattgattgtgttacactaatctcttaaatagagagccgtaatttctacacactctgatcgctagatggaaacggagatatcaggaatggataatccagctatgaccttggacgaggtttccatggaacgcaacaagagcttcgttaaggcattgcaggagctcaagaacttgaggcctcaactttattcagctgctgattactgtgaaaagtcttatcttcatagcgagcaaaagcaaatggtattggacaatttgaaagactacactgtgaaggctctagttaatgctgttgatcaccttggaactgtagcttccaagcttactgatctttttgatcaccaaaattcagacatatcaactatggaaatgagagcttcttgtgttagccagcaactgcttacatgccggacatatatcgacaaagaaggtcttagacagcaacagctattagcagttatcccattgcatcacaagcattacattcttcccaattctgttaacaagcgggtacactttagtcctctcagacgaactgacacaagacagaatcattaccaagctatatcccgtcttcaaccttcagatgcccctgcatcgaaatcactctcctggcatttaggctcagagaccaagtctaccctcaaaggaacatccacagttgcaccaagctccaaagattcaaaagctttctcaaagacatctggagtgttccatctcttaggtgatgatgaaaacatagcaaacaagaagcctttggctggttctcaggtctcaggtgttcctgctgcatccactgcccataaggatttggaggttccgaaacttctaactgcacacaggtcacttgataacaacccgcgacgagagatcattcaagctcctgtccggacaaagagtgttctttctgcgttctttgttaaacagaaaactccaaagctcaaagctggctatgtctcgtgaaaacaccaactctttgtactgagaaggaaatttcaatctcataccacgtttcttttaccttatataataacatgttgattttcatgtaattatcttaatcaccacatcaacgtacgaagtccagtaagacatgattttggtctatcattaacaaaactgtgtaatagattaagaatgtgtttttagaatgtaaaagctt

SEQ ID NO: 3615 - protein, 298 aa, Arabidopsis thaliana
METEISGMDNPAMTLDEVSMERNKSFVKALQELKNLRPQLYSAADYCEKSYLHSEQKQMVLDNLKDYTVKALVNAVDHLGTVASKLTDLFDHQNSDISTMEMRASCVSQQLLTCRTYIDKEGLRQQQLLAVIPLHHKHYILPNSVNKRVHFSPLRRTDTRQNHYQAISRLQPSDAPASKSLSWHLGSETKSTLKGTSTVAPSSKDSKAFSKTSGVFHLLGDDENIANKKPLAGSQVSGVPAASTAHKDLEVPKLLTAHRSLDNNPRREIIQAPVRTKSVLSAFFVKQKTPKLKAGYVS

SEQ ID NO: 3616 - protein, 291 aa, Arabidopsis thaliana
MDNPAMTLDEVSMERNKSFVKALQELKNLRPQLYSAADYCEKSYLHSEQKQMVLDNLKDYTVKALVNAVDHLGTVASKLTDLFDHQNSDISTMEMRASCVSQQLLTCRTYIDKEGLRQQQLLAVIPLHHKHYILPNSVNKRVHFSPLRRTDTRQNHYQAISRLQPSDAPASKSLSWHLGSETKSTLKGTSTVAPSSKDSKAFSKTSGVFHLLGDDENIANKKPLAGSQVSGVPAASTAHKDLEVPKLLTAHRSLDNNPRREIIQAPVRTKSVLSAFFVKQKTPKLKAGYVS

SEQ ID NO: 3617 - protein, 286 aa, Arabidopsis thaliana
MTLDEVSMERNKSFVKALQELKNLRPQLYSAADYCEKSYLHSEQKQMVLDNLKDYTVKALVNAVDHLGTVASKLTDLFDHQNSDISTMEMRASCVSQQLLTCRTYIDKEGLRQQQLLAVIPLHHKHYILPNSVNKRVHFSPLRRTDTRQNHYQAISRLQPSDAPASKSLSWHLGSETKSTLKGTSTVAPSSKDSKAFSKTSGVFHLLGDDENIANKKPLAGSQVSGVPAASTAHKDLEVPKLLTAHRSLDNNPRREIIQAPVRTKSVLSAFFVKQKTPKLKAGYVS

SEQ ID NO: 3618 - DNA, 1224 bp, Arabidopsis thaliana
attgaatcggaaaaaaatggcgaacatctgcatagcgacgacggcaactaacaatcaggtgattctccgtgactacgtgagtggattccctaaacaatccgacctctacattgccacaaccaccattgacttacgtgtacctcccggatccatggcggttctagtcaagaatctctacttatcttgcgatcctcatagccgcactcgcatggggaagcctgatccctcatcccaggcttccatggctcatgctttcactatcggcaagccaatctctgggtttggagtggctaaagcaatagattcagggcacccaaattacaaaacaggagatttactttggggaagagttggttgggaagagtatagtgttattactccaactccttcttcacatttcaagattcatcacaccgatgttccattatctttctacactggacttcttggtattccgggtctcactgcgtatgttgggttttacgagatatgttctccgaagaaaggagagactgtatttgtatcagctgcatctggcgcagtaggtcaacttgtgggacagtttgcgaagatggcgggatgctatgtcgttggaagcgctagcagtaaagagaaggttgatcttctcaagactaagtttgggtatgatgacgctttcaattataaggaagaaaaggatcttagtgctgccctaaagaggtgtttcccagaaggaatagacatatactttgagaacgtgggaggcaaaatgttagacgcagtgctccaaaacatgaggacacatggccgaatcgcagcgtgtggaatgatttcacaatacaatctaaaggaaccagaaggtttacataacacagccaccattgtccacaaacgcatccgtgttcaagattttgcagctgtcgaattttttgatagatactccaagtttttggacttcatacttccacacgtaagagaagggaagataacatatgttgaggatatagcccaaggacttgagaatggaccttctgctttgatcggactcttccacggtaagaacgtcgggaaacaacttgtcgaagttgctcgcgagtgagattaaaattaacaaatgttttattaccgtttggttttagttgttgctggaaataagatcggtttgtacaagctgtgacaatgttttgtttgttggtcagaaataaatggactttgtttgtctatataagcattgtttctgacatg

SEQ ID NO: 3619 - protein, 358 aa, Arabidopsis thaliana
LNRKKMANICIATTATNNQVILRDYVSGFPKQSDLYIATTTIDLRVPPGSMAVLVKNLYLSCDPHSRTRMGKPDPSSQASMAHAFTIGKPISGFGVAKAIDSGHPNYKTGDLLWGRVGWEEYSVITPTPSSHFKIHHTDVPLSFYTGLLGIPGLTAYVGFYEICSPKKGETVFVSAASGAVGQLVGQFAKMAGCYVVGSASSKEKVDLLKTKFGYDDAFNYKEEKDLSAALKRCFPEGIDIYFENVGGKMLDAVLQNMRTHGRIAACGMISQYNLKEPEGLHNTATIVHKRIRVQDFAAVEFFDRYSKFLDFILPHVREGKITYVEDIAQGLENGPSALIGLFHGKNVGKQLVEVARE

SEQ ID NO: 3620 - protein, 353 aa, Arabidopsis thaliana
MANICIATTATNNQVILRDYVSGFPKQSDLYIATTTIDLRVPPGSMAVLVKNLYLSCDPHSRTRMGKPDPSSQASMAHAFTIGKPISGFGVAKAIDSGHPNYKTGDLLWGRVGWEEYSVITPTPSSHFKIHHTDVPLSFYTGLLGIPGLTAYVGFYEICSPKKGETVFVSAASGAVGQLVGQFAKMAGCYVVGSASSKEKVDLLKTKFGYDDAFNYKEEKDLSAALKRCFPEGIDIYFENVGGKMLDAVLQNMRTHGRIAACGMISQYNLKEPEGLHNTATIVHKRIRVQDFAAVEFFDRYSKFLDFILPHVREGKITYVEDIAQGLENGPSALIGLFHGKNVGKQLVEVARE

SEQ ID NO: 3621 - protein, 308 aa, Arabidopsis thaliana
MAVLVKNLYLSCDPHSRTRMGKPDPSSQASMAHAFTIGKPISGFGVAKAIDSGHPNYKTGDLLWGRVGWEEYSVITPTPSSHFKIHHTDVPLSFYTGLLGIPGLTAYVGFYEICSPKKGETVFVSAASGAVGQLVGQFAKMAGCYVVGSASSKEKVDLLKTKFGYDDAFNYKEEKDLSAALKRCFPEGIDIYFENVGGKMLDAVLQNMRTHGRIAACGMISQYNLKEPEGLHNTATIVHKRIRVQDFAAVEFFDRYSKFLDFILPHVREGKITYVEDIAQGLENGPSALIGLFHGKNVGKQLVEVARE

SEQ ID NO: 3622 - DNA, 533 bp, Arabidopsis thaliana
ctacgtagaactacatcagatatctatagaaacaaacttatccatggcaataatggcatcgttcaagtctttcgcagccgttctcagtgtcctttttcttgccatgactgctatagaaacggtagttcaagcccaagaatgtggcaacgatctagcaaatgtgcaggtatgcgccgccatggtgctgcccggttcaggcagaccaaattcagagtgttgcgccgcacttcaatctactaatagagattgtctatgcaacgctctccgtgcagccacctctcttccttcgctttgtaaccttcctcctgtggattgtggtataaatgcttagttaagctacgagtcaattccaagatgatcaaggaaaacgggaaaataaagaataatgagaaatattccagtcttatgttttttcttctaacttctgctttactataataaagttctagtagttttgcttagaaatttagatactactagtataataaaaagctttgataattatgagaataaaacattcccggtctgaaacc

SEQ ID NO: 3623 - protein, 109 aa, Arabidopsis thaliana
YVELHQISIETNLSMAIMASFKSFAAVLSVLFLAMTAIETVVQAQECGNDLANVQVCAAMVLPGSGRPNSECCAALQSTNRDCLCNALRAATSLPSLCNLPPVDCGINA

SEQ ID NO: 3624 - protein, 95 aa, Arabidopsis thaliana
MAIMASFKSFAAVLSVLFLAMTAIETVVQAQECGNDLANVQVCAAMVLPGSGRPNSECCAALQSTNRDCLCNALRAATSLPSLCNLPPVDCGINA

SEQ ID NO: 3625 - protein, 92 aa, Arabidopsis thaliana
MASFKSFAAVLSVLFLAMTAIETVVQAQECGNDLANVQVCAAMVLPGSGRPNSECCAALQSTNRDCLCNALRAATSLPSLCNLPPVDCGINA

SEQ ID NO: 3626 - DNA, 976 bp, Arabidopsis thaliana
atttttctcttttccctctccttctttcttcctttataaatccatttattctcctctcatctctcagcaaaatcaaatcctcatagttgattctctctatctctctcacgagtcacgatcctactcttcttgatatggctgaggttttgcgtcccgagatgttagatatctctaacgacacttcttcattagcatcaccgaaacttcttcatgttcttgctgttgatgatagtatggttgatcggaagttcatcgagcggttactcagagtctcatcttgtaaagttactgttgtcgatagtgcgacaagagctttacaatatcttggattagatggagagaataatagttcggttggatttgaggatctgaagattaatttgataatgacggattactctatgcctgggatgactggatatgaactactgaagaagatcaaagaatcatcagctttcagagaaataccagttgtgattatgtcttcagagaacatcttgcctcgtatcgatagatgtcttgaagaaggagctgaagatttcttattgaagcctgtgaaattagctgatgtgaagagattaagagattctttaatgaaagctgaggaaagagcttttaagaatattatgcacaagagagagcttgaagctaatgatatctactcgcagctaaaacgcgcaaagatctgagtttatcagattccacgtacgatatgttctttaaaagctcaaagattcacacacatgcatgtcctgattctttcggcttacaatttttgagacattacggcttcttttgctgatagaaccaagactgatcaagagtgacaaagatgggtttttataagatagaaatgtaaattgtagacttggattcattagagaggagaagagatacattttttttttctttacatgagagatatgtaaaatggtggtgtgttattttggaagttaacatatgaatttcttttgtt

SEQ ID NO: 3627 - protein, 184 aa, Arabidopsis thaliana
MAEVLRPEMLDISNDTSSLASPKLLHVLAVDDSMVDRKFIERLLRVSSCKVTVVDSATRALQYLGLDGENNSSVGFEDLKINLIMTDYSMPGMTGYELLKKIKESSAFREIPVVIMSSENILPRIDRCLEEGAEDFLLKPVKLADVKRLRDSLMKAEERAFKNIMHKRELEANDIYSQLKRAKI

SEQ ID NO: 3628 - protein, 176 aa, Arabidopsis thaliana
MLDISNDTSSLASPKLLHVLAVDDSMVDRKFIERLLRVSSCKVTVVDSATRALQYLGLDGENNSSVGFEDLKINLIMTDYSMPGMTGYELLKKIKESSAFREIPVVIMSSENILPRIDRCLEEGAEDFLLKPVKLADVKRLRDSLMKAEERAFKNIMHKRELEANDIYSQLKRAKI

SEQ ID NO: 3629 - protein, 151 aa, Arabidopsis thaliana
MVDRKFIERLLRVSSCKVTVVDSATRALQYLGLDGENNSSVGFEDLKINLIMTDYSMPGMTGYELLKKIKESSAFREIPVVIMSSENILPRIDRCLEEGAEDFLLKPVKLADVKRLRDSLMKAEERAFKNIMHKRELEANDIYSQLKRAKI

SEQ ID NO: 3630 - DNA, 1156 bp, Arabidopsis thaliana
cacaagaatatttctctctctcactctctcaacacaatcttattaaaggcctaggttaaggggacacaacataaactaaaattttcttataattatttttcactatttatcgattttatccatagagaagtagctataaagagaagaaggtggagaaaggaaagatcataaagtatcgatgatgagaaacgtagggagttcgagctctggcagcaaaggcatagcggccgtagtcggcgttggtccaaagctcggtcgctccatcgctcggaagtttgctcacgaaggctacaccgtcgccatcctcgctcgtgatcttggtaggttatctagagtagcagaagagatagcaagagaagagaaagcacaagtgtttgctataagaattgattgtgcagatccaagaagtgtaagagaagccttcgaaggagtattgtcgttagggttcgtggaggttttagtgtacaatgcttatcattcttcttacgcaagtcaccatcccacttctttcacccacattccttttcaatctttccaaacatctatctctgtctctgtcttcgctgcatttctttgcgctcaacaggttactcccgggatgatggagaaaggaaaaggaactatactcttcaccggttgctcggcgtctttgaatggcattgctggtttctccgaactatgctgtgggaaatttgcgttgagggcactgtctcaatgcttagcaaaagaatatcaagcttttggaatacatgtggctcatgttatcatcgacggtgtggttggacctccaagagaaacaaacatccctccccgaggaatggtcgcagagcaatcattcaacgtaggaggcgaagatggagaaggagaaggagaaagctcgggagtgatgggaatggatcctgatgtattggctcaaacttattggtatctccatgttcaagaccggagagcttggacacatgaactcgatatccgaccatcaaacccaaatttctagctagtacttaaaaaaaaatacaagttgattggtttatgattttattcaatgctattttagccaaatgtgtatgtatgtgtattcttgtgtttgtaatgtaattaagtatttaaaagggttggtttatgattggcgtgaataagctatcaatctcttatc

SEQ ID NO: 3631 - protein, 272 aa, Arabidopsis thaliana
MMRNVGSSSSGSKGIAAVVGVGPKLGRSIARKFAHEGYTVAILARDLGRLSRVAEEIAREEKAQVFAIRIDCADPRSVREAFEGVLSLGFVEVLVYNAYHSSYASHHPTSFTHIPFQSFQTSISVSVFAAFLCAQQVTPGMMEKGKGTILFTGCSASLNGIAGFSELCCGKFALRALSQCLAKEYQAFGIHVAHVIIDGVVGPPRETNIPPRGMVAEQSFNVGGEDGEGEGESSGVMGMDPDVLAQTYWYLHVQDRRAWTHELDIRPSNPNF

SEQ ID NO: 3632 - protein, 271 aa, Arabidopsis thaliana
MRNVGSSSSGSKGIAAVVGVGPKLGRSIARKFAHEGYTVAILARDLGRLSRVAEEIAREEKAQVFAIRIDCADPRSVREAFEGVLSLGFVEVLVYNAYHSSYASHHPTSFTHIPFQSFQTSISVSVFAAFLCAQQVTPGMMEKGKGTILFTGCSASLNGIAGFSELCCGKFALRALSQCLAKEYQAFGIHVAHVIIDGVVGPPRETNIPPRGMVAEQSFNVGGEDGEGEGESSGVMGMDPDVLAQTYWYLHVQDRRAWTHELDIRPSNPNF

SEQ ID NO: 3633 - DNA, 1151 bp, Arabidopsis thaliana
tgaccatcatcatcatcatcatcatcatcatttctctctatctctttctaaaacacaaccatgactgtttcttcatctccatgggctctcatggctctctttctaatggtttcttcaacaatggtaatggctattcctccacgcaaggccattgatgtaccatttggtcgtaactacgtcccaacttgggcttttgaccaccagaaacagttcaatggcggttccgaacttcagcttatcctcgacaaatacactggcacaggatttcaatcaaaggggtcatatttgtttggacattttagtatgcacataaagcttccagctggtgacacagccggagttgtcacagctttctatctatcatctaccaacaatgagcatgacgagatagactttgagttccttggaaacagaacaggacaaccagctatattacagacaaatgtattcacaggaggaaagggaaacagagaacaacgaatctatctctggtttgatccttctaaggcttatcacacttactcaatcctttggaacatgtaccagatcgtattctttgttgacaacataccaatccgaacgttcaagaatgctaaggatctaggagtacgtttcccattcaaccaaccaatgaagctttactcaagcctttggaacgcggatgattgggccacgagaggcggtttagagaagaccaattgggccaatgcacctttcgttgcatcttacaaaggattccacatagatggttgccaagcttctgtggaagccaagtactgtgccacacaaggccgcatgtggtgggatcagaaagagttccgtgaccttgacgctgaacaatggcgtcgtctcaaatgggttcgtatgaagtggaccatctacaactactgtaccgaccggactaggttcccggttatgccagctgaatgtaaaagggacagagacgcataagttactactcttgagggttttaatgaatttatgctatcattattatttgaattatgcttgttcaagagattgatatatgtattgtttgttggcccatgatgtttatgctatatttgggcctaaaattacatgttataattcatatatgtattgattagctatgtattttcatatgttatgatctacttacaagttttatt

SEQ ID NO: 3634 - protein, 296 aa, Arabidopsis thaliana
MTVSSSPWALMALFLMVSSTMVMAIPPRKAIDVPFGRNYVPTWAFDHQKQFNGGSELQLILDKYTGTGFQSKGSYLFGHFSMHIKLPAGDTAGVVTAFYLSSTNNEHDEIDFEFLGNRTGQPAILQTNVFTGGKGNREQRIYLWFDPSKAYHTYSILWNMYQIVFFVDNIPIRTFKNAKDLGVRFPFNQPMKLYSSLWNADDWATRGGLEKTNWANAPFVASYKGFHIDGCQASVEAKYCATQGRMWWDQKEFRDLDAEQWRRLKWVRMKWTIYNYCTDRTRFPVMPAECKRDRDA

SEQ ID NO: 3635 - protein, 286 aa, Arabidopsis thaliana
MALFLMVSSTMVMAIPPRKAIDVPFGRNYVPTWAFDHQKQFNGGSELQLILDKYTGTGFQSKGSYLFGHFSMHIKLPAGDTAGVVTAFYLSSTNNEHDEIDFEFLGNRTGQPAILQTNVFTGGKGNREQRIYLWFDPSKAYHTYSILWNMYQIVFFVDNIPIRTFKNAKDLGVRFPFNQPMKLYSSLWNADDWATRGGLEKTNWANAPFVASYKGFHIDGCQASVEAKYCATQGRMWWDQKEFRDLDAEQWRRLKWVRMKWTIYNYCTDRTRFPVMPAECKRDRDA

SEQ ID NO: 3636 - protein, 281 aa, Arabidopsis thaliana
MVSSTMVMAIPPRKAIDVPFGRNYVPTWAFDHQKQFNGGSELQLILDKYTGTGFQSKGSYLFGHFSMHIKLPAGDTAGVVTAFYLSSTNNEHDEIDFEFLGNRTGQPAILQTNVFTGGKGNREQRIYLWFDPSKAYHTYSILWNMYQIVFFVDNIPIRTFKNAKDLGVRFPFNQPMKLYSSLWNADDWATRGGLEKTNWANAPFVASYKGFHIDGCQASVEAKYCATQGRMWWDQKEFRDLDAEQWRRLKWVRMKWTIYNYCTDRTRFPVMPAECKRDRDA

SEQ ID NO: 3637 - DNA, 1050 bp, Arabidopsis thaliana
atcctcaatcgacgcagatagttccaccaattagggttttcgtccgccagaatttccagagacgtatcttgaatctagacatgggatctcatgagcaatcgcctgagaataacggttcgagcactgtatcgaagaaagttgctgatatttggcaacgaatgaacgaaggagttccaaataaacgtgtcaatttcgtctcaaccgctttgcccgctaaaaactcagctaatagcaattggaaaagttatctcggtgtgaatgtgaagaagaaggatacttgtgtttctgatgtacagaagagtgttttgaatcatagctgtagtgaggaggctaagagtattgctgcagccgctttagctgcggtgcgaaacgcaactgtaacggctgcagctgcatcgagccggggcaagattgagataaccgaggtcaaagattttgcgggtcaagaaatcgaagtaaagcggttagttgaagcggattcaaaggaagcattggagaggggaaacaaaggctcctcttcctcctcagcagcgccttcagcggttgatgcggttcttgagcagataaaaaagaaacaaaagctgagtgttttggacaagacgaagaaagattggggagagtataaggaagaacacaaaggtgttgaagacgagctagataagtacaagaaaagctcggatcagtatctcgacaaagttggtttcttggagagagctgattacagacagtttgagaaagagagagacgctcgtttagctcttcagtccaagagaagacacgatgatgtatgaaatgaaatgtgaccgacccttttaacatgtatgaaatcattttctcaagccattttggtcacattctttccatagtctaaaccgagttcccgttgcatgattgattctgattttttatgtctcgttcataagaattgagaacatcctctcttgtaggccatggacaatgaaatgggcttgtaatgcaaatgaaatcccaacttctgaagcccatgtttttatttcaacccaattatgaaacgaaacatcatttcatttg

SEQ ID NO: 3638 - protein, 262 aa, Arabidopsis thaliana
PQSTQIVPPIRVFVRQNFQRRILNLDMGSHEQSPENNGSSTVSKKVADIWQRMNEGVPNKRVNFVSTALPAKNSANSNWKSYLGVNVKKKDTCVSDVQKSVLNHSCSEEAKSIAAAALAAVRNATVTAAAASSRGKIEITEVKDFAGQEIEVKRLVEADSKEALERGNKGSSSSSAAPSAVDAVLEQIKKKQKLSVLDKTKKDWGEYKEEHKGVEDELDKYKKSSDQYLDKVGFLERADYRQFEKERDARLALQSKRRHDDV

SEQ ID NO: 3639 - protein, 236 aa, Arabidopsis thaliana
MGSHEQSPENNGSSTVSKKVADIWQRMNEGVPNKRVNFVSTALPAKNSANSNWKSYLGVNVKKKDTCVSDVQKSVLNHSCSEEAKSIAAAALAAVRNATVTAAAASSRGKIEITEVKDFAGQEIEVKRLVEADSKEALERGNKGSSSSSAAPSAVDAVLEQIKKKQKLSVLDKTKKDWGEYKEEHKGVEDELDKYKKSSDQYLDKVGFLERADYRQFEKERDARLALQSKRRHDDV

SEQ ID NO: 3640 - protein, 210 aa, Arabidopsis thaliana
MNEGVPNKRVNFVSTALPAKNSANSNWKSYLGVNVKKKDTCVSDVQKSVLNHSCSEEAKSIAAAALAAVRNATVTAAAASSRGKIEITEVKDFAGQEIEVKRLVEADSKEALERGNKGSSSSSAAPSAVDAVLEQIKKKQKLSVLDKTKKDWGEYKEEHKGVEDELDKYKKSSDQYLDKVGFLERADYRQFEKERDARLALQSKRRHDDV

SEQ ID NO: 3641 - DNA, 1612 bp, Arabidopsis thaliana
cgctacttctctctctatatataaactccttaccactctctttttctgattttttgacgttaagagatagaaacagagagagatagagagatagagttatggctttggcgatgatgatccgaaacgcagcttcgaagcgaggaatgactccgatctccggtcatttcggtggtttgagatctatgtcttcatggtggaagagcgttgagcctgctcctaaagatccgatcctcggagttaccgaagcttttctcgctgatcctagtcctgaaaaagttaatgttggtgtgggagcatatcgtgatgataatgggaagcctgttgtcttggaatgtgtcagagaagctgagaaaaggcttgctgggagcactttcatggagtaccttcctatgggaggaagtgccaaaatggtggacctaacattgaagcttgcctatggggacaatagtgaatttatcaaagataaaagaattgctgcagttcagactctgtctggcactggagcctgccggctctttgcagacttccagaaacgtttttctcctggttcacagatctacattcctgttccaacctggtccaaccaccacaacatctggaaagatgcacaagtccctcaaaagacatatcattactatcatccagaaaccaagggcttggatttctcagcattgatggatgatgtgaagaatgctccggaagggtcattcttccttcttcatgcttgtgctcataatcctactggagtagaccctacagaggaacaatggagagagatatcacagctattcaaggctaaaaagcatttcgcattcttcgatatggcttaccaaggttttgctagtggagatccagcgagagatgccaagtccatcaggatctttcttgaagatggtcatcatattggaatttctcagtcctatgcaaaaaacatgggactctacggccagagggtgggatgtctcagtgtgctttgtgaagatccgaagcaagccgtggctgtgaaaagtcaattgcagcagctagctagaccaatgtacagcaacccacctttgcatggtgctcagctggtctcaaccattcttgaagacccagagttaaagagtctgtggctaaaagaagttaaggtcatggctgataggatcatcggcatgagaactactttgcgagaaagccttgagaagttaggatcgcctttgtcatgggagcacgttaccaaacagattggaatgttctgctacagtgggttaacaccagaacaggttgaccgcttaacaagcgaatatcacatctatatgacccgtaacggccgtatcagtatggctggtgttacaacaggaaacgtgggataccttgcgaatgctatacatgaagtcaccaagtcatcttaaatcatttacttacatgtttcagccaaacatacaaattttgtttgaagagtcaataagacaggaggctagatttgtacttctgcaattggttttgtgggaactgaaagtttacccataaacagtaatttattagcgcattttttcgttagctgggcaataaaagcaaagcctaaacgatggatttttggatatacaaaattcggattgttttctttcttctc

SEQ ID NO: 3642 - protein, 430 aa, Arabidopsis thaliana
MALAMMIRNAASKRGMTPISGHFGGLRSMSSWWKSVEPAPKDPILGVTEAFLADPSPEKVNVGVGAYRDDNGKPVVLECVREAEKRLAGSTFMEYLPMGGSAKMVDLTLKLAYGDNSEFIKDKRIAAVQTLSGTGACRLFADFQKRFSPGSQIYIPVPTWSNHHNIWKDAQVPQKTYHYYHPETKGLDFSALMDDVKNAPEGSFFLLHACAHNPTGVDPTEEQWREISQLFKAKKHFAFFDMAYQGFASGDPARDAKSIRIFLEDGHHIGISQSYAKNMGLYGQRVGCLSVLCEDPKQAVAVKSQLQQLARPMYSNPPLHGAQLVSTILEDPELKSLWLKEVKVMADRIIGMRTTLRESLEKLGSPLSWEHVTKQIGMFCYSGLTPEQVDRLTSEYHIYMTRNGRISMAGVTTGNVGYLANAIHEVTKSS

SEQ ID NO: 3643 - protein, 426 aa, Arabidopsis thaliana
MMIRNAASKRGMTPISGHFGGLRSMSSWWKSVEPAPKDPILGVTEAFLADPSPEKVNVGVGAYRDDNGKPVVLECVREAEKRLAGSTFMEYLPMGGSAKMVDLTLKLAYGDNSEFIKDKRIAAVQTLSGTGACRLFADFQKRFSPGSQIYIPVPTWSNHHNIWKDAQVPQKTYHYYHPETKGLDFSALMDDVKNAPEGSFFLLHACAHNPTGVDPTEEQWREISQLFKAKKHFAFFDMAYQGFASGDPARDAKSIRIFLEDGHHIGISQSYAKNMGLYGQRVGCLSVLCEDPKQAVAVKSQLQQLARPMYSNPPLHGAQLVSTILEDPELKSLWLKEVKVMADRIIGMRTTLRESLEKLGSPLSWEHVTKQIGMFCYSGLTPEQVDRLTSEYHIYMTRNGRISMAGVTTGNVGYLANAIHEVTKSS

SEQ ID NO: 3644 - protein, 425 aa, Arabidopsis thaliana
MIRNAASKRGMTPISGHFGGLRSMSSWWKSVEPAPKDPILGVTEAFLADPSPEKVNVGVGAYRDDNGKPVVLECVREAEKRLAGSTFMEYLPMGGSAKMVDLTLKLAYGDNSEFIKDKRIAAVQTLSGTGACRLFADFQKRFSPGSQIYIPVPTWSNHHNIWKDAQVPQKTYHYYHPETKGLDFSALMDDVKNAPEGSFFLLHACAHNPTGVDPTEEQWREISQLFKAKKHFAFFDMAYQGFASGDPARDAKSIRIFLEDGHHIGISQSYAKNMGLYGQRVGCLSVLCEDPKQAVAVKSQLQQLARPMYSNPPLHGAQLVSTILEDPELKSLWLKEVKVMADRIIGMRTTLRESLEKLGSPLSWEHVTKQIGMFCYSGLTPEQVDRLTSEYHIYMTRNGRISMAGVTTGNVGYLANAIHEVTKSS

SEQ ID NO: 3645 - DNA, 2076 bp, Arabidopsis thaliana
atgcgcttcctcttccccacgcgcctcatcaacaactcatctctcggtctcctccgatctccacacaccaccgcgccgatccgttctctctggtttcgcaccaagtctccggtcttccgatcggcgactactccaataatgacggcggtcgctttctcttcatcgttgtcgattccccctacctcggaagaagcacttccagggaagctatggatcaagtttaacagagagtgtctcttctctatctatagccccttcgccgtctgtttagccgccggaaatctcaagatcgacacatttcgtcagtatattgcacaggatgttcatttccttaaggcctttgctcacgcgtatgaactggccgcagattgtgctgatgacgatgatgataaattggcaatttctgatttgaggaaaagcgtgatggaagaattgaaaatgcacgactcatttgtacaggattgggatttagacatcaacaaagaagtaagtgttaactcagcaactttgagatacactgagttcttgttagctacagcatccggaaaagtagaaggatgcaaagctcccggcatgcttgatactccatttgaaaaaacaaaagttgctgcctacacgcttggtgctgtgacaccttgcatgcggttgtatgcctttctcggtaaggagtttggatcacttcttgatctgagtgatgtgaaccatccctacaagaaatggatcgataattattctagtgatgctttccaggctatgaaacttgaagtagagttcttccatgcccagccacttgcccagcctaccatagttccactgctcaagaaccactcaaaagatgatctggtgatcttttctgattttgatctgacttgcaccgttgtggattcttctgctattttagcggaaatagcaattgtaactgccccaaaagatgaacaaagtcgatctggacaacaaattcatcggatgctctcatctgaccttaagaacacctggaatctactttctaaacaatacacagagcattatgaagaatgcatagagagtattctgaataaaaagaaagcggacaagtttgactatgaaggtttatgtaaagcactagagcagctttcagattttgagaaagaggcaaataatcgagtgattgagtctggtgtactcaaaggcctgaatcttgaagacattaagcgcgctggggaaaggttaatccttcaagatggatgcatcaatgtcttccagaaaattttaaagactgagaatctgaatgcagaacttcatgtgctttcctattgttggtgtggtgacctcatcagggcagccttttctgcaggcggagtagatgcagtggaagtacatgcaaatgaattcacatttgaggaatccatctcgactggtgagatcgaaagaaaggtggaatccccaattaacaaagctcaacagttcaaaagtatcctacaaaacagaaagaatgagaacaataagaaaagtttcttgagtgtgtatattggagattcggtaggtgacttgctgtgtctcctcgaagcagatataggaatagtggttagctctagctcgagtctcaggagagttggaagccattttggggtctcatttgtgcctttgttttctggaatcgtccagaaacagaaacaacacactgaagaatcatcatcatcagcatggaaaggactctctggcacactttacacagtttcaagctgggccgaaattcattcattcgctcttggatgggagtaaatcggtagaccaatatatgaagagattggtgtatatactgccgagtggccatttttatcaagagccacacaaatttcagtaagtgtgagtaccaatggcgatgatgacctttggttcgtctcgtctagcatttcattttaatgagcttctgttgctgctcttttgcgatgatctcatgatgtggctttcgacagaaaattgtaacgccgagatgtcactttatacttggattcaacatctgtgaagagcctcttatacataagcatgtgtttctatggacatggcttaaaagttgggatattgatatttgctttc

SEQ ID NO: 3646 - protein, 586 aa, Arabidopsis thaliana
MRFLFPTRLINNSSLGLLRSPHTTAPIRSLWFRTKSPVFRSATTPIMTAVAFSSSLSIPPTSEEALPGKLWIKFNRECLFSIYSPFAVCLAAGNLKIDTFRQYIAQDVHFLKAFAHAYELAADCADDDDDKLAISDLRKSVMEELKMHDSFVQDWDLDINKEVSVNSATLRYTEFLLATASGKVEGCKAPGMLDTPFEKTKVAAYTLGAVTPCMRLYAFLGKEFGSLLDLSDVNHPYKKWIDNYSSDAFQAMKLEVEFFHAQPLAQPTIVPLLKNHSKDDLVIFSDFDLTCTVVDSSAILAEIAIVTAPKDEQSRSGQQIHRMLSSDLKNTWNLLSKQYTEHYEECIESILNKKKADKFDYEGLCKALEQLSDFEKEANNRVIESGVLKGLNLEDIKRAGERLILQDGCINVFQKILKTENLNAELHVLSYCWCGDLIRAAFSAGGVDAVEVHANEFTFEESISTGEIERKVESPINKAQQFKSILQNRKNENNKKSFLSVYIGDSVGDLLCLLEADIGIVVSSSSSLRRVGSHFGVSFVPLFSGIVQKQKQHTEESSSSAWKGLSGTLYTVSSWAEIHSFALGWE

SEQ ID NO: 3647 - protein, 540 aa, Arabidopsis thaliana
MTAVAFSSSLSIPPTSEEALPGKLWIKFNRECLFSIYSPFAVCLAAGNLKIDTFRQYIAQDVHFLKAFAHAYELAADCADDDDDKLAISDLRKSVMEELKMHDSFVQDWDLDINKEVSVNSATLRYTEFLLATASGKVEGCKAPGMLDTPFEKTKVAAYTLGAVTPCMRLYAFLGKEFGSLLDLSDVNHPYKKWIDNYSSDAFQAMKLEVEFFHAQPLAQPTIVPLLKNHSKDDLVIFSDFDLTCTVVDSSAILAEIAIVTAPKDEQSRSGQQIHRMLSSDLKNTWNLLSKQYTEHYEECIESILNKKKADKFDYEGLCKALEQLSDFEKEANNRVIESGVLKGLNLEDIKRAGERLILQDGCINVFQKILKTENLNAELHVLSYCWCGDLIRAAFSAGGVDAVEVHANEFTFEESISTGEIERKVESPINKAQQFKSILQNRKNENNKKSFLSVYIGDSVGDLLCLLEADIGIVVSSSSSLRRVGSHFGVSFVPLFSGIVQKQKQHTEESSSSAWKGLSGTLYTVSSWAEIHSFALGWE

SEQ ID NO: 3648 - protein, 445 aa, Arabidopsis thaliana
MEELKMHDSFVQDWDLDINKEVSVNSATLRYTEFLLATASGKVEGCKAPGMLDTPFEKTKVAAYTLGAVTPCMRLYAFLGKEFGSLLDLSDVNHPYKKWIDNYSSDAFQAMKLEVEFFHAQPLAQPTIVPLLKNHSKDDLVIFSDFDLTCTVVDSSAILAEIAIVTAPKDEQSRSGQQIHRMLSSDLKNTWNLLSKQYTEHYEECIESILNKKKADKFDYEGLCKALEQLSDFEKEANNRVIESGVLKGLNLEDIKRAGERLILQDGCINVFQKILKTENLNAELHVLSYCWCGDLIRAAFSAGGVDAVEVHANEFTFEESISTGEIERKVESPINKAQQFKSILQNRKNENNKKSFLSVYIGDSVGDLLCLLEADIGIVVSSSSSLRRVGSHFGVSFVPLFSGIVQKQKQHTEESSSSAWKGLSGTLYTVSSWAEIHSFALGWE

SEQ ID NO: 3649 - DNA, 1169 bp, Arabidopsis thaliana
aaaccaaggaaagaaaacgagagaggtacgtagaagaaaatggctgccttatcagagaaagaggctgaagcttatctcgacgcaaggcctagatatccgatcgattggtttaagaaaattgccgcacggacacaggaccacaaatttgcttgggatgttggaactggtaatgggcaggctgctattgggcttgtggagcattacgagaatgtagtggctaccgatataaacgaagcacaacttcaacgagcaatcaaacactcaagaatcagttaccatcacactccaacaacgatatcagaagatgagatggtggatctactcgggggagaaaactccgtggatctcatagttgctgctcaagctgtccatttcttcgacctcaacgtattttacaatgttgcaaaacgtgttcttcgtaaagaaggaggcctaatcgccgtttgggtatacaacgatatcattatctcgcatgagatcgatcccataatgaagcgccttgtcgactctactctaccttttagaactcctattatgaatttagcatttgacggttacaagacattgacatttccttttgagaccatagggatgggttccgaaggaaagcctattactctagacattccgcataaactttcgcttaaagggtttatagggttcttgagatcgtggcagcccgcgatgaaggctaaggaaaaaggagtagagcttataaatgaagatctaataaccaaatttgaggaggcttggggtgatgaaacccaagtgaaagatgttttctacaaggctcacatgattgttggaaaaattccggaagaaaaattcgaatctgatcaagtactgtctaacaaaggtcgtctcttgcttgaaacggaggttgggagaaaccagaaaagaccacaaccatccgatgaaggagacagacaaagtaagaaacaaaatacaagtgaagatgacgcatgcaaagataaaccatcgtcagtttttagtactcattacaggttttaaccaaaaatagatattaaaccatttgagaaagcaataactcttatttggatatcagttcattattccgtattaaagccgttggtttttgtacaactgagtaataaagttcatgttgagtatgtcaattattggatttgggagttccaaagaaaattttg

SEQ ID NO: 3650 - protein, 323 aa, Arabidopsis thaliana
MAALSEKEAEAYLDARPRYPIDWFKKIAARTQDHKFAWDVGTGNGQAAIGLVEHYENVVATDINEAQLQRAIKHSRISYHHTPTTISEDEMVDLLGGENSVDLIVAAQAVHFFDLNVFYNVAKRVLRKEGGLIAVWVYNDIIISHEIDPIMKRLVDSTLPFRTPIMNLAFDGYKTLTFPFETIGMGSEGKPITLDIPHKLSLKGFIGFLRSWQPAMKAKEKGVELINEDLITKFEEAWGDETQVKDVFYKAHMIVGKIPEEKFESDQVLSNKGRLLLETEVGRNQKRPQPSDEGDRQSKKQNTSEDDACKDKPSSVFSTHYRF

SEQ ID NO: 3651 - protein, 233 aa, Arabidopsis thaliana
MVDLLGGENSVDLIVAAQAVHFFDLNVFYNVAKRVLRKEGGLIAVWVYNDIIISHEIDPIMKRLVDSTLPFRTPIMNLAFDGYKTLTFPFETIGMGSEGKPITLDIPHKLSLKGFIGFLRSWQPAMKAKEKGVELINEDLITKFEEAWGDETQVKDVFYKAHMIVGKIPEEKFESDQVLSNKGRLLLETEVGRNQKRPQPSDEGDRQSKKQNTSEDDACKDKPSSVFSTHYRF

SEQ ID NO: 3652 - protein, 173 aa, Arabidopsis thaliana
MKRLVDSTLPFRTPIMNLAFDGYKTLTFPFETIGMGSEGKPITLDIPHKLSLKGFIGFLRSWQPAMKAKEKGVELINEDLITKFEEAWGDETQVKDVFYKAHMIVGKIPEEKFESDQVLSNKGRLLLETEVGRNQKRPQPSDEGDRQSKKQNTSEDDACKDKPSSVFSTHYRF

SEQ ID NO: 3653 - DNA, 1702 bp, Arabidopsis thaliana
aacacaaaaccaaaccgcagacaaagaaacaaattcgcagacaatagtcgaaaatggctgaaatctcggcgacttcgtttccttcttcttcttcctctgctctcgtcatccgtagctcccacaatggtagcttaaaatgtcagaatgtagctgttccaaaaactacttcccagttccaagagttatctctgaaacgaagccagcttgttggcaatgccgttgttaccggtcatgttaccggatcccgcagctgcaagaatcaagctattcgagctgttctatccggtgatggaaccgccttgactactgattcaaaggaggctggacttcgtggaaaactgaaaaaggtcgttctagcttacagtggaggcttagacacctctgtcattgtgccatggcttaaggagaactatggttgtgaagttgtgtgcttcactgctgatgttggtcagggcataaaagagttagagggtttagaacaaaaggctaaggctagtggtgcttctcagttggtcgttaaggatctcacagaggagtttgtgaaagatttcatcttcccttgtcttagagctggtgccatctatgaacgaaaatacttgcttggtacctccatggctcgacctgtcattgctaaggccatggttgatgtagcagcagaggttggagctgatgccgttgcacatgggtgtactggaaaaggaaatgaccaggttcggtttgagctcaccttcttttcattaaaccctgaacttaaagttgtggcaccatggagagaatgggaaatccaaggccgagaagatgctattgagtatgcaaagaagcataatgttcccgtcccagtgacaaagaagtccatttacagccgggacagaaacctgtggcaccttagtcatgagggtgatctattggaagatccagcaaacgagccaaagaaagatatgtacatgatgagtgtggatcctgaagatgctcctgatcagcctgaatacatcgagatcgggatagaatctggacttccagtggcgctgaacgggaaggctctgagtccagccacacttctggccgagctaaacacaataggaggaaagcacgggattgggcggattgacatggttgagaaccgtctggttgggatgaaatcacgaggtgtgtatgaaactcctggaggcactatcctctttgcagctgtacaggaactagaatccctcactctagacagagagagtattcaggtaaaagacacattagcactgaaatatgcagagatggtctacgcaggaagatggtttgatccgcttagggagtccatggacgctttcatggagaagataaccgagacaaccacgggatctgtgacactgaagctgtacaaaggatctgtgtcggttacagggcgtcagagtcctaacagtctgtatagacaggacatatcttcgtttgaagggagtgagatctacaaccaagcggatgcagccgggtttattcgtctttacgggcttccaatgaaaattagagctatgcttaagaaaattagctagaaatggttttcattcatgtcttacttggaattgagagcctgacattagaacacatcccttattgtgatgcgtcgtcatagcttcagcttctttcgaaataattctatcatctttcttcactttggaaaaacttgagaaatttaataatgagtgcctctttcttt

SEQ ID NO: 3654 - protein, 494 aa, Arabidopsis thaliana
MAEISATSFPSSSSSALVIRSSHNGSLKCQNVAVPKTTSQFQELSLKRSQLVGNAVVTGHVTGSRSCKNQAIRAVLSGDGTALTTDSKEAGLRGKLKKVVLAYSGGLDTSVIVPWLKENYGCEVVCFTADVGQGIKELEGLEQKAKASGASQLVVKDLTEEFVKDFIFPCLRAGAIYERKYLLGTSMARPVIAKAMVDVAAEVGADAVAHGCTGKGNDQVRFELTFFSLNPELKVVAPWREWEIQGREDAIEYAKKHNVPVPVTKKSIYSRDRNLWHLSHEGDLLEDPANEPKKDMYMMSVDPEDAPDQPEYIEIGIESGLPVALNGKALSPATLLAELNTIGGKHGIGRIDMVENRLVGMKSRGVYETPGGTILFAAVQELESLTLDRESIQVKDTLALKYAEMVYAGRWFDPLRESMDAFMEKITETTTGSVTLKLYKGSVSVTGRQSPNSLYRQDISSFEGSEIYNQADAAGFIRLYGLPMKIRAMLKKIS

SEQ ID NO: 3655 - protein, 308 aa, Arabidopsis thaliana
MARPVIAKAMVDVAAEVGADAVAHGCTGKGNDQVRFELTFFSLNPELKVVAPWREWEIQGREDAIEYAKKHNVPVPVTKKSIYSRDRNLWHLSHEGDLLEDPANEPKKDMYMMSVDPEDAPDQPEYIEIGIESGLPVALNGKALSPATLLAELNTIGGKHGIGRIDMVENRLVGMKSRGVYETPGGTILFAAVQELESLTLDRESIQVKDTLALKYAEMVYAGRWFDPLRESMDAFMEKITETTTGSVTLKLYKGSVSVTGRQSPNSLYRQDISSFEGSEIYNQADAAGFIRLYGLPMKIRAMLKKIS

SEQ ID NO: 3656 - protein, 299 aa, Arabidopsis thaliana
MVDVAAEVGADAVAHGCTGKGNDQVRFELTFFSLNPELKVVAPWREWEIQGREDAIEYAKKHNVPVPVTKKSIYSRDRNLWHLSHEGDLLEDPANEPKKDMYMMSVDPEDAPDQPEYIEIGIESGLPVALNGKALSPATLLAELNTIGGKHGIGRIDMVENRLVGMKSRGVYETPGGTILFAAVQELESLTLDRESIQVKDTLALKYAEMVYAGRWFDPLRESMDAFMEKITETTTGSVTLKLYKGSVSVTGRQSPNSLYRQDISSFEGSEIYNQADAAGFIRLYGLPMKIRAMLKKIS

SEQ ID NO: 3657 - DNA, 1266 bp, Arabidopsis thaliana
taatctcttcacaatcccaaaaaatctcacaatcgttttttgcttatctctttcaatggacacctctctctcccaccacggatctctcccgtttcccccatcgcgccgcaatttcgttaaacaaaaccgcggcggcgattgcgtttttctcccctcgcgtcgtaagttccgatacgattcgttggtggtggtttccgctgcgtcttcgggacagagcatcgacgcgcctctagttccacggtcgcctcagggaaggtttctaagttccgtcttggtgaaaaaacggcagctctttcatttcgccgtcgctgatttgcttaaacagctcgctgatgataaggaagcttccttatctcgtatgttccttagttatggttccgatgaagcttccctccacagaaggatagctcaacttaaggagagtgattgccaaattgcaattgaagacataatgtacatgttgatcttgtacaaattctcagagataagagtgcctcttgttccaaagcttcccagttgcatttacaacggaagactcgagatctcgccttcgaaagactgggaacttgagtcaatccatagctttgacgttcttgaactcatcaaagaacatagtaacgcagtcatcagtttaagagtgaattcgagtttgactgacgattgtgcgacaacggagatagataagaatcgtctcagtaaagtatacacagcttcggtcttatatggatactttttaaaatctgcttctcttagacaccaactcgaatgctcattatcacaacaccatggaagtttcactaagcaactgaggcattacatttctgagttcgatcccaagatattgcggagatgcgcaaaaccaaggtcacatgaagcaaaaagcctgatagaaaagcagagtttagctctttttggtcctgaggaaagcagcaaagagagcattgtgacatcgttttctagcctgaagaggttgcttcttgaggctgtggcgtttggtacgtttctatgggacacagaggagtatgtagatggcgcgtttaagctcaaggagaatgagaatgcagaggaagaaacaaatagcagtgtttgaagtatgtatgaaccagtttgctagaagaaaacttgaatatcttttttggtggacattgcatataatatatagattaaatcagggtcaatggctatatgaaattatttttgtctatagtttgagtaatcatatgtatagtgtataatggatgatttaatagagagattggttttgtc

SEQ ID NO: 3658 - protein, 362 aa, Arabidopsis thaliana
NLFTIPKNLTIVFCLSLSMDTSLSHHGSLPFPPSRRNFVKQNRGGDCVFLPSRRKFRYDSLVVVSAASSGQSIDAPLVPRSPQGRFLSSVLVKKRQLFHFAVADLLKQLADDKEASLSRMFLSYGSDEASLHRRIAQLKESDCQIAIEDIMYMLILYKFSEIRVPLVPKLPSCIYNGRLEISPSKDWELESIHSFDVLELIKEHSNAVISLRVNSSLTDDCATTEIDKNRLSKVYTASVLYGYFLKSASLRHQLECSLSQHHGSFTKQLRHYISEFDPKILRRCAKPRSHEAKSLIEKQSLALFGPEESSKESIVTSFSSLKRLLLEAVAFGTFLWDTEEYVDGAFKLKENENAEEETNSSV

SEQ ID NO: 3659 - protein, 344 aa, Arabidopsis thaliana
MDTSLSHHGSLPFPPSRRNFVKQNRGGDCVFLPSRRKFRYDSLVVVSAASSGQSIDAPLVPRSPQGRFLSSVLVKKRQLFHFAVADLLKQLADDKEASLSRMFLSYGSDEASLHRRIAQLKESDCQIAIEDIMYMLILYKFSEIRVPLVPKLPSCIYNGRLEISPSKDWELESIHSFDVLELIKEHSNAVISLRVNSSLTDDCATTEIDKNRLSKVYTASVLYGYFLKSASLRHQLECSLSQHHGSFTKQLRHYISEFDPKILRRCAKPRSHEAKSLIEKQSLALFGPEESSKESIVTSFSSLKRLLLEAVAFGTFLWDTEEYVDGAFKLKENENAEEETNSSV

SEQ ID NO: 3660 - protein, 243 aa, Arabidopsis thaliana
MFLSYGSDEASLHRRIAQLKESDCQIAIEDIMYMLILYKFSEIRVPLVPKLPSCIYNGRLEISPSKDWELESIHSFDVLELIKEHSNAVISLRVNSSLTDDCATTEIDKNRLSKVYTASVLYGYFLKSASLRHQLECSLSQHHGSFTKQLRHYISEFDPKILRRCAKPRSHEAKSLIEKQSLALFGPEESSKESIVTSFSSLKRLLLEAVAFGTFLWDTEEYVDGAFKLKENENAEEETNSSV

SEQ ID NO: 3661 - DNA, 1009 bp, Arabidopsis thaliana
aaaatctccattttctctgcaaatcccaaatccatcacaaaccctaattttagtctctcaaaatctccaccgtttctaccaccgtcaatgtggcggccgtggcgtaaatcgtcggttaagattcacgacacatactctccaaccaccgcttccttcaaagacattcaccatctctgctccgacgactcaccttccttcccttcttctccctctccatctccaaaaaccgcttctagagtcttccaccgagtccgtgcagctaatttgatcctcaaatcgtggccaactcgtcaatctaatcacctcctccgcgcagattccgaacctatcaatctaagccggaatcaaaatccagaatcagattcgaaacaatcgaaaaccaaaaccgaaccagatgtacggatttcaatcccaggcgcagagaaaagcattgtcgtatacttcacaagcctacgcgtggttcgtccaacattcgaagcctgcaaatccgttacatcgatcctccatagcttcccggtacgaatcgacgaacgagatctctcaatggacgcgtcattctccaccgagctacaacgaatcttcgggaaggatcagaaccagaaccagaaccaggcgaagacgccgaagctgccgcgagtcttcatcggtggtcggtacataggaggagcggaggaggtgaaacagctacacgagatcggagagttgaagaaacttgtgcaagagttgccgaagattgaaccaggggtatgtgagatgtgtggtggtcatagattcgtgccgtgtaaggattgtcatggtagccataaggtgcatacggagaagctagggttcagaacttgcttaacctgtaacgagaatggtctcgtcaggtgttcttcttgttcatttccacaatctcctccaccctaattcctagattttcagtttttttttttcaatttcaattttcgaataccagaaattggaataattaaatattggtttttaatctaatttttaagaagtttcc

SEQ ID NO: 3662 - protein, 302 aa, Arabidopsis thaliana
KISIFSANPKSITNPNFSLSKSPPFLPPSMWRPWRKSSVKIHDTYSPTTASFKDIHHLCSDDSPSFPSSPSPSPKTASRVFHRVRAANLILKSWPTRQSNHLLRADSEPINLSRNQNPESDSKQSKTKTEPDVRISIPGAEKSIVVYFTSLRVVRPTFEACKSVTSILHSFPVRIDERDLSMDASFSTELQRIFGKDQNQNQNQAKTPKLPRVFIGGRYIGGAEEVKQLHEIGELKKLVQELPKIEPGVCEMCGGHRFVPCKDCHGSHKVHTEKLGFRTCLTCNENGLVRCSSCSFPQSPPP

SEQ ID NO: 3663 - protein, 273 aa, Arabidopsis thaliana
MWRPWRKSSVKIHDTYSPTTASFKDIHHLCSDDSPSFPSSPSPSPKTASRVFHRVRAANLILKSWPTRQSNHLLRADSEPINLSRNQNPESDSKQSKTKTEPDVRISIPGAEKSIVVYFTSLRVVRPTFEACKSVTSILHSFPVRIDERDLSMDASFSTELQRIFGKDQNQNQNQAKTPKLPRVFIGGRYIGGAEEVKQLHEIGELKKLVQELPKIEPGVCEMCGGHRFVPCKDCHGSHKVHTEKLGFRTCLTCNENGLVRCSSCSFPQSPPP

SEQ ID NO: 3664 - DNA, 1388 bp, Arabidopsis thaliana
atggaaataatacactactctctcacggacttggaaccaaacattccaaattagtttaatcgacagatcactgctcagctgaatcgttttctctcatcaaccgcagagaaagactttcaagatcatccttcaagctctctcaaatggccaacttctatgagaattaccagagtccttacgattacaatcaggttaataatctctacgatcaaaatcattatcattacaatcaacagcagcagcagcttggtttcgaaccaatgagttataattattacaactggaatgaatctgaatctgaatctgaatatgttgcttactctggttatgatgatccaatgagttataattgttataactggaatggatccgagtctgagacaacctctgcatatgttgcttactctgtttctaccatgtctgagcctaaacacttgttctatgatccgaatctctatacaacctacgaatctcctcctcagtttagtatctattgctctgtagcctctgctcttgacttcaacgagccggaattcgatgaatacgatcccacgccgtacggtggtggctacgatgttgttgcaacctatggaaaacctcttcctccatcggtggaaacttgttacccttgttcaaccgctcctcacgctaaagctccctctcctcctgagattattgctcctgttcctcttggaatttatgatggtggtcaaaagaatgttgtcaagaaacgtgtgtcttttgctgaaccggtagaagaagtcaaaccaatagaaaccattaaagagcaagaacaagaacaagacgaagattatgatgaagaaagtgaggacgaagatgatggtgatgatgatgatgaagaagaagaagaaggggatgaggaagctaaagaagaagaaaaagatcacagttcaagctatggaaatgaggaatatgaagtcgtagataaaggagaagtgaaagctttgtatgttccgtctggttacggattagaagcgaccgatctctgtgaggttatatttggaggttactttccttgtgtgttacgtaacaaaagacgtcaggaagatgaacaagatcgtggggctgctgtttcttgctgggaaagcaacgattctgatccgtggaagacaacttccgatcaccttttcggggattcatatccgtacggttacgagaatcggagcgaaagaaatcagttcgaggtctcctcttatggttaccggatgtattaacaaccctagttatcatcagttgtgtcaatgtgaggtaagaacaacattcttttgattattgatgaacctgattttttagtatctgttacacaagagatgagatttactgttgtataacgaggaggggttacttaataataaaacgtcgcacgc

SEQ ID NO: 3665 - protein, 363 aa, Arabidopsis thaliana
MANFYENYQSPYDYNQVNNLYDQNHYHYNQQQQQLGFEPMSYNYYNWNESESESEYVAYSGYDDPMSYNCYNWNGSESETTSAYVAYSVSTMSEPKHLFYDPNLYTTYESPPQFSIYCSVASALDFNEPEFDEYDPTPYGGGYDVVATYGKPLPPSVETCYPCSTAPHAKAPSPPEIIAPVPLGIYDGGQKNVVKKRVSFAEPVEEVKPIETIKEQEQEQDEDYDEESEDEDDGDDDDEEEEEGDEEAKEEEKDHSSSYGNEEYEVVDKGEVKALYVPSGYGLEATDLCEVIFGGYFPCVLRNKRRQEDEQDRGAAVSCWESNDSDPWKTTSDHLFGDSYPYGYENRSERNQFEVSSYGYRMY

SEQ ID NO: 3666 - protein, 324 aa, Arabidopsis thaliana
MSYNYYNWNESESESEYVAYSGYDDPMSYNCYNWNGSESETTSAYVAYSVSTMSEPKHLFYDPNLYTTYESPPQFSIYCSVASALDFNEPEFDEYDPTPYGGGYDVVATYGKPLPPSVETCYPCSTAPHAKAPSPPEIIAPVPLGIYDGGQKNVVKKRVSFAEPVEEVKPIETIKEQEQEQDEDYDEESEDEDDGDDDDEEEEEGDEEAKEEEKDHSSSYGNEEYEVVDKGEVKALYVPSGYGLEATDLCEVIFGGYFPCVLRNKRRQEDEQDRGAAVSCWESNDSDPWKTTSDHLFGDSYPYGYENRSERNQFEVSSYGYRMY

SEQ ID NO: 3667 - protein, 298 aa, Arabidopsis thaliana
MSYNCYNWNGSESETTSAYVAYSVSTMSEPKHLFYDPNLYTTYESPPQFSIYCSVASALDFNEPEFDEYDPTPYGGGYDVVATYGKPLPPSVETCYPCSTAPHAKAPSPPEIIAPVPLGIYDGGQKNVVKKRVSFAEPVEEVKPIETIKEQEQEQDEDYDEESEDEDDGDDDDEEEEEGDEEAKEEEKDHSSSYGNEEYEVVDKGEVKALYVPSGYGLEATDLCEVIFGGYFPCVLRNKRRQEDEQDRGAAVSCWESNDSDPWKTTSDHLFGDSYPYGYENRSERNQFEVSSYGYRMY

SEQ ID NO: 3668 - DNA, 1299 bp, Arabidopsis thaliana
accccttctttattgctctgttctttgagcaaacaattttgatttcttcgcgagcgaagaaacctcaaagacgaaaagtctcgaaatttcataactttttcttgaagatctatctagatcacccattttcttaaaaacctcttgagatttttctatctcgtgaaaagaggttttaaggtttagatgggtgtggctcactctgatcttcacaatgatttgtcttcttcatcttgttttggggatcggaatatcttgaagcctggtttaggagatttaccagaggcgtgtgtggctataattgttgagaatttggatcctgttgagatctgtagattctcaaagctcaatagagcatttcgcggcgcttcttgggctgattgtgtttgggaatcgaaacttcctcagaattacagagatgttctcgagaaaatccttggtggcttccctgaaaatttgcaaaaaagacacctttatgcttttctctccaggattaactcattcgatgatgccaccaagaaggtatggatagataaacgaaccagtggtgtttgtctatccatttcagccaaaggattatccattacaggcattgatgatcgtagatattggagtcatatccccactgatgaatctcggttttcttctgtagcttatctccaacaaatctggtggtttgaagttgatggtgaaatcgatttcccattcccggttggaacctacagcattttcttcaggcttcaattaggccggtcgggcaagtggtttggtcgacgggtctgtaacacagaacaagtccatggttgggacattaaaccggttcgatttcaactctggactgaagatggtcaatattcctcatctcaatgtatgttaactgagcggggaaactggattcattaccacgccggagacgttgttgtccgggaatcgaataggtcatcgacaaagattaagttttcgatgactcagatcgattgtacacataccaaaggcgggttatctctagactctgtagtcgtgtacccgagctcgtgtaaagaccagttgaagcggttttaatgtttcaaccggatccggtttagtgagaggttaaagcagggttttttgttatgcaggtctttagccccttctatagatgtagttagagcttctatttagagagcttttgttttgtaacttcattgagatttgaggcaaactgtaataatatgttgtggttatgaaactaaaccatctgttataacttgttattagttacgttaagaatgattaatcgttacaaagtttaacttcagatcc

SEQ ID NO: 3669 - protein, 291 aa, Arabidopsis thaliana
MGVAHSDLHNDLSSSSCFGDRNILKPGLGDLPEACVAIIVENLDPVEICRFSKLNRAFRGASWADCVWESKLPQNYRDVLEKILGGFPENLQKRHLYAFLSRINSFDDATKKVWIDKRTSGVCLSISAKGLSITGIDDRRYWSHIPTDESRFSSVAYLQQIWWFEVDGEIDFPFPVGTYSIFFRLQLGRSGKWFGRRVCNTEQVHGWDIKPVRFQLWTEDGQYSSSQCMLTERGNWIHYHAGDVVVRESNRSSTKIKFSMTQIDCTHTKGGLSLDSVVVYPSSCKDQLKRF

SEQ ID NO: 3670 - DNA, 1614 bp, Arabidopsis thaliana
acgaaagactttttcttaaatttcttgtaaaccatacaaaacatgttgtgtgcttctcaagcatcaacaacaaccctttgctcaaccatggatcaaacctcacaaccttcttcttcttcttcagccacgatccggctcggtggtcgagccattgaccgtcataacccaatcatacgtgacggtcggagactcactcctccaccttccccaaaccttaatccctcttcttcgtcttcttctacttatcatactcctcttatgactagactaggtctcgagagtagtgaacaaaaacggttagcgaagaggaagagcaagaaaggtgacagtgatgttggtaagtcaccggttagttgttttagcagtgacacacctcagggttcttcaaggtacttattgagtaacccggttttctttgacgggtttgtggattccgacccgattccaatacctattgatgaaccggagataaccaaagctgatgatttaaataattttcatgaagatcgactcataataaacgcctcaaagtatctatcaacttctgcttctttcttggagaagaagcaacccgatttcttcgaggggttcttggattatgaaccggttctatctcccgataatcctttctctgaacccacaaaagcttctcctacagcttctctgagctctcttgaagataaagatgtttcgtccccggatttcaaattctctcctcctcctcctccacctccttctcctcctcagtcgtcgccgccatcaccaccggagaaaaactcatcttccgatcaagtggttgttttgagagtgtcacttcattgcaaaggctgtgcagggaaagttaagaaacatctatcgaaattgaaaggagtgacgtcgtataacatagacttcgcagcaaagaaggttaccgtgacgggagacgtgacaccgttaactgtgttggcgagtatttccaaagttaaaaacgctcagttttggcctgagattattcagaagtaattctctttctttttccctctgttttcttctatgctcttatctttactttggaagacaaaacttgtgaagatgttactttcttttgtgcgtttatttgtctcggttatgattaaagattggtattcagaaatgttttatatgaacacacttcataatttgtttttgtgatactaaatctctactatttattcaagtattggaaaaataaaaattgattagtagtattagcttgttaagaccgtggagcaatgagcaatcacttcacaacttgaaagccaaacccaaacattagtaatatcaagaggaaggtcttgcaaaaaaactactgataagttatttgatcactaatattgaaaataatgtcataaatagtgtcttgctctatttgtgatttagaaatttttataaaaacatattttttaatctatgattttgaatattgttattctttcttttatttacaccacaccaaatatgttttttttttaatccaaaaataagccttttaaaaggagaaaaaagtaaaaaaactattgttattcaatgcatatggatttacaccaaaacaaatattgttattcaatccatatagacttacctttacagatgact

SEQ ID NO: 3671 - protein, 319 aa, Arabidopsis thaliana
MLCASQASTTTLCSTMDQTSQPSSSSSATIRLGGRAIDRHNPIIRDGRRLTPPPSPNLNPSSSSSSTYHTPLMTRLGLESSEQKRLAKRKSKKGDSDVGKSPVSCFSSDTPQGSSRYLLSNPVFFDGFVDSDPIPIPIDEPEITKADDLNNFHEDRLIINASKYLSTSASFLEKKQPDFFEGFLDYEPVLSPDNPFSEPTKASPTASLSSLEDKDVSSPDFKFSPPPPPPPSPPQSSPPSPPEKNSSSDQVVVLRVSLHCKGCAGKVKKHLSKLKGVTSYNIDFAAKKVTVTGDVTPLTVLASISKVKNAQFWPEIIQK

SEQ ID NO: 3672 - protein, 304 aa, Arabidopsis thaliana
MDQTSQPSSSSSATIRLGGRAIDRHNPIIRDGRRLTPPPSPNLNPSSSSSSTYHTPLMTRLGLESSEQKRLAKRKSKKGDSDVGKSPVSCFSSDTPQGSSRYLLSNPVFFDGFVDSDPIPIPIDEPEITKADDLNNFHEDRLIINASKYLSTSASFLEKKQPDFFEGFLDYEPVLSPDNPFSEPTKASPTASLSSLEDKDVSSPDFKFSPPPPPPPSPPQSSPPSPPEKNSSSDQVVVLRVSLHCKGCAGKVKKHLSKLKGVTSYNIDFAAKKVTVTGDVTPLTVLASISKVKNAQFWPEIIQK

SEQ ID NO: 3673 - protein, 247 aa, Arabidopsis thaliana
MTRLGLESSEQKRLAKRKSKKGDSDVGKSPVSCFSSDTPQGSSRYLLSNPVFFDGFVDSDPIPIPIDEPEITKADDLNNFHEDRLIINASKYLSTSASFLEKKQPDFFEGFLDYEPVLSPDNPFSEPTKASPTASLSSLEDKDVSSPDFKFSPPPPPPPSPPQSSPPSPPEKNSSSDQVVVLRVSLHCKGCAGKVKKHLSKLKGVTSYNIDFAAKKVTVTGDVTPLTVLASISKVKNAQFWPEIIQK

SEQ ID NO: 3674 - DNA, 883 bp, Arabidopsis thaliana
acaaaccccttcttttaagcttttgatgacattgtcccttgtcggatcctactctcttaacctttgaaatggctgattcgagtgctgctgaaccaacaaccggtgcttcttctccccccgtggcttctgatgagaactctacccagattcaaccgatccggatgccaaccatcgaggagatccgagctcaagaggtttggaacaactgcgccgttcgcgctgttactagtggagtcatgggaggaggactcgggttgatgatgggtttgttcttgggggcattagataatcctattacgcatgatactatgacggctaggcagcagtttgtgttcacggcaaaacaaatggggcaaaggagttggaattcctgtaagacatttgcagttatgggtttggttttctctgctgcagaatgcattgtcgaaaaggcaagagctaagcatgacactgtaaacaccgctatagctggatgtgttaccggtggttcaatgtccgcccgaggtgggccaaaagctgcgtgtataggttgcgctggatttgcaactttctctgtactcatagagaagttctttgataggcatacataaaccagtgagatatctaacagacgccattgctgagatttttttgctgcttcttttctgtgatagtgatacagttcatcacctgaacccagggagatagaagctagaattacacttttcaatatagaataagcaaggcttgtgttgattgcatatacttcaattgttgttatttatcatagatttcattagactttgagggctccaatatttaagtaagtgaattagacttgagggctccaatttttaagcaagtgtccactgaaatttagggggttccctttgcacaatgtttc

SEQ ID NO: 3675 - protein, 173 aa, Arabidopsis thaliana
MADSSAAEPTTGASSPPVASDENSTQIQPIRMPTIEEIRAQEVWNNCAVRAVTSGVMGGGLGLMMGLFLGALDNPITHDTMTARQQFVFTAKQMGQRSWNSCKTFAVMGLVFSAAECIVEKARAKHDTVNTAIAGCVTGGSMSARGGPKAACIGCAGFATFSVLIEKFFDRHT

SEQ ID NO: 3676 - protein, 142 aa, Arabidopsis thaliana
MPTIEEIRAQEVWNNCAVRAVTSGVMGGGLGLMMGLFLGALDNPITHDTMTARQQFVFTAKQMGQRSWNSCKTFAVMGLVFSAAECIVEKARAKHDTVNTAIAGCVTGGSMSARGGPKAACIGCAGFATFSVLIEKFFDRHT

SEQ ID NO: 3677 - protein, 117 aa, Arabidopsis thaliana
MGGGLGLMMGLFLGALDNPITHDTMTARQQFVFTAKQMGQRSWNSCKTFAVMGLVFSAAECIVEKARAKHDTVNTAIAGCVTGGSMSARGGPKAACIGCAGFATFSVLIEKFFDRHT

SEQ ID NO: 3678 - DNA, 1414 bp, Arabidopsis thaliana
atgaggagaaataaaggtgttcgtgaagaggagagtttagaaaacaaagaagatgaagtgatagatctaggatttttctgttttaaaaggttattagcccatttatcaaaattattcggcccgaggtcgtctccaatctcacgccaccgattccaaacgccaaccctctcgagtcttgtctctctccaatcctttccttggccgcataaacgcaaccatcgtcgtcggagctttgatcttcaccgactgaaaagtatgtctgtttccgatgaggaagatgagtgtttcgctcgattcctcgaatcagaagtctcatcggtagaggataaagaagaaacgaaagaacctgaggcaaaacggcaacgtattgagaaaggcgaaacaaaggctctagagaaggatgaagatcaaaaggaaaatggtaacaaagataaaactgatgcaaagagaatagagagtggagttttcaccaatgttcctactgagctgtttcgtcatattctcaagttcttatcttcggaggatcttgtatcatgctccttggtttgtaaatttctcaattttgctgcggctgatgaatccttatggcgtcgcctgtactgtatccggtggggtctaactcttccaagtagaaagttacgtgaatctgcttggaagaagctttatattgatcgtgatgaacaggacatgattgaacttgtcagaacctgtccgtcggatttcaaggagtattacgtacatatgcaagcagcaaagagaagccaagcacctcttccgtcccagatggtggatgaccggataattcttgacaatactgtacttgaacaagtttctctatggaagaaaagcaaaggacttactgataaggctgtcactggccatatttgtttgggaaccaaatgttcataccatcagattgacgacgtgttcatatgcaaagagacgggaaatgttcatgtatgcgatgataactgcaaggaagtaatactgagtccagagggtgacctcatggtgtgtactatctcaggagtttgttctgatactttacttgtacaaactgagccagacgcagatgggtgttatgaggaagaagctgaactagaagctgaagtattcacagataaaagccgattagcccgagcttttgaacttggctacaactgcgatgatgagcaggaactggaacgtaccctgaggttctgctgagcaaaagtctcgaccttttgtccaatttcataaggcctactttctgtaaggtcttctctctctctctctctctgacctgattctgcctgggttctgtggagttgaaatgaatcaaatgtagctcttgttttaatcagtcagctttgtaacgtatacatatatatcattgtatgtgattaacattgtccttaaaaagtgttacacctag

SEQ ID NO: 3679 - protein, 401 aa, Arabidopsis thaliana
MRRNKGVREEESLENKEDEVIDLGFFCFKRLLAHLSKLFGPRSSPISRHRFQTPTLSSLVSLQSFPWPHKRNHRRRSFDLHRLKSMSVSDEEDECFARFLESEVSSVEDKEETKEPEAKRQRIEKGETKALEKDEDQKENGNKDKTDAKRIESGVFTNVPTELFRHILKFLSSEDLVSCSLVCKFLNFAAADESLWRRLYCIRWGLTLPSRKLRESAWKKLYIDRDEQDMIELVRTCPSDFKEYYVHMQAAKRSQAPLPSQMVDDRIILDNTVLEQVSLWKKSKGLTDKAVTGHICLGTKCSYHQIDDVFICKETGNVHVCDDNCKEVILSPEGDLMVCTISGVCSDTLLVQTEPDADGCYEEEAELEAEVFTDKSRLARAFELGYNCDDEQELERTLRFC

SEQ ID NO: 3680 - protein, 316 aa, Arabidopsis thaliana
MSVSDEEDECFARFLESEVSSVEDKEETKEPEAKRQRIEKGETKALEKDEDQKENGNKDKTDAKRIESGVFTNVPTELFRHILKFLSSEDLVSCSLVCKFLNFAAADESLWRRLYCIRWGLTLPSRKLRESAWKKLYIDRDEQDMIELVRTCPSDFKEYYVHMQAAKRSQAPLPSQMVDDRIILDNTVLEQVSLWKKSKGLTDKAVTGHICLGTKCSYHQIDDVFICKETGNVHVCDDNCKEVILSPEGDLMVCTISGVCSDTLLVQTEPDADGCYEEEAELEAEVFTDKSRLARAFELGYNCDDEQELERTLRFC

SEQ ID NO: 3681 - DNA, 1979 bp, Arabidopsis thaliana
gaattcggcacgaggttgaaaccattttatatttatctcttcttattttctgcatggtggtttgaattaggccaccaaaaaactcttggataaaaaaaaaactgagaaacagaaaaaagaaaaaacaaaacacacattctcgatttgtctgtgccacacacactctcttgcacattcttgtctcgacaatactctcagaatacgatcttgaagagcaaagattgttcctttattgatgaattgagtgcaaaagagtgttatataatggctactgcagctgttataggactcaacactggcaaaagattgttgagttcatcgttttatcactcagatgttacagagaagtttctatctgtaaatgatcattgttcatcacagtatcatattgcttcaacgaaaagcgggataactgcgaaaaaggcgtcgaactatagtccgagttttccttcgtcgaatcgtcacacacaatctgctaaagctttgaaagagagtgtagatgttgcttctactgagaagccatggctacctaatggaactgataaggaattggaagaagaatgttatgatgatgatgatctaattagtcattctgttgaggcaattttactgttacagaagtctatgttagagaaaagttggaatctttcatttgaaaaggcggtgtcgagtgagtatccgggcaaggggactatacggaagaagaagattccggttatcacctgttcagggatttcagctcgtcaaagaaggattggtgctaagaagaaaactaatatgactcatgttaaagcagtttctgatgtttctagtggaaagcaagttagaggttatgtgaaaggtgtaataagtgaagatgtgcttagtcatgcggaagttgtgcgcttgtctaagaaaatcaaatctggtcttcgtcttgatgatcataagtcaagattgaaggatagattaggctgtgagccttctgatgaacagcttgcagtatctttgaagatatctcgggccgagcttcaggcgtggttgatggagtgtcatctagctagagagaagttggctatgagtaatgtgcgtttggttatgtctattgctcagcgttatgataatttgggagcagaaatgtctgaccttgttcagggtggtcttatcggacttttgcggggaatagagaaatttgattcttccaaaggtttcagaatttcaacttatgtatattggtggattcgacagggtgtctcaagagcactagtggacaactcaagaaccttgaggttacctactcacctacatgaaagactcggtttaatccgaaatgcaaagcttagacttcaagagaaaggaatcacaccctccattgataggattgcagagtctctaaacatgtcgcagaagaaagttagaaatgcaacagaggctgtaagcaaagtattttctctagacagagatgcatttccttctttgaatggtctccctggagaaactcatcacagttacattgcggatactcgtttggagaacaatccgtggcacgggtatgatgatttggcactcaaggaggaagtaagcaagcttataagtgcaacactcggagaacgggaaaaagagatcattcgattatactatggtctagacaaagaatgtctcacatgggaagacattagtaaacggataggattatcgagagagagggtgagacaggtagggcttgtggcactggagaaactaaaacacgcagcgaggaagagaaaaatggaggcaatgatccttaagaattgattttgtttttgtacattttgattacatcagagccatagagagcggttgtgaatgtgtatatatacaggacaaaaaagggggaagagtactactctcttttatttttttatcttccttgcttctttcgtaaactgagttgagaaacaagagacagttatgtaatatggcttcacgtaaacttcatcattcctcatatattatcaact

SEQ ID NO: 3682 - protein, 502 aa, Arabidopsis thaliana
MATAAVIGLNTGKRLLSSSFYHSDVTEKFLSVNDHCSSQYHIASTKSGITAKKASNYSPSFPSSNRHTQSAKALKESVDVASTEKPWLPNGTDKELEEECYDDDDLISHSVEAILLLQKSMLEKSWNLSFEKAVSSEYPGKGTIRKKKIPVITCSGISARQRRIGAKKKTNMTHVKAVSDVSSGKQVRGYVKGVISEDVLSHAEVVRLSKKIKSGLRLDDHKSRLKDRLGCEPSDEQLAVSLKISRAELQAWLMECHLAREKLAMSNVRLVMSIAQRYDNLGAEMSDLVQGGLIGLLRGIEKFDSSKGFRISTYVYWWIRQGVSRALVDNSRTLRLPTHLHERLGLIRNAKLRLQEKGITPSIDRIAESLNMSQKKVRNATEAVSKVFSLDRDAFPSLNGLPGETHHSYIADTRLENNPWHGYDDLALKEEVSKLISATLGEREKEIIRLYYGLDKECLTWEDISKRIGLSRERVRQVGLVALEKLKHAARKRKMEAMILKN

SEQ ID NO: 3683 - protein, 382 aa, Arabidopsis thaliana
MLEKSWNLSFEKAVSSEYPGKGTIRKKKIPVITCSGISARQRRIGAKKKTNMTHVKAVSDVSSGKQVRGYVKGVISEDVLSHAEVVRLSKKIKSGLRLDDHKSRLKDRLGCEPSDEQLAVSLKISRAELQAWLMECHLAREKLAMSNVRLVMSIAQRYDNLGAEMSDLVQGGLIGLLRGIEKFDSSKGFRISTYVYWWIRQGVSRALVDNSRTLRLPTHLHERLGLIRNAKLRLQEKGITPSIDRIAESLNMSQKKVRNATEAVSKVFSLDRDAFPSLNGLPGETHHSYIADTRLENNPWHGYDDLALKEEVSKLISATLGEREKEIIRLYYGLDKECLTWEDISKRIGLSRERVRQVGLVALEKLKHAARKRKMEAMILKN

SEQ ID NO: 3684 - protein, 331 aa, Arabidopsis thaliana
MTHVKAVSDVSSGKQVRGYVKGVISEDVLSHAEVVRLSKKIKSGLRLDDHKSRLKDRLGCEPSDEQLAVSLKISRAELQAWLMECHLAREKLAMSNVRLVMSIAQRYDNLGAEMSDLVQGGLIGLLRGIEKFDSSKGFRISTYVYWWIRQGVSRALVDNSRTLRLPTHLHERLGLIRNAKLRLQEKGITPSIDRIAESLNMSQKKVRNATEAVSKVFSLDRDAFPSLNGLPGETHHSYIADTRLENNPWHGYDDLALKEEVSKLISATLGEREKEIIRLYYGLDKECLTWEDISKRIGLSRERVRQVGLVALEKLKHAARKRKMEAMILKN

SEQ ID NO: 3685 - DNA, 1428 bp, Arabidopsis thaliana
acaaagtacaaagcagtgttcgtcaactatcttcttctcactctgttttcgtttagagagattttgcagagatgtcgagacgagcaatggtgataaagatgccaatacttatgatactgatttcatcaatggtgatgacgatggtcgagtcttcgagatcagttaataatggtcatgacgattctgagatcttacgaagacacttgctcactaatggcctcggagtcactcctcccatggggtggaatagctggaaccattttagctgcaacatagatgaaaaaatgatcaaagaaactgctaatgctttggttaccactggcctctctaagcttggctacaactatgttaacatcgatgattgctgggctgaaatttctcgtgacagcaagggaagtctggtgccaaagaagtcaactttcccttctggaattaaagcggttgcggattatgttcacagtaaaggccttaagcttgggatttactcagatgccgggtatttcacttgcagtaaaaccatgccaggttctttaggctacgaggagcatgatgccaagacatttgcagaatggggaattgattacttgaagtatgacaactgcaacagcgatggctctaaacctactgtcaggtatccagtgatgactcgagctctgatgaaatctggccgccccatctttcactcattgtgtgaatggggagatatgcatccagctctatggggatctccagtaggcaacagttggagaaccactaatgacattaaagatacttggcttagtatgatctcaatagcagacatgaatgaagtctacgctgagcatgcaagacctggtggctggaacgacccggatatgcttgaagtgggaaatggagggatgacaaaagacgagtacatagtccatttcagcatatgggcaatctcaaaggctcctcttctacttggttgtgacataagaaacatgaccaaagaaacaatggagattgtcgccaacaaggaagtcattgctattaatcaagatccacatggtgttcaggccaagaaagttagaatggaaggcgatctcgaggtttgggcaggaccattgtcaggttacagagtagctttgcttctattgaaccgtggaccatcgcgaacttcgattactgctctttgggaggatattgagatccctgcaaatagcatcgttgaagccagagatctatgggagcaccagacattgaagcaaaagtttgtggggaacttgacagcaacagtggattctcatgcgtgtaagttgtatgttctcaaacctgttgcctgaaaatacatgtgtatagagagagttagtgtggctacgtcacgttgtattctccagttattctgtaaaaacaataagggttcgtctcaaattaaatctccacagatgttctccaataaattgttcg

SEQ ID NO: 3686 - protein, 410 aa, Arabidopsis thaliana
MSRRAMVIKMPILMILISSMVMTMVESSRSVNNGHDDSEILRRHLLTNGLGVTPPMGWNSWNHFSCNIDEKMIKETANALVTTGLSKLGYNYVNIDDCWAEISRDSKGSLVPKKSTFPSGIKAVADYVHSKGLKLGIYSDAGYFTCSKTMPGSLGYEEHDAKTFAEWGIDYLKYDNCNSDGSKPTVRYPVMTRALMKSGRPIFHSLCEWGDMHPALWGSPVGNSWRTTNDIKDTWLSMISIADMNEVYAEHARPGGWNDPDMLEVGNGGMTKDEYIVHFSIWAISKAPLLLGCDIRNMTKETMEIVANKEVIAINQDPHGVQAKKVRMEGDLEVWAGPLSGYRVALLLLNRGPSRTSITALWEDIEIPANSIVEARDLWEHQTLKQKFVGNLTATVDSHACKLYVLKPVA

SEQ ID NO: 3687 - protein, 405 aa, Arabidopsis thaliana
MVIKMPILMILISSMVMTMVESSRSVNNGHDDSEILRRHLLTNGLGVTPPMGWNSWNHFSCNIDEKMIKETANALVTTGLSKLGYNYVNIDDCWAEISRDSKGSLVPKKSTFPSGIKAVADYVHSKGLKLGIYSDAGYFTCSKTMPGSLGYEEHDAKTFAEWGIDYLKYDNCNSDGSKPTVRYPVMTRALMKSGRPIFHSLCEWGDMHPALWGSPVGNSWRTTNDIKDTWLSMISIADMNEVYAEHARPGGWNDPDMLEVGNGGMTKDEYIVHFSIWAISKAPLLLGCDIRNMTKETMEIVANKEVIAINQDPHGVQAKKVRMEGDLEVWAGPLSGYRVALLLLNRGPSRTSITALWEDIEIPANSIVEARDLWEHQTLKQKFVGNLTATVDSHACKLYVLKPVA

SEQ ID NO: 3688 - protein, 401 aa, Arabidopsis thaliana
MPILMILISSMVMTMVESSRSVNNGHDDSEILRRHLLTNGLGVTPPMGWNSWNHFSCNIDEKMIKETANALVTTGLSKLGYNYVNIDDCWAEISRDSKGSLVPKKSTFPSGIKAVADYVHSKGLKLGIYSDAGYFTCSKTMPGSLGYEEHDAKTFAEWGIDYLKYDNCNSDGSKPTVRYPVMTRALMKSGRPIFHSLCEWGDMHPALWGSPVGNSWRTTNDIKDTWLSMISIADMNEVYAEHARPGGWNDPDMLEVGNGGMTKDEYIVHFSIWAISKAPLLLGCDIRNMTKETMEIVANKEVIAINQDPHGVQAKKVRMEGDLEVWAGPLSGYRVALLLLNRGPSRTSITALWEDIEIPANSIVEARDLWEHQTLKQKFVGNLTATVDSHACKLYVLKPVA

SEQ ID NO: 3689 - DNA, 1305 bp, Arabidopsis thaliana
actcaatccaaactcaacccacaacgctacacattaaaaaataaaaaacctatggcaaccatttccttctctcacaaccaccaatcctccgacaaccgccgtggtggatcccatcaccaccgtcacggccccgtcgtggaagagatcgaaggactcatcaaagttttcaacgacggctgcgtcgaaagacctcccatagttcccatcgtctcaccaaccattcacccatcttctaaagccacagcctttgacatcaaactatccaacgacacatggacacgtgtctacatccccgatgccgcagcagcctcgccgtccgttactctccctctcctcgtttacttccacggcggtggtttctgcgttggctccgccgcttggagttgctaccatgacttcttgaccagccttgccgttaaagcccgttgcgtcatcgtttccgtaaactaccgtttagcccctgaacaccgtctcccggcggcgtacgacgacggcgttaatgtcgtctcgtggctagtcaagcaacaaatatctaccggtggtggatatccttcttggttgagtaaatgtaacctctcaaacgttttcttggccggagatagcgccggagccaacatagcttaccaagtcgccgtaagaatcatggccagtggcaaatacgcaaacactctacacctcaagggcattattctcatccaccctttcttcggcggcgaatcaagaacgtcttcggagaaacaacaacatcacaccaagtcatcggcgcttactctttcagcttccgacgcatattggcgtctagctctgccacgtggagcgagtagagaccatccatggtgtaaccctctgatgagctcggcgggagcgaagttaccgacgacgatggtgttcatggcggagtttgatatactaaaagaacgaaacttggagatgtgtaaagtgatgagaagccatgggaagagagttgaaggtatagttcatggaggtgttggtcacgcttttcatattctcgacaactcgtcggtgtcacgtgatcgaatccacgacatgatgtgtcgtcttcacaacttcatacatccatcataataattccctaaagaccttttttctgaaacctttaattgatttaaaatgttgttcttgaaaaataataagagataaaaacttgaaatgttgtgtttttattgtggattaaagtaagctttgctttgtagtgttttttcagtgaaggtgaatagtataaattatgtaatacaatagatggacttgtacttttaagttaagttatgtatccaatgcttgaat

SEQ ID NO: 3690 - protein, 361 aa, Arabidopsis thaliana
TQSKLNPQRYTLKNKKPMATISFSHNHQSSDNRRGGSHHHRHGPVVEEIEGLIKVFNDGCVERPPIVPIVSPTIHPSSKATAFDIKLSNDTWTRVYIPDAAAASPSVTLPLLVYFHGGGFCVGSAAWSCYHDFLTSLAVKARCVIVSVNYRLAPEHRLPAAYDDGVNVVSWLVKQQISTGGGYPSWLSKCNLSNVFLAGDSAGANIAYQVAVRIMASGKYANTLHLKGIILIHPFFGGESRTSSEKQQHHTKSSALTLSASDAYWRLALPRGASRDHPWCNPLMSSAGAKLPTTMVFMAEFDILKERNLEMCKVMRSHGKRVEGIVHGGVGHAFHILDNSSVSRDRIHDMMCRLHNFIHPS

SEQ ID NO: 3691 - protein, 344 aa, Arabidopsis thaliana
MATISFSHNHQSSDNRRGGSHHHRHGPVVEEIEGLIKVFNDGCVERPPIVPIVSPTIHPSSKATAFDIKLSNDTWTRVYIPDAAAASPSVTLPLLVYFHGGGFCVGSAAWSCYHDFLTSLAVKARCVIVSVNYRLAPEHRLPAAYDDGVNVVSWLVKQQISTGGGYPSWLSKCNLSNVFLAGDSAGANIAYQVAVRIMASGKYANTLHLKGIILIHPFFGGESRTSSEKQQHHTKSSALTLSASDAYWRLALPRGASRDHPWCNPLMSSAGAKLPTTMVFMAEFDILKERNLEMCKVMRSHGKRVEGIVHGGVGHAFHILDNSSVSRDRIHDMMCRLHNFIHPS

SEQ ID NO: 3692 - DNA, 619 bp, Arabidopsis thaliana
aacgaaagctagggttttttctctgtgaaatcgctcgccggcataaaagagagtcagaagaggaagaagagagttacaaggattgaaaatgaagggacgtcaaggagagagagttagattgtatgttcgtggaacagtcctcggttacaagaggtccaagtcgaaccaataccctaacacttctctcgtccagattgaaggtgtgaacactcaagaggaggttaattggtacaagggtaagcgtttggcttacatctacaaggcaaagacaaagaagaacggttctcactaccgttgcatttggggcaaagtcactaggcctcatggtaacagtggtgttgtccgttctaagttcacttcaaacctaccacccaagtcaatgggagctagagtcagagtcttcatgtaccctagcaacatatgaggaggctagatttcaacaagtatcggaaggaatcgccattatcatttctcaggagctgtagttttatctattcacttttattctagactctctgttggttttgattttatcttgagacgaagtaaaacattttttttcttgagatcatatactatcgagtattaatggaacttgagaaaagctatgatcccagtc

SEQ ID NO: 3693 - protein, 111 aa, Arabidopsis thaliana
MKGRQGERVRLYVRGTVLGYKRSKSNQYPNTSLVQIEGVNTQEEVNWYKGKRLAYIYKAKTKKNGSHYRCIWGKVTRPHGNSGVVRSKFTSNLPPKSMGARVRVFMYPSNI

SEQ ID NO: 3694 - DNA, 1565 bp, Arabidopsis thaliana
aatttaattcgatttcgacaatttcatttaattcttcgatttctccgcttgtcactgtttcgtatcgccattttctgtttgcatacacttgtatatatttatattaacagtccaaaattcttcgaaattgtcccgagctttgagcatataaaaaatgtcttcgataatccatggagctggagctgctacgacgacgttatcgacgtttaattccgtcgattccaagaaactcttcgttgctccttctcgcacaaatctttcagtgaggagccagagatatatagtggctggatctgatgcgagtaagaagagctttggttctggacttagagttcgtcactctcagaaattgattccaaatgctgttgcgacgaaggaggcggatacgtctgcgagcactggacatgaactattgcttttcgaggctcttcaggaaggtctggaagaagagatggacagagatccacatgtatgtgttatgggtgaagatgttggccattacggaggttcctacaaggtaaccaaaggccttgctgataaatttggtgacctcagggttctcgacactcctatttgtgaaaatgcattcaccggtatgggcattggagctgccatgactggtctaagacccgttattgaaggtatgaacatgggtttcctcctcctcgccttcaaccaaatctccaacaactgtggaatgcttcactacacatccggtggtcagtttacgatcccggttgtcatccgtggacctggtggagtgggacgccagcttggtgctgagcattcacagaggttagaatcttactttcagtccatccctgggatccagatggttgcttgctcaactccttacaacgccaaagggttgatgaaagccgcaataagaagcgagaaccctgtgattctgttcgaacacgtgctgctttacaatctcaaggagaaaatcccggatgaagattacatctgtaaccttgaagaagctgagatggtcagacctggcgagcacattaccatcctcacttactcgcgaatgaggtaccatgtgatgcaggcagcaaaaactctggtgaacaaagggtatgaccccgaggttatcgacatcaggtcactgaaaccgttcgaccttcacacaattggaaactcggtgaagaaaacacatcgggttttgatcgtggaggagtgtatgagaaccggtgggattggggcaagtcttacagctgccatcaacgagaactttcatgactacttagatgctccggtgatgtgtttatcttctcaagacgttcctacaccttacgctggtacactggaggagtggaccgtggttcaaccggctcagatcgtgaccgctgtcgagcagctttgccagtaaattcatatttatccgatgaaccattatttatcatttacctctccatttcctttctctgtagcttagttcttaaagaatttgtctaagatggtttgtttttgttaaagtttgtctcctttgttgtgtcttttaatatggtttgtaactcagaatgtttgtttgttaattttatctcccactttcttttaag

SEQ ID NO: 3695 - protein, 406 aa, Arabidopsis thaliana
MSSIIHGAGAATTTLSTFNSVDSKKLFVAPSRTNLSVRSQRYIVAGSDASKKSFGSGLRVRHSQKLIPNAVATKEADTSASTGHELLLFEALQEGLEEEMDRDPHVCVMGEDVGHYGGSYKVTKGLADKFGDLRVLDTPICENAFTGMGIGAAMTGLRPVIEGMNMGFLLLAFNQISNNCGMLHYTSGGQFTIPVVIRGPGGVGRQLGAEHSQRLESYFQSIPGIQMVACSTPYNAKGLMKAAIRSENPVILFEHVLLYNLKEKIPDEDYICNLEEAEMVRPGEHITILTYSRMRYHVMQAAKTLVNKGYDPEVIDIRSLKPFDLHTIGNSVKKTHRVLIVEECMRTGGIGASLTAAINENFHDYLDAPVMCLSSQDVPTPYAGTLEEWTVVQPAQIVTAVEQLCQ

SEQ ID NO: 3696 - protein, 307 aa, Arabidopsis thaliana
MDRDPHVCVMGEDVGHYGGSYKVTKGLADKFGDLRVLDTPICENAFTGMGIGAAMTGLRPVIEGMNMGFLLLAFNQISNNCGMLHYTSGGQFTIPVVIRGPGGVGRQLGAEHSQRLESYFQSIPGIQMVACSTPYNAKGLMKAAIRSENPVILFEHVLLYNLKEKIPDEDYICNLEEAEMVRPGEHITILTYSRMRYHVMQAAKTLVNKGYDPEVIDIRSLKPFDLHTIGNSVKKTHRVLIVEECMRTGGIGASLTAAINENFHDYLDAPVMCLSSQDVPTPYAGTLEEWTVVQPAQIVTAVEQLCQ

SEQ ID NO: 3697 - protein, 298 aa, Arabidopsis thaliana
MGEDVGHYGGSYKVTKGLADKFGDLRVLDTPICENAFTGMGIGAAMTGLRPVIEGMNMGFLLLAFNQISNNCGMLHYTSGGQFTIPVVIRGPGGVGRQLGAEHSQRLESYFQSIPGIQMVACSTPYNAKGLMKAAIRSENPVILFEHVLLYNLKEKIPDEDYICNLEEAEMVRPGEHITILTYSRMRYHVMQAAKTLVNKGYDPEVIDIRSLKPFDLHTIGNSVKKTHRVLIVEECMRTGGIGASLTAAINENFHDYLDAPVMCLSSQDVPTPYAGTLEEWTVVQPAQIVTAVEQLCQ

SEQ ID NO: 3698 - DNA, 1328 bp, Arabidopsis thaliana
cttctcgcatcttatatgaaacacattcactctccaaaataatctatacttttcctacatattctcttgacgatcatgagactgatttcgtgaaaatatcgtcattatatcaaattagaagttgatggaaaacatgggggattcgagcatagggccgggccatccgcatctccctcccgggtttcggtttcacccgactgatgaggaactagtagttcattacctcaagaagaaagcagattctgttccacttccagtctcaatcatcgcagagattgatctttacaaatttgatccttgggagcttccaagcaaggcgagttttggagagcacgagtggtacttctttagtcctcgggatcggaagtatccaaatggggttaggccaaaccgggcagcaacttccggttattggaaagcaacgggaaccgataaaccgatatttacgtgcaatagtcacaaggttggtgtcaagaaagcgcttgttttttacggtggaaagcctcctaaagggataaaaacagattggatcatgcatgaatatcgcctcactgatggtaaccttagcactgcggctaagccgcctgacttaaccacgacaaggaaaaactcactacggctagacgattgggttctatgtaggatctataagaagaatagttcacaaagaccaacaatggagagagtattacttagagaggatctaatggaaggcatgctctcaaaatcatctgctaattcttcttctacatcagtactagacaacaacgacaacaataataacaataacgaagaacactttttcgacggtatggtcgtttcttcagacaaacgttccttgtgtggtcaataccgaatgggccacgaggcctcaggatcatcttcattcggatctttcttatcgagcaagaggtttcatcatacaggtgatctcaacaatgataactacaatgtctcttttgtttcgatgcttagtgagattcctcagagttcggggtttcatgcaaatggtgttatggatacgacgtcgtctctagctgatcatggggttttaagacaggcgtttcagcttcctaacatgaactggcactcataatctatatagatatatatgtgtgtatcatatatgtatctatgcaggcctaatatagtttacacataaatcatctgggaatatatatatacaagtacgcggtcttacaaatgtatacgtatctgtttaattacgtcaagaaaaagtgtatacgtttctttttactcaatggctgcaaagatgtgtactaataacagaagctgattaataaaaaatataaaagtatattttttcc

SEQ ID NO: 3699 - protein, 323 aa, Arabidopsis thaliana
MENMGDSSIGPGHPHLPPGFRFHPTDEELVVHYLKKKADSVPLPVSIIAEIDLYKFDPWELPSKASFGEHEWYFFSPRDRKYPNGVRPNRAATSGYWKATGTDKPIFTCNSHKVGVKKALVFYGGKPPKGIKTDWIMHEYRLTDGNLSTAAKPPDLTTTRKNSLRLDDWVLCRIYKKNSSQRPTMERVLLREDLMEGMLSKSSANSSSTSVLDNNDNNNNNNEEHFFDGMVVSSDKRSLCGQYRMGHEASGSSSFGSFLSSKRFHHTGDLNNDNYNVSFVSMLSEIPQSSGFHANGVMDTTSSLADHGVLRQAFQLPNMNWHS

SEQ ID NO: 3700 - protein, 320 aa, Arabidopsis thaliana
MGDSSIGPGHPHLPPGFRFHPTDEELVVHYLKKKADSVPLPVSIIAEIDLYKFDPWELPSKASFGEHEWYFFSPRDRKYPNGVRPNRAATSGYWKATGTDKPIFTCNSHKVGVKKALVFYGGKPPKGIKTDWIMHEYRLTDGNLSTAAKPPDLTTTRKNSLRLDDWVLCRIYKKNSSQRPTMERVLLREDLMEGMLSKSSANSSSTSVLDNNDNNNNNNEEHFFDGMVVSSDKRSLCGQYRMGHEASGSSSFGSFLSSKRFHHTGDLNNDNYNVSFVSMLSEIPQSSGFHANGVMDTTSSLADHGVLRQAFQLPNMNWHS

SEQ ID NO: 3701 - protein, 187 aa, Arabidopsis thaliana
MHEYRLTDGNLSTAAKPPDLTTTRKNSLRLDDWVLCRIYKKNSSQRPTMERVLLREDLMEGMLSKSSANSSSTSVLDNNDNNNNNNEEHFFDGMVVSSDKRSLCGQYRMGHEASGSSSFGSFLSSKRFHHTGDLNNDNYNVSFVSMLSEIPQSSGFHANGVMDTTSSLADHGVLRQAFQLPNMNWHS

SEQ ID NO: 3702 - DNA, 1162 bp, Arabidopsis thaliana
gttgcagtctcttactaccactaaaataagaagacaaaacattaaaattaaaaccaatcatttgttttcttgagtttctgtgaactcaaaaaaaaaatcaaatcctttttgagtttcaatctctgagagtttctatgaaacaatcgtcatggggttgcacaatcttcatccaattatctctatgtctcatcatctatgtgtctctgcattcgggtcacccattcttcttctctagtgacgacggtgacaatgccacacctctagatcttcatttcatctccgttgccggcggtttcaggcctcttaaccaccaaactcgccttctccgattgatggagaaagttgcagaaacttacaaggccaaatttgttgtgagctcaagtgaacaaggagaagaagatccattcctgcaaaatgcgactcgactgtcttcttcactgaaacttccatggtacactagaatgaaaggatctggatatttcagagagcacatcaaaatgccttttggtggatccttggatgttgttttcgtagacactggctcactcaagcaggaagtgcttggtggagcagtgaatgcctatatgatcagtcaattgaaagggttgacaaggattctaaaagcagtagacggagactggcgtattgtggttggatcagacccgttactcgcctatactctaactaaggaaccagaggaacctaagagagtggcaaggacatttcatcaaatcatgaccaaatatggagtgaacttatatataagcgaaaaaggctgcacaaggggaggcagcaacgagagcttgacttgcattacggttcctaatcaacaagagaaccaaggtccaacgaataatagtaagagagaaagggaagatgggtttcttcttcacagagttagcttctcagagtttgttacttatactatcaactcatcaggagaagtcattgacacaaaattagttaagcagaaaggcaaagagaccatctaaggtttcattactccattgctgtgaagcgcacaaacattttgtattcttcgcttaatgaccgaaataccctttgagtggtctgagtctcagttgaatcgtcagagggtaaaactggaaatttgattctataagtttcacccaaaaaaaaggaatgacctttagggttttgc

SEQ ID NO: 3703 - protein, 285 aa, Arabidopsis thaliana
MKQSSWGCTIFIQLSLCLIIYVSLHSGHPFFFSSDDGDNATPLDLHFISVAGGFRPLNHQTRLLRLMEKVAETYKAKFVVSSSEQGEEDPFLQNATRLSSSLKLPWYTRMKGSGYFREHIKMPFGGSLDVVFVDTGSLKQEVLGGAVNAYMISQLKGLTRILKAVDGDWRIVVGSDPLLAYTLTKEPEEPKRVARTFHQIMTKYGVNLYISEKGCTRGGSNESLTCITVPNQQENQGPTNNSKREREDGFLLHRVSFSEFVTYTINSSGEVIDTKLVKQKGKETI

SEQ ID NO: 3704 - protein, 219 aa, Arabidopsis thaliana
MEKVAETYKAKFVVSSSEQGEEDPFLQNATRLSSSLKLPWYTRMKGSGYFREHIKMPFGGSLDVVFVDTGSLKQEVLGGAVNAYMISQLKGLTRILKAVDGDWRIVVGSDPLLAYTLTKEPEEPKRVARTFHQIMTKYGVNLYISEKGCTRGGSNESLTCITVPNQQENQGPTNNSKREREDGFLLHRVSFSEFVTYTINSSGEVIDTKLVKQKGKETI

SEQ ID NO: 3705 - protein, 176 aa, Arabidopsis thaliana
MKGSGYFREHIKMPFGGSLDVVFVDTGSLKQEVLGGAVNAYMISQLKGLTRILKAVDGDWRIVVGSDPLLAYTLTKEPEEPKRVARTFHQIMTKYGVNLYISEKGCTRGGSNESLTCITVPNQQENQGPTNNSKREREDGFLLHRVSFSEFVTYTINSSGEVIDTKLVKQKGKETI

SEQ ID NO: 3706 - DNA, 1131 bp, Arabidopsis thaliana
gaatttctactttggtgctgctcttcttcacatacctagctgctgtatactatacgtgaaccaactccgtattctactttagaggccatgggaaaagcttctcgagacaaaagggatatctattatcgtaaagctaaagaagaaggatggcgtgcaagaagtgcttttaagcttcttcagattgatgaagaatttaatatttttgaaggtgtgaagagggtcgtagatttatgtgctgcacctggtagctggagtcaggtcttgagtcgtcaattatatcttcctgcaaagtcctcagctgagtcaaaagatggggatcttcctcttatagtagccatcgatttgcagcctatggctccaattgaaggtgtcatccaggttcaaggggacataactaatgctcggactgctgaagtggtcattagacactttgacggctgcaaagcggacctggttgtctgtgatggtgctccagatgttactggtttgcatgacatggatgaatttgtccagtcccaactcatactagcaggattaacgattgtaactcatattcttaaagaaggtggaaaatttattgcaaagatattccgtggaaaagatacaagtctcttgtactgtcaactgaaattgtttttcccaaccgtaacttttgcgaaaccgaaaagcagccgcaattcaagtatagaggcttttgcagtctgcgagaattactctccgccagaaggatttaacccgagagatctgcatcgtctcttggagaaagtcggaagcccttcaggtggaagcgatctcgattgcagtagtggttggcttgaaggacccaacaaagtttatataccattcttggcatgtggtgacttaaccggttatgactcagaccggtcttacccactccctagagaagcagatggatcatcataccagagtttggacccgattcaacctccgatcgcaccgccttataaacgagctcttgagctcaagaaagcttcagcacaaagcttcaactcttgaagaaggtgataccaaaaaagaaaaaggaacaaacttttcattggattctgtagcctgtcgtaatgatatattcagggacctacaatttctataacgcttaatgtttttgttatg

SEQ ID NO: 3707 - protein, 309 aa, Arabidopsis thaliana
MGKASRDKRDIYYRKAKEEGWRARSAFKLLQIDEEFNIFEGVKRVVDLCAAPGSWSQVLSRQLYLPAKSSAESKDGDLPLIVAIDLQPMAPIEGVIQVQGDITNARTAEVVIRHFDGCKADLVVCDGAPDVTGLHDMDEFVQSQLILAGLTIVTHILKEGGKFIAKIFRGKDTSLLYCQLKLFFPTVTFAKPKSSRNSSIEAFAVCENYSPPEGFNPRDLHRLLEKVGSPSGGSDLDCSSGWLEGPNKVYIPFLACGDLTGYDSDRSYPLPREADGSSYQSLDPIQPPIAPPYKRALELKKASAQSFNS

SEQ ID NO: 3708 - protein, 221 aa, Arabidopsis thaliana
MAPIEGVIQVQGDITNARTAEVVIRHFDGCKADLVVCDGAPDVTGLHDMDEFVQSQLILAGLTIVTHILKEGGKFIAKIFRGKDTSLLYCQLKLFFPTVTFAKPKSSRNSSIEAFAVCENYSPPEGFNPRDLHRLLEKVGSPSGGSDLDCSSGWLEGPNKVYIPFLACGDLTGYDSDRSYPLPREADGSSYQSLDPIQPPIAPPYKRALELKKASAQSFNS

SEQ ID NO: 3709 - protein, 173 aa, Arabidopsis thaliana
MDEFVQSQLILAGLTIVTHILKEGGKFIAKIFRGKDTSLLYCQLKLFFPTVTFAKPKSSRNSSIEAFAVCENYSPPEGFNPRDLHRLLEKVGSPSGGSDLDCSSGWLEGPNKVYIPFLACGDLTGYDSDRSYPLPREADGSSYQSLDPIQPPIAPPYKRALELKKASAQSFNS

SEQ ID NO: 3710 - DNA, 1321 bp, Arabidopsis thaliana
aggtcccacttttttcttttatttttcactcttcttcacatcaaatccgcgaccagagatttttctttcctttgatttttcgtttcgtttcgtttcaaatattgttcctcctgtgtgaaggaaaaacaatcttccatttcaatccgcgtcaacgcgattttcttcatgacgatgacaacagttaaagtgagcaatgtttctctaggagcaaccgatagagatctcaaggagttcttttccttttctggcgatattctgtaccttgagacgcagagcgagactgagcggactaaactggcatatgtcacttttaaggatctacaaggagctgaaactgcggttcttctctcgggagcaacgattgttgattcttcagtcattgtctctatggctcctgattaccaactgtcccctgaggctttagcttccttggaacccaaggacagcaataaatctcccaaggcaggtgactccgtgttgagaaaagccgaagatgttgtgagcagcatgcttgcaaagggctttatcctgggaaaagatgccatagctaaagccaaaagtgttgacgagaagcaccagctaacatctacagcatcagccaaagtcgcatcttttgacaagaaaattggtttcactgataagatcaacacaggcacggtggtagtgggagaaaaggtcagggaagttgatcagaagtaccaagtctcagagaaaaccaaatcagcaatcgctgcagcggagcagacagtgagcaatgcaggttcagctataatgaagaaccggtatgttctcacaggtgccacgtgggttactggagcattcaacaaagttgctaaagctgcagaagaagttggacaaaaggctaaagagaaagttggtatggctgaggaagaggataagaggaaagtggttgatgagtttgctagagttcacttgtctgaatcaccaaaggcagcttcatcaacgcaagaagccgaacgtgaatcaaaactctctgaatctcctgaagcaaagaaagattctgaacatcttgagccacaatcgaaaccattgcagcaacaatctcctccacctatggcttcagctcctgctccggctcaaccttgagatatgcaatcaaagacctttctgattcttgttgtaaacggtaaaacttggaactaatctctctcagattgttgaagatgaagattgaacttgttatttaggacgaagacttgtgttcttgtaacattggattcatggtcgatttggtaattagaccttaaaaagaaaacaattttgttcttttcgtttttcttaaacttatttaaaccgggct

SEQ ID NO: 3711 - protein, 313 aa, Arabidopsis thaliana
MTMTTVKVSNVSLGATDRDLKEFFSFSGDILYLETQSETERTKLAYVTFKDLQGAETAVLLSGATIVDSSVIVSMAPDYQLSPEALASLEPKDSNKSPKAGDSVLRKAEDVVSSMLAKGFILGKDAIAKAKSVDEKHQLTSTASAKVASFDKKIGFTDKINTGTVVVGEKVREVDQKYQVSEKTKSAIAAAEQTVSNAGSAIMKNRYVLTGATWVTGAFNKVAKAAEEVGQKAKEKVGMAEEEDKRKVVDEFARVHLSESPKAASSTQEAERESKLSESPEAKKDSEHLEPQSKPLQQQSPPPMASAPAPAQP

SEQ ID NO: 3712 - protein, 311 aa, Arabidopsis thaliana
MTTVKVSNVSLGATDRDLKEFFSFSGDILYLETQSETERTKLAYVTFKDLQGAETAVLLSGATIVDSSVIVSMAPDYQLSPEALASLEPKDSNKSPKAGDSVLRKAEDVVSSMLAKGFILGKDAIAKAKSVDEKHQLTSTASAKVASFDKKIGFTDKINTGTVVVGEKVREVDQKYQVSEKTKSAIAAAEQTVSNAGSAIMKNRYVLTGATWVTGAFNKVAKAAEEVGQKAKEKVGMAEEEDKRKVVDEFARVHLSESPKAASSTQEAERESKLSESPEAKKDSEHLEPQSKPLQQQSPPPMASAPAPAQP

SEQ ID NO: 3713 - protein, 239 aa, Arabidopsis thaliana
MAPDYQLSPEALASLEPKDSNKSPKAGDSVLRKAEDVVSSMLAKGFILGKDAIAKAKSVDEKHQLTSTASAKVASFDKKIGFTDKINTGTVVVGEKVREVDQKYQVSEKTKSAIAAAEQTVSNAGSAIMKNRYVLTGATWVTGAFNKVAKAAEEVGQKAKEKVGMAEEEDKRKVVDEFARVHLSESPKAASSTQEAERESKLSESPEAKKDSEHLEPQSKPLQQQSPPPMASAPAPAQP

SEQ ID NO: 3714 - DNA, 1493 bp, Arabidopsis thaliana
gacccacgcgtccgtacaggcgtgctctctctcctctctccatctatctccctctcttcgccggagatcgcccttcaccaattccactatagtagcaaaaacaagtgaagcacaatggggatcatcgaaaggattaaagaaatcgaggccgagatggctcggactcagaagaataaagctacagagtatcatcttggtcagctcaaggcaaagattgcaaaactcaggacacaactgttggagcctccaaaaggtgctagtggaggcggggaaggttttgaagttaccaagtatggtcatggacgtgttgcacttataggatttcctagtgtcggaaagtccacgcttttgactatgttaactggaacacattctgaagcagcctcatatgaatttacaacacttacatgcatccctggtgtaattcactacaacgacacaaagattcagcttctcgatcttcctgggattattgaaggtgcttcggaaggaaaggggcgaggaaggcaggttattgctgttgcaaagtcttccgaccttgtattgatggttcttgatgcctcaaaaagcgaaggccacaggcaaatattgactaaggaacttgaggcagtgggcttgcgactaaacaaaactcctccgcagatatactttaaaaagaaaaagactggtggaatctctttcaacactacagcacccttgactcacattgatgagaagctctgttatcaaatcctgcatgaatacaagattcacaatgctgaggtgctatttcgtgagaatgccacagtggatgactttattgatgtcattgaaggcaaccgcaagtatattaagtgtgtttatgtctacatcaaaatagatgttgttggaattgatgatgtggatagactatcccggcagccaaattccattgttattagctgcaatcttaagcttaacttagacagactacttgctaggatgtgggacgaaatgggccttgtgagagtttactcgaagccgcaaggccagcaaccagatttcgatgagccttttgtcctctcatctgatcgaggtggctgcacagtggaagacttctgtaaccacgtccacaggactctggtgaaggatatgaagtatgcactcgtttggggcacaagcacaaggcacaatccacagaattgtggtctttctcaacatcttgaagacgaagatgttgttcagatcgtcaagaaaaaggagagagacgaaggaggaagaggccggttcaagtcacactcaaacgcccctgctagaattgcagacagagagaaaaaagctcctcttaagcaataagcttttagctgataagtcatctccatacatccatctccaccatcatagtcgtggatggtttcacctgagtaagatttactatgttgtatctgaatccgttttgttgttttctctcacaatataagttttggaacaattttacttttttgagatacaaatggaagtacgagttcctattt

SEQ ID NO: 3715 - protein, 399 aa, Arabidopsis thaliana
MGIIERIKEIEAEMARTQKNKATEYHLGQLKAKIAKLRTQLLEPPKGASGGGEGFEVTKYGHGRVALIGFPSVGKSTLLTMLTGTHSEAASYEFTTLTCIPGVIHYNDTKIQLLDLPGIIEGASEGKGRGRQVIAVAKSSDLVLMVLDASKSEGHRQILTKELEAVGLRLNKTPPQIYFKKKKTGGISFNTTAPLTHIDEKLCYQILHEYKIHNAEVLFRENATVDDFIDVIEGNRKYIKCVYVYIKIDVVGIDDVDRLSRQPNSIVISCNLKLNLDRLLARMWDEMGLVRVYSKPQGQQPDFDEPFVLSSDRGGCTVEDFCNHVHRTLVKDMKYALVWGTSTRHNPQNCGLSQHLEDEDVVQIVKKKERDEGGRGRFKSHSNAPARIADREKKAPLKQ

SEQ ID NO: 3716 - protein, 386 aa, Arabidopsis thaliana
MARTQKNKATEYHLGQLKAKIAKLRTQLLEPPKGASGGGEGFEVTKYGHGRVALIGFPSVGKSTLLTMLTGTHSEAASYEFTTLTCIPGVIHYNDTKIQLLDLPGIIEGASEGKGRGRQVIAVAKSSDLVLMVLDASKSEGHRQILTKELEAVGLRLNKTPPQIYFKKKKTGGISFNTTAPLTHIDEKLCYQILHEYKIHNAEVLFRENATVDDFIDVIEGNRKYIKCVYVYIKIDVVGIDDVDRLSRQPNSIVISCNLKLNLDRLLARMWDEMGLVRVYSKPQGQQPDFDEPFVLSSDRGGCTVEDFCNHVHRTLVKDMKYALVWGTSTRHNPQNCGLSQHLEDEDVVQIVKKKERDEGGRGRFKSHSNAPARIADREKKAPLKQ

SEQ ID NO: 3717 - protein, 319 aa, Arabidopsis thaliana
MLTGTHSEAASYEFTTLTCIPGVIHYNDTKIQLLDLPGIIEGASEGKGRGRQVIAVAKSSDLVLMVLDASKSEGHRQILTKELEAVGLRLNKTPPQIYFKKKKTGGISFNTTAPLTHIDEKLCYQILHEYKIHNAEVLFRENATVDDFIDVIEGNRKYIKCVYVYIKIDVVGIDDVDRLSRQPNSIVISCNLKLNLDRLLARMWDEMGLVRVYSKPQGQQPDFDEPFVLSSDRGGCTVEDFCNHVHRTLVKDMKYALVWGTSTRHNPQNCGLSQHLEDEDVVQIVKKKERDEGGRGRFKSHSNAPARIADREKKAPLKQ

SEQ ID NO: 3718 - DNA, 1755 bp, Arabidopsis thaliana
ctctctctctatcatcatcatcatcactttctctatctatctctcttcttaaagcggccattggtgctctccaagttccatctcaagcttttcttcttgttttgttgttctcttaattgaaaaacaagatcttgaactaaaaaatggaaactgaagacgatttgtgcaacaccaattggggaagctcttcttcgaaatcgcgagagccgggttcatcagactgtgggaattcgacattcgcaggttttacgtcccagcagaagtgggaagatgcttcaatcttggattatgagatgggtgtggagcctggattgcaagagagcattcaagcaaatgttgatttcttacaaggtgttagggctcaagcgtgggatccaaggacgatgttgagtaacctttcttttatggagcagaagattcaccagctgaggatcttgttcatcttcttgttggtcgtggtgggcagcttcaaggtcgtcaagacgagctcgcggctcagcagcagcagcttataacgacggatcttacttccattatcatacagcttatttcaactgcaggtagtcttcttccatctgttaagcataatatgtcaacagctccgggtccattcactgggcagcccggttcagccgtgttcccttatgtaagggaggctaataacgttgcttcacagagtcagaacaataacaactgtggtgctcgagagttcgatttgcctaagccggttcttgttgatgagagggaaggtcatgttgtggaggaacatgagatgaaagatgaagatgatgtggaagaaggagagaaccttcctcccggttcgtatgagatattgcagcttgagaaagaagagattctcgcaccgcatactcacttctgcacgatatgtggcaagggtttcaagagagacgcgaatttgaggatgcatatgagagggcatggagatgagtacaaaacagcagctgctctggcgaaaccgaacaaagaatccgtacccgggtctgagccgatgctgatcaagaggtactcgtgcccattccttggttgcaaacgtaacaaggagcacaaaaagttccagcctttgaaaacgattctatgcgtgaagaatcactataaacgcacccactgcgataaaagcttcacttgcagccggtgccataccaagaaattctctgtcattgcagatcttaaaacccacgagaagcactgcgggaaaaacaagtggctttgttcctgtggtacaacattttcaaggaaagacaagttgtttggtcacatagctctgttccagggacacacgcctgcaatccctcttgaagagacaaaaccatcagccagtacatctactcagagagggagctctgaaggcgggaacaacaaccaaggaatggttggcttcaatcttggttctgcatcaaatgctaaccaagaaaccacacagcctggaatgactgatgggaggatatgttttgaggagtcgttctcaccaatgaactttgatacatgtaattttggagggttccacgagtttccgcgactgatgtttgatgattcagagagttcttttcaaatgcttattgcgaatgcctgtggtttctcgcccaggaatgttggtgagtctgtttcagatactagtctctaaggcattgccatatatatgataagttatgtaagatgttctagtttttagccttttaagcagttcttttgtgtctgtaattttgttttcgccataataataatatcagaatagcg

SEQ ID NO: 3719 - protein, 350 aa, Arabidopsis thaliana
MSTAPGPFTGQPGSAVFPYVREANNVASQSQNNNNCGAREFDLPKPVLVDEREGHVVEEHEMKDEDDVEEGENLPPGSYEILQLEKEEILAPHTHFCTICGKGFKRDANLRMHMRGHGDEYKTAAALAKPNKESVPGSEPMLIKRYSCPFLGCKRNKEHKKFQPLKTILCVKNHYKRTHCDKSFTCSRCHTKKFSVIADLKTHEKHCGKNKWLCSCGTTFSRKDKLFGHIALFQGHTPAIPLEETKPSASTSTQRGSSEGGNNNQGMVGFNLGSASNANQETTQPGMTDGRICFEESFSPMNFDTCNFGGFHEFPRLMFDDSESSFQMLIANACGFSPRNVGESVSDTSL

SEQ ID NO: 3720 - protein, 289 aa, Arabidopsis thaliana
MKDEDDVEEGENLPPGSYEILQLEKEEILAPHTHFCTICGKGFKRDANLRMHMRGHGDEYKTAAALAKPNKESVPGSEPMLIKRYSCPFLGCKRNKEHKKFQPLKTILCVKNHYKRTHCDKSFTCSRCHTKKFSVIADLKTHEKHCGKNKWLCSCGTTFSRKDKLFGHIALFQGHTPAIPLEETKPSASTSTQRGSSEGGNNNQGMVGFNLGSASNANQETTQPGMTDGRICFEESFSPMNFDTCNFGGFHEFPRLMFDDSESSFQMLIANACGFSPRNVGESVSDTSL

SEQ ID NO: 3721 - protein, 239 aa, Arabidopsis thaliana
MHMRGHGDEYKTAAALAKPNKESVPGSEPMLIKRYSCPFLGCKRNKEHKKFQPLKTILCVKNHYKRTHCDKSFTCSRCHTKKFSVIADLKTHEKHCGKNKWLCSCGTTFSRKDKLFGHIALFQGHTPAIPLEETKPSASTSTQRGSSEGGNNNQGMVGFNLGSASNANQETTQPGMTDGRICFEESFSPMNFDTCNFGGFHEFPRLMFDDSESSFQMLIANACGFSPRNVGESVSDTSL

SEQ ID NO: 3722 - DNA, 1311 bp, Arabidopsis thaliana
aaataatttagaaagaaggtggattggttatggaagaatgtgcaaggagagtaatttgagatatacaacttgggcagaagaatcagatgatcgacaacaattgtttatataaagaagagctgaatcgcaattcttactcaggtctggccaaggaggcttctgagtcgattttgctccctagtgaatccggatttgacggttctcggagtccggtttgctcctcgccggatccgaacctcaactacagacctgtcatcggtatcctgagtcaccctggagatggtgcgtctggtcggttgaccaatgatacgagctcgacgtacatcgctgcttcgtatgtgaagttcgctgaggcaggtggtgctcgtgttatcccactcatctacaacgaacctgaagaagtgctcttccagaagctagagttggtcaacggtgtgatattcactggtggttgggctaaaaaatatgattatttcgagatcgtcaaaaaaatcttcactaaagcttggagagaaatgatgctggagagcatttcccagtatatggcatttgcctcggattcgagcttatgtcaattatcataagtcagaacagagacattcttgaaagatttgatgcagaggataatgcatcaagtctccagtttgttgataatgttaataacgatggaacattattccaaagatttccgccagagttgttgaaaaaactcagtacagattgtttggttatgcagaaacacaagtatggtatcacaccagcaaactttcaagccaatcctgctttgtctagtttctttgaaattctcacaacctgcattgatgaaaacagcaagacttatgtttcaactgttaaagcaaagagatacccaataactggcttccagtggcatcctgagaaaaatgcatttgaatggggatcatctgcgattccacactctgaggatgcaatccaggtgacacagcatgctgctagttatttagtcagtgaagctaggaagtcactgaacagaccagagtctcagaaagtgctgagcaatctcatttacaactataagcctacttactgtggatacgcagggaggggttacgacgaggtttacatttttacacaaccaagatcccgtttctaagaactttactcgtcgtcttgtgtgtttgtttggaactcttatttacatttagggagccggattgtcttgcatgatttcccttgttgattttatctctttggaattacatttcaaaagatacaaactgtgtttgattcgtctttctagcaaataacatttgacttttgagattgattatc

SEQ ID NO: 3723 - protein, 187 aa, Arabidopsis thaliana
MSIIISQNRDILERFDAEDNASSLQFVDNVNNDGTLFQRFPPELLKKLSTDCLVMQKHKYGITPANFQANPALSSFFEILTTCIDENSKTYVSTVKAKRYPITGFQWHPEKNAFEWGSSAIPHSEDAIQVTQHAASYLVSEARKSLNRPESQKVLSNLIYNYKPTYCGYAGRGYDEVYIFTQPRSRF

SEQ ID NO: 3724 - protein, 165 aa, Arabidopsis thaliana
MIDNNCLYKEELNRNSYSGLAKEASESILLPSESGFDGSRSPVCSSPDPNLNYRPVIGILSHPGDGASGRLTNDTSSTYIAASYVKFAEAGGARVIPLIYNEPEEVLFQKLELVNGVIFTGGWAKKYDYFEIVKKIFTKAWREMMLESISQYMAFASDSSLCQLS

SEQ ID NO: 3725 - protein, 133 aa, Arabidopsis thaliana
MQKHKYGITPANFQANPALSSFFEILTTCIDENSKTYVSTVKAKRYPITGFQWHPEKNAFEWGSSAIPHSEDAIQVTQHAASYLVSEARKSLNRPESQKVLSNLIYNYKPTYCGYAGRGYDEVYIFTQPRSRF

SEQ ID NO: 3726 - DNA, 1223 bp, Arabidopsis thaliana
aatctttaaagcaagtcttcgctcttcaatttatattttaccaaatcatcttctctctttctctatctctcaaaacaaaaagtaaccatgatcaagacaaagacgacgtcccttctctgtttccttctcacagccgttatactaatgaacccatcttcctcctcccccactgacaattacatatacgccgtttgttctccggctaaattctcccctagctccggctacgagacaaatcttaactccctcctctcttccttcgtcacctcaaccgcccaaacccgctacgccaacttcacagttcccaccgggaaaccggaaccaaccgttaccgtatacggtatttaccagtgccgcggcgacctagacccaaccgcctgctcgacgtgcgtatcaagcgccgtcgcacaggtcggagccttatgttcaaactcgtactccgggttcttgcagatggaaaattgtctgatccgttacgacaacaaatcgttccttggggttcaagacaaaacgttgatcctcaacaaatgtggacagccgatggaattcaacgaccaggatgcgttgaccaaagctagtgacgtcatcggttctttaggtaccggagatggatcttacaggacaggtggcaacgggaatgttcagggtgtggctcagtgctccggtgatctaagtacatcacagtgccaagattgcttgtctgatgcaatcggacggctcaaatctgattgtggaatggctcagggaggatatgtttacttgtcgaaatgttacgcgcgtttcagtgttggtggtagtcacgcgcgtcagaccccaggcccaaactttggtcatgaaggagagaagggcaataaggatgataatggagtgggaaaaacattggcgataataataggaatcgtcaccttaatcatcttgctcgttgtgtttctcgcttttgttggaaagtgttgtagaaaattacaagatgagaaatggtgtaaatgaaaggacaaagtgggaaagatatcaatcaacaactcgagtcgagccacactgttagttgtatttttgtaattttttttgttctccctcataagatgtacgtagttatagtatattgataatttgatatagtattgatatgattgtatctccgaatcgatttttgtataattgtcggacttatataggccaaagcgatatcttcttctttgatgtgaatgaaaccttcgatttcttac

SEQ ID NO: 3727 - protein, 299 aa, Arabidopsis thaliana
MIKTKTTSLLCFLLTAVILMNPSSSSPTDNYIYAVCSPAKFSPSSGYETNLNSLLSSFVTSTAQTRYANFTVPTGKPEPTVTVYGIYQCRGDLDPTACSTCVSSAVAQVGALCSNSYSGFLQMENCLIRYDNKSFLGVQDKTLILNKCGQPMEFNDQDALTKASDVIGSLGTGDGSYRTGGNGNVQGVAQCSGDLSTSQCQDCLSDAIGRLKSDCGMAQGGYVYLSKCYARFSVGGSHARQTPGPNFGHEGEKGNKDDNGVGKTLAIIIGIVTLIILLVVFLAFVGKCCRKLQDEKWCK

SEQ ID NO: 3728 - protein, 280 aa, Arabidopsis thaliana
MNPSSSSPTDNYIYAVCSPAKFSPSSGYETNLNSLLSSFVTSTAQTRYANFTVPTGKPEPTVTVYGIYQCRGDLDPTACSTCVSSAVAQVGALCSNSYSGFLQMENCLIRYDNKSFLGVQDKTLILNKCGQPMEFNDQDALTKASDVIGSLGTGDGSYRTGGNGNVQGVAQCSGDLSTSQCQDCLSDAIGRLKSDCGMAQGGYVYLSKCYARFSVGGSHARQTPGPNFGHEGEKGNKDDNGVGKTLAIIIGIVTLIILLVVFLAFVGKCCRKLQDEKWCK

SEQ ID NO: 3729 - protein, 177 aa, Arabidopsis thaliana
MENCLIRYDNKSFLGVQDKTLILNKCGQPMEFNDQDALTKASDVIGSLGTGDGSYRTGGNGNVQGVAQCSGDLSTSQCQDCLSDAIGRLKSDCGMAQGGYVYLSKCYARFSVGGSHARQTPGPNFGHEGEKGNKDDNGVGKTLAIIIGIVTLIILLVVFLAFVGKCCRKLQDEKWCK

SEQ ID NO: 3730 - DNA, 1248 bp, Arabidopsis thaliana
atccaaaattaattaaaacgaggagaagaagaaaaaaagaaagacaaaactttgttaataaaccgacccagaatcgtggtcttcataatctgtctttaccattttcgttggatttcttcagacagtaatcagaatcatttactttcgtatacagattcattttcttcaaaacgttttatttgttaaggaaaaaagtacaaaactttcgacttttgttttccgggttttgtcaataatggattccgattcatggagtgatcgtctcgcttcagctacgaggagataccagctagcttttccatcacgatctgatacattcttagggtttgaagagatagatggagaagaagagttcagggaagagtttgcttgccctttctgttctgactattttgatattgtctctctctgctgccacatagatgaagatcatcctatggaagccaaaaatggggtatgtccagtttgtgcggttagggtgggtgttgacatggttgctcatataacccttcagcacgctaatattttcaagatgcaccgcaagagaaaaccaagaagaggcgggtcatattccacattatcgatcttaaggagagagtttcctgatggaaactttcagagcctctttggaggatcttcgtgtatagtatcgtcttcctcatcatccaatgtagctgctgacccattgttatcgtcgttcatttctcctattgctgatgggttcttcaccacggagtcatgcatatctgcagaaacgggtcctgtcaagaaaacaactattcagtgtttacccgaacagaatgcgaaaaaaacttctctttcagctgaggatcacaagcagaagttgaaacgcagtgagtttgttcgagagctattgagctctacgattcttgatgacagcttataatggagtatcgcttctggtaacttgtcagcaatgaggaaactccatgttctgtctcagcaggacaaagtacgaaattattgtttgtggggagcaaataaaggagagagattatgaatgagtgtaacctaagaacacattagcttctgcggttaacgccccaattgcttgtaggtcatgagaaaaaaaacaaaaatgtatgtatttcacgtattcgcgttcaattattcgtttccagttgtttactaggataagaatgaccatatatgttgaaaatttgtcatggaaacggcttcagattttgtagaggcacattcttctgcaatcagatttatagctttatt

SEQ ID NO: 3731 - protein, 223 aa, Arabidopsis thaliana
MDSDSWSDRLASATRRYQLAFPSRSDTFLGFEEIDGEEEFREEFACPFCSDYFDIVSLCCHIDEDHPMEAKNGVCPVCAVRVGVDMVAHITLQHANIFKMHRKRKPRRGGSYSTLSILRREFPDGNFQSLFGGSSCIVSSSSSSNVAADPLLSSFISPIADGFFTTESCISAETGPVKKTTIQCLPEQNAKKTSLSAEDHKQKLKRSEFVRELLSSTILDDSL

SEQ ID NO: 3732 - protein, 156 aa, Arabidopsis thaliana
MEAKNGVCPVCAVRVGVDMVAHITLQHANIFKMHRKRKPRRGGSYSTLSILRREFPDGNFQSLFGGSSCIVSSSSSSNVAADPLLSSFISPIADGFFTTESCISAETGPVKKTTIQCLPEQNAKKTSLSAEDHKQKLKRSEFVRELLSSTILDDSL

SEQ ID NO: 3733 - protein, 138 aa, Arabidopsis thaliana
MVAHITLQHANIFKMHRKRKPRRGGSYSTLSILRREFPDGNFQSLFGGSSCIVSSSSSSNVAADPLLSSFISPIADGFFTTESCISAETGPVKKTTIQCLPEQNAKKTSLSAEDHKQKLKRSEFVRELLSSTILDDSL

SEQ ID NO: 3734 - DNA, 1537 bp, Arabidopsis thaliana
ggccacgttttttttttttttgaaagtcgaaatcaaatcacattaccccaaatctctcttctttgaactttaatcctcttctctattgcatgctttaagctccaaacccaaaacgcaggaaaatctctttgacagtttttggttttagatgggaccaatcaaaacgataaagaagaagaagagagcagagaagaaggttgatcggaacgtattgcttgctgctactgctgctgctacttccgcatccgccgccgctgctcttaataacaacgacgacgacgacgactcatcatctcagtctttggattggtgggatggattctctcgccgtatttatggagggtcaacggatccaaagacatttgagtcagttttcaaaatatcaaggaagacatttgactacatttgctctcttgtgaaagccgatttcacagcaaagcctgcaaatttcagcgactcaaatgggaaccctttatctctcaatgaccgtgtagctgtggcgcttaggaggcttggctctggtgaatctctctctgtcattggagagacctttgggatgaaccagtcaacagtctcccaaatcacttggcgctttgttgaatcaatggaagagagagcaatacaccatctctcatggccttcgaaactcgatgaaataaaatcaaagtttgagaaaatctcaggtcttcctaactgctgtggcgctatcgacattacacatattgttatgaaccttcctgctgtggaaccgtcaaacaaagtttggttggacggagaaaagaacttcagcatgactttgcaggccgtagtagacccggacatgagattcctcgatgtaatagctggttggcctgggagtttaaatgatgatgttgtcctcaagaactcaggattctacaaactagttgagaaagggaagagactgaacggggaaaagttaccgctctcagaaagaaccgagctaagagaatacatagtaggtgattcaggttttcctcttcttccatggcttctcactccataccaaggcaaacccacgtcgcttcctcaaaccgagttcaacaaaagacactccgaggcaacaaaagccgcgcagatggcactatcgaagcttaaagacaggtggaggataataaacggggtaatgtggatgcctgatagaaaccggttaccaaggataatctttgtctgttgcttgctgcacaacattattatcgatatggaggatcaaactttggatgaccaacctttgtctcagcaacatgacatgaactacagacaacgaagctgcaagcttgccgatgaggcttcatcggtcttgagagatgaactctctgaccaactgtgtggaaaaaattcatcagcttgattactctctcccggttcttgtggtctttctatgaaagcttcatttgcttctttttccttctggtaattttgtttagcataacattttatcgtttgatttgatctattgacatattcttttatgggacaaacaaaaatgtgtatcttatgaatgttatttttaatttat

SEQ ID NO: 3735 - protein, 406 aa, Arabidopsis thaliana
MGPIKTIKKKKRAEKKVDRNVLLAATAAATSASAAAALNNNDDDDDSSSQSLDWWDGFSRRIYGGSTDPKTFESVFKISRKTFDYICSLVKADFTAKPANFSDSNGNPLSLNDRVAVALRRLGSGESLSVIGETFGMNQSTVSQITWRFVESMEERAIHHLSWPSKLDEIKSKFEKISGLPNCCGAIDITHIVMNLPAVEPSNKVWLDGEKNFSMTLQAVVDPDMRFLDVIAGWPGSLNDDVVLKNSGFYKLVEKGKRLNGEKLPLSERTELREYIVGDSGFPLLPWLLTPYQGKPTSLPQTEFNKRHSEATKAAQMALSKLKDRWRIINGVMWMPDRNRLPRIIFVCCLLHNIIIDMEDQTLDDQPLSQQHDMNYRQRSCKLADEASSVLRDELSDQLCGKNSSA

SEQ ID NO: 3736 - protein, 270 aa, Arabidopsis thaliana
MNQSTVSQITWRFVESMEERAIHHLSWPSKLDEIKSKFEKISGLPNCCGAIDITHIVMNLPAVEPSNKVWLDGEKNFSMTLQAVVDPDMRFLDVIAGWPGSLNDDVVLKNSGFYKLVEKGKRLNGEKLPLSERTELREYIVGDSGFPLLPWLLTPYQGKPTSLPQTEFNKRHSEATKAAQMALSKLKDRWRIINGVMWMPDRNRLPRIIFVCCLLHNIIIDMEDQTLDDQPLSQQHDMNYRQRSCKLADEASSVLRDELSDQLCGKNSSA

SEQ ID NO: 3737 - protein, 254 aa, Arabidopsis thaliana
MEERAIHHLSWPSKLDEIKSKFEKISGLPNCCGAIDITHIVMNLPAVEPSNKVWLDGEKNFSMTLQAVVDPDMRFLDVIAGWPGSLNDDVVLKNSGFYKLVEKGKRLNGEKLPLSERTELREYIVGDSGFPLLPWLLTPYQGKPTSLPQTEFNKRHSEATKAAQMALSKLKDRWRIINGVMWMPDRNRLPRIIFVCCLLHNIIIDMEDQTLDDQPLSQQHDMNYRQRSCKLADEASSVLRDELSDQLCGKNSSA

SEQ ID NO: 3738 - DNA, 1429 bp, Arabidopsis thaliana
tctgagattcttaaattcaattctctgagattttgccctcttcataataatggagtctacgcctccttatcaccgatccaacactaaatcagcttcgcgtctccaagattcctcgaatcctccaaatctctctcttgatttggttctgtcgtctcccaatactccaaacccatcatcacatgttcctcttcgcgatatcctcctcttacctccttctccacttcgaaaatcgaggacccgtttatccgatcgactcgaaatgacttctgaagatgctatggcggtggttcggaaacggggcaaagggaaaggagggcaaaagagtcttttagcatctccgaggaatccccggagatcgaggcgaagatctgaagctgtggaagagaaagaagctaatttggttatcgaagaaatcgtaaagcttcctcctagaaagcggaagactaatggtcgacctaagaaggataagcatagttcagctcctcctctttgttcttcctcagatcttccaaatacatgtcagagtgatttgaatcggattggagagattataagtgatttggtaatgtggagagatgttgcgaaatcgactctctggtttggttttggatgtttgtctttcctatcttcttgctttgccaaaggagtcaactttagcgttttctcggcggtttccaatctcggacttgtgttactttgcgggtccttcttgtcaaacactctttgtcaaaggaaaaatgaagacacaaagagagcgttccatgtgagtgaagatgatgtcttgcgcttagctagacgagtgcttcctgcaaccaactttttgatctcgaagactagtgagattttttcaggagaaccatcaatgacactcaaagtgacaccatttctgctacttggagctgagtatggtcatctcataacactgtggaggctatctgcatttggtttcttcctcagtttcaccatcccaaagctgtattcatgttacacgtatcagattagccaaaaagttgaaagagtgaaaacgagaataggtgaagcatggggagtctgctcacacaagaagatcttggctggctctgcggtgacagcgttttggaacttgacgagcataagaacccgaatatttgcagtttttatcatcctggtgatatttcggtataggagacaaaatctacagctaactcccgaggaagttgagcctgttgagaatgagcaagaagaagaaacactcccgcaggaagaagaaacagttccacaagaagaagaacagacacagccatcagaagagcgagctttagtggtggtggttgcagaaacttaaggatcaaagaaactgtagtgtttgtcctttgtgtcaatccacattcaacagagatgtaattctatatctcgaaaggatctttttttttaatatgaaaaattagtg

SEQ ID NO: 3739 - protein, 424 aa, Arabidopsis thaliana
MESTPPYHRSNTKSASRLQDSSNPPNLSLDLVLSSPNTPNPSSHVPLRDILLLPPSPLRKSRTRLSDRLEMTSEDAMAVVRKRGKGKGGQKSLLASPRNPRRSRRRSEAVEEKEANLVIEEIVKLPPRKRKTNGRPKKDKHSSAPPLCSSSDLPNTCQSDLNRIGEIISDLVMWRDVAKSTLWFGFGCLSFLSSCFAKGVNFSVFSAVSNLGLVLLCGSFLSNTLCQRKNEDTKRAFHVSEDDVLRLARRVLPATNFLISKTSEIFSGEPSMTLKVTPFLLLGAEYGHLITLWRLSAFGFFLSFTIPKLYSCYTYQISQKVERVKTRIGEAWGVCSHKKILAGSAVTAFWNLTSIRTRIFAVFIILVIFRYRRQNLQLTPEEVEPVENEQEEETLPQEEETVPQEEEQTQPSEERALVVVVAET

SEQ ID NO: 3740 - protein, 354 aa, Arabidopsis thaliana
MTSEDAMAVVRKRGKGKGGQKSLLASPRNPRRSRRRSEAVEEKEANLVIEEIVKLPPRKRKTNGRPKKDKHSSAPPLCSSSDLPNTCQSDLNRIGEIISDLVMWRDVAKSTLWFGFGCLSFLSSCFAKGVNFSVFSAVSNLGLVLLCGSFLSNTLCQRKNEDTKRAFHVSEDDVLRLARRVLPATNFLISKTSEIFSGEPSMTLKVTPFLLLGAEYGHLITLWRLSAFGFFLSFTIPKLYSCYTYQISQKVERVKTRIGEAWGVCSHKKILAGSAVTAFWNLTSIRTRIFAVFIILVIFRYRRQNLQLTPEEVEPVENEQEEETLPQEEETVPQEEEQTQPSEERALVVVVAET

SEQ ID NO: 3741 - protein, 348 aa, Arabidopsis thaliana
MAVVRKRGKGKGGQKSLLASPRNPRRSRRRSEAVEEKEANLVIEEIVKLPPRKRKTNGRPKKDKHSSAPPLCSSSDLPNTCQSDLNRIGEIISDLVMWRDVAKSTLWFGFGCLSFLSSCFAKGVNFSVFSAVSNLGLVLLCGSFLSNTLCQRKNEDTKRAFHVSEDDVLRLARRVLPATNFLISKTSEIFSGEPSMTLKVTPFLLLGAEYGHLITLWRLSAFGFFLSFTIPKLYSCYTYQISQKVERVKTRIGEAWGVCSHKKILAGSAVTAFWNLTSIRTRIFAVFIILVIFRYRRQNLQLTPEEVEPVENEQEEETLPQEEETVPQEEEQTQPSEERALVVVVAET

SEQ ID NO: 3742 - DNA, 905 bp, Arabidopsis thaliana
gttatataatgacaccataaccatttcttctcttcacaatctttacaagaatatctctcttctacagtaaacaaaaaatggcaatgaatggtttgtccaagatggctgtagccgccgcaactgctcttctcctagttctgaccattgtcccgggcgcagtagctgtgacttacactattgaatggaccactggtgtggactactcaggttgggctaccggaaagactttcagggttggtgacattctagagttcaagtatggttcttcccacacggtggatgtggttgacaaagccggatatgatggctgcgacgcctcctcctcgactgagaaccattccgatggagacaccaaaatcgatcttaagactgtaggaataaactatttcatctgttctacacctggtcactgcagaaccaatggcggcatgaagctagccgttaatgtcgtagccggttctgccggacctccggccactcccacgccaccttcttcaactccgggaactcctaccacaccggaatcacctccgtctggcggatcacccacacccaccacacccacacctggtgcaggttcaacttctcctcctcctccaccaaaggcaagtggtgcgtctaagggagtgatgagttacgttttggtgggagtctcgatggttttgggttatggtttgtggatgtaattggtttagagagccagggtggagtcagtgcttttgcctttttaaattattttggtttttggttgtaagagaatttgggtttgtgtgccacgtcagaagctcttcattattcgtaggatttttattatctcggcatttgattatcgttatcatcatcatcatcacattcacttattctcttgttgtaataaattatactattaattttcattttcgtcc

SEQ ID NO: 3743 - protein, 202 aa, Arabidopsis thaliana
MAMNGLSKMAVAAATALLLVLTIVPGAVAVTYTIEWTTGVDYSGWATGKTFRVGDILEFKYGSSHTVDVVDKAGYDGCDASSSTENHSDGDTKIDLKTVGINYFICSTPGHCRTNGGMKLAVNVVAGSAGPPATPTPPSSTPGTPTTPESPPSGGSPTPTTPTPGAGSTSPPPPPKASGASKGVMSYVLVGVSMVLGYGLWM

SEQ ID NO: 3744 - protein, 200 aa, Arabidopsis thaliana
MNGLSKMAVAAATALLLVLTIVPGAVAVTYTIEWTTGVDYSGWATGKTFRVGDILEFKYGSSHTVDVVDKAGYDGCDASSSTENHSDGDTKIDLKTVGINYFICSTPGHCRTNGGMKLAVNVVAGSAGPPATPTPPSSTPGTPTTPESPPSGGSPTPTTPTPGAGSTSPPPPPKASGASKGVMSYVLVGVSMVLGYGLWM

SEQ ID NO: 3745 - protein, 194 aa, Arabidopsis thaliana
MAVAAATALLLVLTIVPGAVAVTYTIEWTTGVDYSGWATGKTFRVGDILEFKYGSSHTVDVVDKAGYDGCDASSSTENHSDGDTKIDLKTVGINYFICSTPGHCRTNGGMKLAVNVVAGSAGPPATPTPPSSTPGTPTTPESPPSGGSPTPTTPTPGAGSTSPPPPPKASGASKGVMSYVLVGVSMVLGYGLWM

SEQ ID NO: 3746 - DNA, 1029 bp, Arabidopsis thaliana
tttttttttcctttgggactcactgagattactactaccaaatccaacaatggcgatttctttcgcaatcgatccttccatatctccttgcttctccttctcctctccatcttcttcatcaaaaaccttacctttacgaaacaacctccatttccatggcagaccttcaccaatatctccactcatttcaaaacccagtcgaaaattcccaatcttctctgctcaccaaactaataacagtgaagaagcgaattcaaagcagcaagcagatgtaaaaaccctaattaggtcatataaacaagctcttctcaacggagacgaaacctcagttacagaaatcgaaacgatgttttgcaaaatcgagaaggagaagaataaaatggatcaaaaggttttatctttatcaatgaagatagcttcagagaaagagatgaaaattcgattacaagctgattttgataatacaaggaagaagcttgataaagataggcttagtacagagtctaatgcaaaagttcagattcttaagtctcttttacctattattgatagttttgagaaagctaagttacaggttagagttgatactgataaggagaagaagattgatacgagttatcaagggatttataggcaatttgttgaggttttgagatatcttcgtgtttcggttattgcaactgttggcaagccttttgatcctttgttgcacgaggctatttcacgggaagaatctgaggcggttaaagcagggataataaccgaggagctgaacaagggatttgttctaggagatcgtgttctgagaccagcaaaggttaaagtttctttaggacccgtcaacaagaagactccttcagctgctgaggaaataacaccttctgcttgagttcgatgtcgggtaaaagtttcaatgtcttgtgctaatgtccattttttattcacctatcaaagggataccaaaattgcaacaatgtctaatgagaaagttctttggcttcagagtttatgattcatgttttacgattt

SEQ ID NO: 3747 - protein, 295 aa, Arabidopsis thaliana
FFFLWDSLRLLLPNPTMAISFAIDPSISPCFSFSSPSSSSKTLPLRNNLHFHGRPSPISPLISKPSRKFPIFSAHQTNNSEEANSKQQADVKTLIRSYKQALLNGDETSVTEIETMFCKIEKEKNKMDQKVLSLSMKIASEKEMKIRLQADFDNTRKKLDKDRLSTESNAKVQILKSLLPIIDSFEKAKLQVRVDTDKEKKIDTSYQGIYRQFVEVLRYLRVSVIATVGKPFDPLLHEAISREESEAVKAGIITEELNKGFVLGDRVLRPAKVKVSLGPVNKKTPSAAEEITPSA

SEQ ID NO: 3748 - protein, 279 aa, Arabidopsis thaliana
MAISFAIDPSISPCFSFSSPSSSSKTLPLRNNLHFHGRPSPISPLISKPSRKFPIFSAHQTNNSEEANSKQQADVKTLIRSYKQALLNGDETSVTEIETMFCKIEKEKNKMDQKVLSLSMKIASEKEMKIRLQADFDNTRKKLDKDRLSTESNAKVQILKSLLPIIDSFEKAKLQVRVDTDKEKKIDTSYQGIYRQFVEVLRYLRVSVIATVGKPFDPLLHEAISREESEAVKAGIITEELNKGFVLGDRVLRPAKVKVSLGPVNKKTPSAAEEITPSA

SEQ ID NO: 3749 - protein, 180 aa, Arabidopsis thaliana
MFCKIEKEKNKMDQKVLSLSMKIASEKEMKIRLQADFDNTRKKLDKDRLSTESNAKVQILKSLLPIIDSFEKAKLQVRVDTDKEKKIDTSYQGIYRQFVEVLRYLRVSVIATVGKPFDPLLHEAISREESEAVKAGIITEELNKGFVLGDRVLRPAKVKVSLGPVNKKTPSAAEEITPSA

SEQ ID NO: 3750 - DNA, 1647 bp, Arabidopsis thaliana
acaaacacctctctttgttggactctctttttctttcttcttcccttagtttattttaactcagaaacctctgtttttttttgttagagagaaaggtaagaaatgggtgttgatttgaggcaagtagttgctggtattctcaccattaccatgtttgtgatgcttggacagatgcttcatagagattactttgattctcttcaggagaaagctcagggagatgcacaagatattgaatttgaaggatctaaagtctctgtgaaagatggtcttgtcggaaccgttgaaggcagtaaaggactttggatggaagataacactgatcttactccttgttggccaacattactatctgatgacgctgtatcatcgaaagggtatgttacattctcacttaccaatggtcctgagtaccatatctctcagatcactgatgctgtaatggtggctaagcatcttggagcaactctagtacttcctgatataagaggaagcaaacctggtgatgaaaggaattttgaagatatctatgatgcggataagctgattaaaagcttggaaaatgtcgttaaagttgtgaaaaaattgcctgaagaagtttctctaaggaacatggccattgtgaaggtccctaccagagttacagaagattacattaaagagcacattgatcccatctttaaatctaaaggaaacattcgagttgcatcatacttcccttctgtaaacttgagaaaatcctcacaagatggcgaaactgatcctgtagcctgtttagcaatgtttgggtctttggagttgcaacctgaagtgaatgcagtggctgaatcaatggttgagcggttgaggactcatagccgtaaatccggtggccgtttcatagcagtagaccttagaatcgacatacttgagaagaaaaattgccatacaactggtgtagtagggtccaagacatgttacaacgctcaagagattgctttattcttgagaaagcttggatttgccagcgacacaactatctatctgactcagccaagatgggacagtagcctcaatatccttaaggatatcttcccaaaaacattcactaaggaggcaataatgccggcaagtaagagatcaaagtaccttgaatcagtgagttccgagtacgaaaatgttatcgacttctacataagctcaagaagcgatgtctttgttccagccatctccggtctgttttatgcaaacaccgttggcaaaaggatagctttaggtaagcctcaagtgttagttccagcagaaatctcagagacatctggccttgctacagatttcatctctccatacatctcaaagaagaaccatttggcttattcatgcttttgctgaccttctcgcatttctaaagtaatctccacgcatacttccatggaagggccttctcagttttcatcaagtgtaagcaatttaattatttttcttgtttttaatttgtaagtttgtttcaatataagttggtttttttgggcagtgaggtttacagtttgaatctgttggctcatagcttttgcattctataaattttgctctatagtaagaaacacatatattgtttgtaagattgattttagtgttgagggtttctattgaaggaagaaccatgtg

SEQ ID NO: 3751 - protein, 422 aa, Arabidopsis thaliana
MGVDLRQVVAGILTITMFVMLGQMLHRDYFDSLQEKAQGDAQDIEFEGSKVSVKDGLVGTVEGSKGLWMEDNTDLTPCWPTLLSDDAVSSKGYVTFSLTNGPEYHISQITDAVMVAKHLGATLVLPDIRGSKPGDERNFEDIYDADKLIKSLENVVKVVKKLPEEVSLRNMAIVKVPTRVTEDYIKEHIDPIFKSKGNIRVASYFPSVNLRKSSQDGETDPVACLAMFGSLELQPEVNAVAESMVERLRTHSRKSGGRFIAVDLRIDILEKKNCHTTGVVGSKTCYNAQEIALFLRKLGFASDTTIYLTQPRWDSSLNILKDIFPKTFTKEAIMPASKRSKYLESVSSEYENVIDFYISSRSDVFVPAISGLFYANTVGKRIALGKPQVLVPAEISETSGLATDFISPYISKKNHLAYSCFC

SEQ ID NO: 3752 - protein, 406 aa, Arabidopsis thaliana
MFVMLGQMLHRDYFDSLQEKAQGDAQDIEFEGSKVSVKDGLVGTVEGSKGLWMEDNTDLTPCWPTLLSDDAVSSKGYVTFSLTNGPEYHISQITDAVMVAKHLGATLVLPDIRGSKPGDERNFEDIYDADKLIKSLENVVKVVKKLPEEVSLRNMAIVKVPTRVTEDYIKEHIDPIFKSKGNIRVASYFPSVNLRKSSQDGETDPVACLAMFGSLELQPEVNAVAESMVERLRTHSRKSGGRFIAVDLRIDILEKKNCHTTGVVGSKTCYNAQEIALFLRKLGFASDTTIYLTQPRWDSSLNILKDIFPKTFTKEAIMPASKRSKYLESVSSEYENVIDFYISSRSDVFVPAISGLFYANTVGKRIALGKPQVLVPAEISETSGLATDFISPYISKKNHLAYSCFC

SEQ ID NO: 3753 - protein, 403 aa, Arabidopsis thaliana
MLGQMLHRDYFDSLQEKAQGDAQDIEFEGSKVSVKDGLVGTVEGSKGLWMEDNTDLTPCWPTLLSDDAVSSKGYVTFSLTNGPEYHISQITDAVMVAKHLGATLVLPDIRGSKPGDERNFEDIYDADKLIKSLENVVKVVKKLPEEVSLRNMAIVKVPTRVTEDYIKEHIDPIFKSKGNIRVASYFPSVNLRKSSQDGETDPVACLAMFGSLELQPEVNAVAESMVERLRTHSRKSGGRFIAVDLRIDILEKKNCHTTGVVGSKTCYNAQEIALFLRKLGFASDTTIYLTQPRWDSSLNILKDIFPKTFTKEAIMPASKRSKYLESVSSEYENVIDFYISSRSDVFVPAISGLFYANTVGKRIALGKPQVLVPAEISETSGLATDFISPYISKKNHLAYSCFC

SEQ ID NO: 3754 - DNA, 1245 bp, Arabidopsis thaliana
aagaaaaggcagagaagagagaggctctgataaaaaaaaaaacaaaaaaaaatgacaaaggcttattcaacacgtgtcctcacgtttctgatattgatctcgctaatggcggtgacactgaacctttttcccacggtagaggcaaagaagcggagtagagatgctcctatagtgaaaggtctctcatggaacttttaccagaaagcatgtccgaaagtcgaaaacatcatcagaaaagagctcaagaaagtcttcaagagagatattggtttagccgcagccatccttcgtatacatttccatgattgctttgttcagggatgtgaagcatcagtgctgctagctggatcagccagtggaccaggagaacaatcatcaatcccaaatctgacactacgtcaacaagcctttgtcgtcattaataaccttcgtgccctcgtccaaaagaagtgcggtcaagtcgtctcttgctcagatatcctcgctctcgccgctcgcgattccgtcgtcctatcaggagggccagactatgctgtcccacttggccgacgtgactctctagcgttcgcgagccaggaaacgacgttaaataacttaccaccaccgttcttcaacgcgagccagctcatcgccgacttcgccaacagaaacctcaacatcaccgacttagtagcactttccggtggtcacaccatcggaatcgcgcattgtccgtctttcacagaccgactctacccgaaccaagacccaaccatgaaccagttcttcgccaacagcctcaaacgcacttgtcccaccgcaaactcgagcaacacgcaagtgaatgacataaggagtcctgacgtgttcgacaacaagtactacgttgatctcatgaaccgacaagggctattcacttctgaccaggatctcttcgtggataagaggacacgtggcattgtggaaagctttgcgatcgaccagcagctgttttttgattattttactgtggcgatgatcaagatgggtcagatgagtgtcttaactggaacacaaggagagattcgttccaattgttcagccagaaacacccaaagtttcatgtccgttttggaagaaggcatagaggaagctatttccatgatctaaataaccataaatctcgacctttcctttgtcaactctgtttttatttagttcatgcacttgtggttgggttgtcgaatgcgtaaaactatctgataaataagaacgtcgcttcatctt

SEQ ID NO: 3755 - protein, 358 aa, Arabidopsis thaliana
MTKAYSTRVLTFLILISLMAVTLNLFPTVEAKKRSRDAPIVKGLSWNFYQKACPKVENIIRKELKKVFKRDIGLAAAILRIHFHDCFVQGCEASVLLAGSASGPGEQSSIPNLTLRQQAFVVINNLRALVQKKCGQVVSCSDILALAARDSVVLSGGPDYAVPLGRRDSLAFASQETTLNNLPPPFFNASQLIADFANRNLNITDLVALSGGHTIGIAHCPSFTDRLYPNQDPTMNQFFANSLKRTCPTANSSNTQVNDIRSPDVFDNKYYVDLMNRQGLFTSDQDLFVDKRTRGIVESFAIDQQLFFDYFTVAMIKMGQMSVLTGTQGEIRSNCSARNTQSFMSVLEEGIEEAISMI

SEQ ID NO: 3756 - protein, 340 aa, Arabidopsis thaliana
MAVTLNLFPTVEAKKRSRDAPIVKGLSWNFYQKACPKVENIIRKELKKVFKRDIGLAAAILRIHFHDCFVQGCEASVLLAGSASGPGEQSSIPNLTLRQQAFVVINNLRALVQKKCGQVVSCSDILALAARDSVVLSGGPDYAVPLGRRDSLAFASQETTLNNLPPPFFNASQLIADFANRNLNITDLVALSGGHTIGIAHCPSFTDRLYPNQDPTMNQFFANSLKRTCPTANSSNTQVNDIRSPDVFDNKYYVDLMNRQGLFTSDQDLFVDKRTRGIVESFAIDQQLFFDYFTVAMIKMGQMSVLTGTQGEIRSNCSARNTQSFMSVLEEGIEEAISMI

SEQ ID NO: 3757 - DNA, 1292 bp, Arabidopsis thaliana
aatttgttgtttccttaaacccttcaaagcaaaattagggtttctcttggttttcgcaaattagggattttttctctcgttctcatgaaaagatgagtttgatttccaaatccttggcaagaattgaatgttcgccatttttttatccaagagcttcagaaatcactaccggaaaacggataacctctccgcaaatccgtttatacactgcggcggccgtcggcgggaaaactggaaatggagaaaggaaacaaagagccaaagcaccggcgaaaactccggaggcagtgacacctgtgaaaccgctggagattgcgtcagtcacggcgacgacggagaatgaattgcctcggcctaatgagatagcttacgagagtgaagcagcgaattgggttaatctgattggatttgttgatcaaccagttcaattcgaagcttcttctgatggcaaattctgggctggtactgttatttcccagaggtctgcttcagattcctctggtttctggattccgataatatttgaaggcgatttagctaaaaccgcagctcgatatgtaagcaaagacgatcaaattcatgtgtctgggaagctgtttatagattctcctcctccaaatatgacttatgcacaagccaatgttcaggtattggtccagaatcttaactttatacagcctatgtccccgtctccgtcgccatttatggttatgtcatcatctgaaaaggaagaaagtggtatcaagaagcagcctgctagagctaagcaggatatagtcattgatgaagcttcagattcttggaatcacctcattgaaaatcctaaagaatggtgggatcaccgggaaaataaagtcaatggattggtaaaacctaggcatcctgatttcaaaagcaaggacagtagtttttcgctgtggctcaataaggctcctaattgggttttgccaaaactcgaaggactcgagttcgatgttctagtccctaaagccagagttgtaaaacaacttaaaggagaagaatcatggaaggacttggttcagaacccagataaatggtgggacaatagaatcgacaagagaaatgcaaaagcccctgatttcaagcacaaggagacaggtgaagcactgtggctaaacgagtctcctacttgggtattaccgaaactgccaccagtcaagaagaaacaagaaagtattgtcttttagctttagaaacattatctccatgtaaagagctccaagtgtttacaaaattcatcatttctattcaaagtggtctccaaagttccg

SEQ ID NO: 3758 - protein, 371 aa, Arabidopsis thaliana
MSLISKSLARIECSPFFYPRASEITTGKRITSPQIRLYTAAAVGGKTGNGERKQRAKAPAKTPEAVTPVKPLEIASVTATTENELPRPNEIAYESEAANWVNLIGFVDQPVQFEASSDGKFWAGTVISQRSASDSSGFWIPIIFEGDLAKTAARYVSKDDQIHVSGKLFIDSPPPNMTYAQANVQVLVQNLNFIQPMSPSPSPFMVMSSSEKEESGIKKQPARAKQDIVIDEASDSWNHLIENPKEWWDHRENKVNGLVKPRHPDFKSKDSSFSLWLNKAPNWVLPKLEGLEFDVLVPKARVVKQLKGEESWKDLVQNPDKWWDNRIDKRNAKAPDFKHKETGEALWLNESPTWVLPKLPPVKKKQESIVF

SEQ ID NO: 3759 - protein, 195 aa, Arabidopsis thaliana
MTYAQANVQVLVQNLNFIQPMSPSPSPFMVMSSSEKEESGIKKQPARAKQDIVIDEASDSWNHLIENPKEWWDHRENKVNGLVKPRHPDFKSKDSSFSLWLNKAPNWVLPKLEGLEFDVLVPKARVVKQLKGEESWKDLVQNPDKWWDNRIDKRNAKAPDFKHKETGEALWLNESPTWVLPKLPPVKKKQESIVF

SEQ ID NO: 3760 - DNA, 1442 bp, Arabidopsis thaliana
gaacccatttaagtcggggcgttgcaggatccgatttctcgttttgttcttcgttaaaattcaccagattgaagaatggcggacggtgaagacattcaaccgcttgtttgtgacaatggaactggaatggttaaggccggattcgcgggtgacgatgcaccaagagcggtttttccgagcattgtaggccgtcctcgccacacgggtgtgatggtagggatgggacaaaaggatgcttatgttggagacgaggctcaatcaaaacgtggtatcttgactctgaagtacccaattgagcatggaattgttaataattgggatgacatggagaagatttggcatcacactttctacaatgagcttcgtgttgcccctgaagaacatccggttctcttgaccgaagctcctctcaatccgaaagctaaccgtgagaagatgactcagatcatgtttgagacattcaatactcctgctatgtatgttgccattcaagctgttctctcactctatgccagtggccgtacaactggtattgttttggactctggagatggtgtgagccacacggtaccaatctacgagggttacgctctcccacacgcaatcctacgtcttgacctagcaggtcgtgacctcacggaccacctcatgaaaatcctcacagagcgtggatactccttcaccacaactgctgaacgtgaaattgttagagacatgaaagagaagctctcttacattgctctagacttcgagcaagagctagagacttccaaaacaagctcgtccgttgagaaaagcttcgagcttcctgatggacaagtgataaccattggagcagagaggttccggtgtccggaagttctgttccagccgtcaatgatcggaatggaaaatccaggaatccatgaaaccacatataactctatcatgaaatgtgatgtggatattaggaaagacttgtatggtaacattgtgctaagtggtggaaccacaatgtttggagggattggtgatagaatgagcaaagagattacggctttggctccaagtagtatgaagattaaggtcgtggctccaccggagaggaagtacagtgtatggaccggtggctctatattggcttcactcagcactttccagcagatgtggattgcgaaagcagagtacgatgaatctggaccctcaatagtgcataggaaatgcttctaatcacagttcctaagatcaccaaacgaagacggaagtaaaagtaaaagacagaaggttaaaaacattgagattactaccaaatgccacatttttccattatattttctaatctctcttttatccttttttttttgaatagcctctctatgttaatttttcaactaagcatacttttctttaaacaatttccactcccaatgtactatatataagcgactaatttcaattattat

SEQ ID NO: 3761 - protein, 377 aa, Arabidopsis thaliana
MADGEDIQPLVCDNGTGMVKAGFAGDDAPRAVFPSIVGRPRHTGVMVGMGQKDAYVGDEAQSKRGILTLKYPIEHGIVNNWDDMEKIWHHTFYNELRVAPEEHPVLLTEAPLNPKANREKMTQIMFETFNTPAMYVAIQAVLSLYASGRTTGIVLDSGDGVSHTVPIYEGYALPHAILRLDLAGRDLTDHLMKILTERGYSFTTTAEREIVRDMKEKLSYIALDFEQELETSKTSSSVEKSFELPDGQVITIGAERFRCPEVLFQPSMIGMENPGIHETTYNSIMKCDVDIRKDLYGNIVLSGGTTMFGGIGDRMSKEITALAPSSMKIKVVAPPERKYSVWTGGSILASLSTFQQMWIAKAEYDESGPSIVHRKCF

SEQ ID NO: 3762 - protein, 360 aa, Arabidopsis thaliana
MVKAGFAGDDAPRAVFPSIVGRPRHTGVMVGMGQKDAYVGDEAQSKRGILTLKYPIEHGIVNNWDDMEKIWHHTFYNELRVAPEEHPVLLTEAPLNPKANREKMTQIMFETFNTPAMYVAIQAVLSLYASGRTTGIVLDSGDGVSHTVPIYEGYALPHAILRLDLAGRDLTDHLMKILTERGYSFTTTAEREIVRDMKEKLSYIALDFEQELETSKTSSSVEKSFELPDGQVITIGAERFRCPEVLFQPSMIGMENPGIHETTYNSIMKCDVDIRKDLYGNIVLSGGTTMFGGIGDRMSKEITALAPSSMKIKVVAPPERKYSVWTGGSILASLSTFQQMWIAKAEYDESGPSIVHRKCF

SEQ ID NO: 3763 - protein, 332 aa, Arabidopsis thaliana
MVGMGQKDAYVGDEAQSKRGILTLKYPIEHGIVNNWDDMEKIWHHTFYNELRVAPEEHPVLLTEAPLNPKANREKMTQIMFETFNTPAMYVAIQAVLSLYASGRTTGIVLDSGDGVSHTVPIYEGYALPHAILRLDLAGRDLTDHLMKILTERGYSFTTTAEREIVRDMKEKLSYIALDFEQELETSKTSSSVEKSFELPDGQVITIGAERFRCPEVLFQPSMIGMENPGIHETTYNSIMKCDVDIRKDLYGNIVLSGGTTMFGGIGDRMSKEITALAPSSMKIKVVAPPERKYSVWTGGSILASLSTFQQMWIAKAEYDESGPSIVHRKCF

SEQ ID NO: 3764 - DNA, 2303 bp, Arabidopsis thaliana
gtgcaacaacctaaccatggaaattgcaatttgcaaacatggcgctcgcgctctcgctgtcggcatgttctcctccactccgccgcactcgtcgtgccggttttcgaacaagctgctcgatcttcgcgaatccagcacagcgagccaagaggaagctgcttgagctgatctccgaggaggatcgaggtctgagaacccagaaagaccccaagaagcgagatgaaatcgtgaacgccatcgaatccatgacggttatcgggcgcagctccatcaccacagacgactctctatctgccacgtggcggctcttgtggacgacggagaaggaacagttgttcatcatagaaaaggcaggcttgtttgggacgaccgccggagacgttttgcaggtgatcgatgtgaataaacggatcctcaataacgtcatcactttcccgccggacggggttttcttcgtacgctccgatatcgatatcgcttccccgcagagagtcaatttcagattcaatagtgcggtattgagagggaagaactgggagctcccactgccaccatttgggaagggctggtttgagaatgtgtatatggacggtgagatcagagtggccaaggacatcagaggagactacttaattgttgatcgtgctccttataactggactgaatcatttgtataatttgtgatgctttttgcttcttgtataagttatacaccatttctgtctctctcctttatcattgggcctcaaatagatgatgcaggaatatagggaggaggaggaagaggaatttgaaggatcattcaaagtgtcatccttgagtttatttagggtttttgtctgtgtttgttacaaacacaccacccacattttctatgcccttttttaatgttattttcacaatccatgacttaaaaggccaacactaatcctttgtctcttatttcattgtgaactcacaaagatgttggtgtccgcaagggtagagaaacaaaagcgtgttgcttatcaggggaaggcgacagtgcttgctctcggtaaggccttgccgagcaatgttgtttcccaggagaatctcgtggaggagtatctccgtgaaatcaaatgcgataacctttctatcaaagacaagctgcaacacttgtgcaaaagcacaactgtcaagacacgctacacagtcatgtcacgggagacgctgcacaaataccctgaactagcaaccgagggttccccaaccatcaaacagaggcttgagattgcaaacgatgcggttgtgcagatggcatatgaagcgagcttggtttgcatcaaggaatggggaagggcagtggaagatatcactcatcttgtctacgtttcctccagtgagttccgtttgcccggaggtgatctttacctctcggcacagctgggccttagcaacgaggttcagagagtgatgctgtattttcttggatgctatggaggtttgagtgggctgcgcgtggccaaagacattgctgagaacaacccagggagccgtgtgttgctcaccacctctgagactaccgttctggggttccgcccacccaacaaagctcgtccttacaacttagtcggggctgcactctttggagatggagcagctgccctgatcatcggagcagaccctacagagtcggaatctcctttcatggagcttcactgtgctatgcagcagttcctgccccaaacacagggggtgatcgacgggcggctgtcagaagagggcataaccttcaagctaggaagagacctccctcagaagatcgaagacaacgtggaggagttctgcaagaagctagtggcaaaggctggctctggtgcgttggagttgaatgaccttttctgggcagttcatcctggtggaccagccatcctgagcgggctggagacaaagctgaagctgaagccggaaaagctggaatgcagcagaagggcgttgatggattatgggaacgtaagcagcaacaccatcttctacataatggacaaagtcagggatgagcttgagaagaaaggcacagagggagaagagtggggtctgggcttagctttcggaccgggaatcactttcgaaggctttctcatgaggaacctctaaatgtatatgaactggacatttctcaacaaataaaatatacaggaaccgatgctaacacacatacatcatgtaatggttgcattagttttgttctttaatggtaaatcacagaaatacatcaatacagtaagtttatatacataattgaagtattcttcaatggcatcttacttcatgcattc

SEQ ID NO: 3765 - protein, 385 aa, Arabidopsis thaliana
MLVSARVEKQKRVAYQGKATVLALGKALPSNVVSQENLVEEYLREIKCDNLSIKDKLQHLCKSTTVKTRYTVMSRETLHKYPELATEGSPTIKQRLEIANDAVVQMAYEASLVCIKEWGRAVEDITHLVYVSSSEFRLPGGDLYLSAQLGLSNEVQRVMLYFLGCYGGLSGLRVAKDIAENNPGSRVLLTTSETTVLGFRPPNKARPYNLVGAALFGDGAAALIIGADPTESESPFMELHCAMQQFLPQTQGVIDGRLSEEGITFKLGRDLPQKIEDNVEEFCKKLVAKAGSGALELNDLFWAVHPGGPAILSGLETKLKLKPEKLECSRRALMDYGNVSSNTIFYIMDKVRDELEKKGTEGEEWGLGLAFGPGITFEGFLMRNL

SEQ ID NO: 3766 - protein, 313 aa, Arabidopsis thaliana
MSRETLHKYPELATEGSPTIKQRLEIANDAVVQMAYEASLVCIKEWGRAVEDITHLVYVSSSEFRLPGGDLYLSAQLGLSNEVQRVMLYFLGCYGGLSGLRVAKDIAENNPGSRVLLTTSETTVLGFRPPNKARPYNLVGAALFGDGAAALIIGADPTESESPFMELHCAMQQFLPQTQGVIDGRLSEEGITFKLGRDLPQKIEDNVEEFCKKLVAKAGSGALELNDLFWAVHPGGPAILSGLETKLKLKPEKLECSRRALMDYGNVSSNTIFYIMDKVRDELEKKGTEGEEWGLGLAFGPGITFEGFLMRNL

SEQ ID NO: 3767 - protein, 280 aa, Arabidopsis thaliana
MAYEASLVCIKEWGRAVEDITHLVYVSSSEFRLPGGDLYLSAQLGLSNEVQRVMLYFLGCYGGLSGLRVAKDIAENNPGSRVLLTTSETTVLGFRPPNKARPYNLVGAALFGDGAAALIIGADPTESESPFMELHCAMQQFLPQTQGVIDGRLSEEGITFKLGRDLPQKIEDNVEEFCKKLVAKAGSGALELNDLFWAVHPGGPAILSGLETKLKLKPEKLECSRRALMDYGNVSSNTIFYIMDKVRDELEKKGTEGEEWGLGLAFGPGITFEGFLMRNL

SEQ ID NO: 3768 - DNA, 1709 bp, Arabidopsis thaliana
gttgattataattagacttcttcatttactctctctctgacttaaaacatttattttatcttcttcttgttctctctttctctttctctcatcactatgaagagtttcaacacagaaggacacaaccactccacggcggaatccggcgatgcctacaccgtgtcggacccgacaaagaacgtcgatgaagatggtcgagagaagcgtaccgggacgtggcttacggcgagtgcgcatattatcacggcggtgataggctccggagtgttgtctttagcatgggctatagctcagcttggttggatcgcagggacatcgatcttactcattttctcgttcattacttacttcacctccaccatgcttgccgattgctaccgtgcgccggatcccgtcaccggaaaacggaattacacttacatggacgttgttcgatcttacctcggtggtaggaaagtgcagctctgtggagtggcacaatatgggaatctgattggggtcactgttggttacaccatcactgcttctattagtttggtagcggtagggaaatcgaactgcttccacgataaagggcacactgcggattgtactatatcgaattatccgtatatggcggtttttggtatcattcaagttattcttagccagatcccaaatttccacaagctctcttttctttccattatggccgcagtcatgtcctttacttatgcaactattggaatcggtctagccatcgcaaccgtcgcaggtgggaaagtgggtaagacgagtatgacgggcacagcggttggagtagatgtaaccgcagctcaaaagatatggagatcgtttcaagcggttggggacatagcgttcgcctatgcttatgccacggttctcatcgagattcaggatacactaagatctagcccagctgagaacaaagccatgaaaagagcaagtcttgtgggagtatcaaccaccacttttttctacatcttatgtggatgcatcggctatgctgcatttggaaacaatgcccctggagatttcctcacagatttcgggtttttcgagcccttttggctcattgactttgcaaacgcttgcatcgctgtccaccttattggtgcctatcaggtgttcgcgcagccgatattccagtttgttgagaaaaaatgcaacagaaactatccagacaacaagttcatcacttctgaatattcagtaaacgtacctttccttggaaaattcaacattagcctcttcagattggtgtggaggacagcttatgtggttataaccactgttgtagctatgatattccctttcttcaacgcgatcttaggtcttatcggagcagcttccttctggcctttaacggtttatttccctgtggagatgcacattgcacaaaccaagattaagaagtactctgctagatggattgcgctgaaaacgatgtgctatgtttgcttgatcgtctcgctcttagctgcagccggatccatcgcaggacttataagtagtgtcaaaacctacaagcccttccggactatgcatgagtgagtttgagatcctcaagagagtcaaaaatatatgtagtagtttggtctttctgttaaactatctggtgtctaaatccaatgagaatgctttattgctaaaacttcatgaatctctctgtatctacatctttcaatctaatacatatgagctcttcc

SEQ ID NO: 3769 - protein, 485 aa, Arabidopsis thaliana
MKSFNTEGHNHSTAESGDAYTVSDPTKNVDEDGREKRTGTWLTASAHIITAVIGSGVLSLAWAIAQLGWIAGTSILLIFSFITYFTSTMLADCYRAPDPVTGKRNYTYMDVVRSYLGGRKVQLCGVAQYGNLIGVTVGYTITASISLVAVGKSNCFHDKGHTADCTISNYPYMAVFGIIQVILSQIPNFHKLSFLSIMAAVMSFTYATIGIGLAIATVAGGKVGKTSMTGTAVGVDVTAAQKIWRSFQAVGDIAFAYAYATVLIEIQDTLRSSPAENKAMKRASLVGVSTTTFFYILCGCIGYAAFGNNAPGDFLTDFGFFEPFWLIDFANACIAVHLIGAYQVFAQPIFQFVEKKCNRNYPDNKFITSEYSVNVPFLGKFNISLFRLVWRTAYVVITTVVAMIFPFFNAILGLIGAASFWPLTVYFPVEMHIAQTKIKKYSARWIALKTMCYVCLIVSLLAAAGSIAGLISSVKTYKPFRTMHE

SEQ ID NO: 3770 - protein, 397 aa, Arabidopsis thaliana
MLADCYRAPDPVTGKRNYTYMDVVRSYLGGRKVQLCGVAQYGNLIGVTVGYTITASISLVAVGKSNCFHDKGHTADCTISNYPYMAVFGIIQVILSQIPNFHKLSFLSIMAAVMSFTYATIGIGLAIATVAGGKVGKTSMTGTAVGVDVTAAQKIWRSFQAVGDIAFAYAYATVLIEIQDTLRSSPAENKAMKRASLVGVSTTTFFYILCGCIGYAAFGNNAPGDFLTDFGFFEPFWLIDFANACIAVHLIGAYQVFAQPIFQFVEKKCNRNYPDNKFITSEYSVNVPFLGKFNISLFRLVWRTAYVVITTVVAMIFPFFNAILGLIGAASFWPLTVYFPVEMHIAQTKIKKYSARWIALKTMCYVCLIVSLLAAAGSIAGLISSVKTYKPFRTMHE

SEQ ID NO: 3771 - protein, 377 aa, Arabidopsis thaliana
MDVVRSYLGGRKVQLCGVAQYGNLIGVTVGYTITASISLVAVGKSNCFHDKGHTADCTISNYPYMAVFGIIQVILSQIPNFHKLSFLSIMAAVMSFTYATIGIGLAIATVAGGKVGKTSMTGTAVGVDVTAAQKIWRSFQAVGDIAFAYAYATVLIEIQDTLRSSPAENKAMKRASLVGVSTTTFFYILCGCIGYAAFGNNAPGDFLTDFGFFEPFWLIDFANACIAVHLIGAYQVFAQPIFQFVEKKCNRNYPDNKFITSEYSVNVPFLGKFNISLFRLVWRTAYVVITTVVAMIFPFFNAILGLIGAASFWPLTVYFPVEMHIAQTKIKKYSARWIALKTMCYVCLIVSLLAAAGSIAGLISSVKTYKPFRTMHE

SEQ ID NO: 3772 - DNA, 1183 bp, Arabidopsis thaliana
agtatcatcgatcatctgtcaaaaagaggagctaataataatatggctgctttgaagatgactatctcttgtttcttgtttcttcaagtaatatattgcttgctctcttcatttgctccaacaaatgtgcaaggattgaaagttggattctacgacaaggcatgccccaaagccgagcttattgtcaaaaagtctgtcttcgaggctgtgaagaatgatcggacaattgcagctcctttgctcaggatgttcttccacgattgcttcgttaggggatgcgaagggtcggtattgctagagctaaagaacaaaaaagatgagaaaaactcaattcctaacctcacccttcgaggatttgagatcatagacaatgtcaaggcagctctagaaaaggagtgtccgggcattgtttcttgctctgatgtattggctcttgtcgctagagacgcaatggttgcgctcaatggaccgtcgtgggaggttgaaacgggacgaagagacggtctggttacaaacatcactgaggccttattaaacttaccatcaccatttaataatatcagtagccttatcactcaattccagtccaaaggcctcgacaagaaagacctcgttgtgctttcaggtgggcacacaattgggaatggacattgtccacagatcacaaaccgtctctacaacttcaccggaaaaggagatagtgacccgaacttagacacggaatacgcagtcaaactcagaggaaaatgcaagccaactgataccacaacggctctagaaatggatccaggaagctttaaaacgttcgatgaaagttacttcaagcttgtgtctcaaagaagaggattgtttcaatctgatgcagctcttttagacaatcaagaaactaagtcttatgttctcaagagtttgaatagtgatgggtctactttctttaaagactttggtgtctccatggtaaaaatgggtcggattggagttttaacgggtcaggttggggaagttcgcaagaagtgcagaatggttaattaagtatattttatatagatatgtctgtgagattgttttatgattatgtatgtgtttttccctaagaatattgtgtggagttatatgtattgtacaatggaatgttaaattgtaaaatatgtcatgttttatttatcacaaaagaaaaaattcg

SEQ ID NO: 3773 - protein, 343 aa, Arabidopsis thaliana
SIIDHLSKRGANNNMAALKMTISCFLFLQVIYCLLSSFAPTNVQGLKVGFYDKACPKAELIVKKSVFEAVKNDRTIAAPLLRMFFHDCFVRGCEGSVLLELKNKKDEKNSIPNLTLRGFEIIDNVKAALEKECPGIVSCSDVLALVARDAMVALNGPSWEVETGRRDGLVTNITEALLNLPSPFNNISSLITQFQSKGLDKKDLVVLSGGHTIGNGHCPQITNRLYNFTGKGDSDPNLDTEYAVKLRGKCKPTDTTTALEMDPGSFKTFDESYFKLVSQRRGLFQSDAALLDNQETKSYVLKSLNSDGSTFFKDFGVSMVKMGRIGVLTGQVGEVRKKCRMVN

SEQ ID NO: 3774 - protein, 329 aa, Arabidopsis thaliana
MAALKMTISCFLFLQVIYCLLSSFAPTNVQGLKVGFYDKACPKAELIVKKSVFEAVKNDRTIAAPLLRMFFHDCFVRGCEGSVLLELKNKKDEKNSIPNLTLRGFEIIDNVKAALEKECPGIVSCSDVLALVARDAMVALNGPSWEVETGRRDGLVTNITEALLNLPSPFNNISSLITQFQSKGLDKKDLVVLSGGHTIGNGHCPQITNRLYNFTGKGDSDPNLDTEYAVKLRGKCKPTDTTTALEMDPGSFKTFDESYFKLVSQRRGLFQSDAALLDNQETKSYVLKSLNSDGSTFFKDFGVSMVKMGRIGVLTGQVGEVRKKCRMVN

SEQ ID NO: 3775 - protein, 324 aa, Arabidopsis thaliana
MTISCFLFLQVIYCLLSSFAPTNVQGLKVGFYDKACPKAELIVKKSVFEAVKNDRTIAAPLLRMFFHDCFVRGCEGSVLLELKNKKDEKNSIPNLTLRGFEIIDNVKAALEKECPGIVSCSDVLALVARDAMVALNGPSWEVETGRRDGLVTNITEALLNLPSPFNNISSLITQFQSKGLDKKDLVVLSGGHTIGNGHCPQITNRLYNFTGKGDSDPNLDTEYAVKLRGKCKPTDTTTALEMDPGSFKTFDESYFKLVSQRRGLFQSDAALLDNQETKSYVLKSLNSDGSTFFKDFGVSMVKMGRIGVLTGQVGEVRKKCRMVN

SEQ ID NO: 3776 - DNA, 1023 bp, Arabidopsis thaliana
acccttgcataaatcttacggtggccatgagcttggcttcgattccctcgtcgtcaccagtggcttcaccgtacttccgctgccgtacttacatcttctccttctcttcctcacctctctgtttatatttcccgcgcggtgactctacttctctcaggccacgagttcgcgccttgcgaacggaatctgacggtgctaaaatcggtaactcggagtcttacggctccgaattgcttcgtcggcctcgtattgcgtcggaggaaagctccgaagaagaggaggaagaggaagaagagaacagcgaaggtgatgagttcgtcgattgggaagataaaatccttgaggttactgttcctcttgttggcttcgtcagaatgattcttcactccggaaaatatgcaaaccgagataggctaagccccgagcatgagagaacaattattgagatgctacttccttatcatcctgaatgtgagaagaagatcggatgtggtatagactatattatggtagggcatcacccggattttgagagctctcgatgtatgtttatagttcgaaaagatggagaagtagtcgacttttcgtattggaaatgcataaaaggtcttataaaaaagaagtatcctctgtatgcagacagtttcatcctcagacattttcgcaaacgtaggcagaacagatgaatgaagccttatgtagattctcaaactcaaatgctcgtagactcggatccactacaaggttttggagtgagaactcagacacagaagatccagtcactgtttttctttgagttggaaatacgaatggaactttctagaaaatatggtttccgcagtagatatgaggaattagaaccatcacaagtctttaatatgttcattatcttgaaatctttagcgtttatatgatgatatctgttacattgaacttatgtgcagaggtagagagaaccagtacacacttgtgagcagggctttaatattctattagcaaccagttaaaaccattttttgtgcc

SEQ ID NO: 3777 - protein, 227 aa, Arabidopsis thaliana
PCINLTVAMSLASIPSSSPVASPYFRCRTYIFSFSSSPLCLYFPRGDSTSLRPRVRALRTESDGAKIGNSESYGSELLRRPRIASEESSEEEEEEEEENSEGDEFVDWEDKILEVTVPLVGFVRMILHSGKYANRDRLSPEHERTIIEMLLPYHPECEKKIGCGIDYIMVGHHPDFESSRCMFIVRKDGEVVDFSYWKCIKGLIKKKYPLYADSFILRHFRKRRQNR

SEQ ID NO: 3778 - protein, 219 aa, Arabidopsis thaliana
MSLASIPSSSPVASPYFRCRTYIFSFSSSPLCLYFPRGDSTSLRPRVRALRTESDGAKIGNSESYGSELLRRPRIASEESSEEEEEEEEENSEGDEFVDWEDKILEVTVPLVGFVRMILHSGKYANRDRLSPEHERTIIEMLLPYHPECEKKIGCGIDYIMVGHHPDFESSRCMFIVRKDGEVVDFSYWKCIKGLIKKKYPLYADSFILRHFRKRRQNR

SEQ ID NO: 3779 - DNA, 1991 bp, Arabidopsis thaliana
gttgtcgccgtcgtcgtttctctcatttctgctctgttgtgctatcgtagcgtcgcgctcctttaaacgcgacggacgcagccttctctgttcatcgtttcgccggaagttttcttcagcggagatttattttcagctggttagtagttttgagtgactactgaggtaacaatggttgtagaaactatcgagaggtcttgtgagggttcaaagagaagacatgtgaacggtggagatatcgctgttccttgttcgggagaagagtgtagcaatggagatataaatgtagctcctggagtttcagcgaaaagagctagggtttctagagaaatgacgtttgaagatatttacggtgctgatgcattactcaatgatgacgatgatgaggatgatgattgtgattgggaacctgtgcaggcgcctatggagtttgtaaaatggtgttgtgtcaattgcactatgtcgaaccctggtgatatggtccactgttgtatatgcggtgagcacaaggaatctggcattttgaggcatggatatttagcgtctcccttttttaaagacactggtctcattgaagtcgaggagaaatatggaggaagctcatctgcaaccagctcgacagctgttgggttcgacgagagaatgttgctacactcagaatttgaagtgaaggcacaaccacatccagagagacctgatcgtcttcgagctatagctgctagtcttgccacagctggtgtttttcctggaagatgcttgcctatcaatgcaagggaaatcacgaaacaagaactccagatggtccacacttcagagcatgttgatgctgttgatactacaagccagcttctctatagctacttcacctctgacacatatgctaatgagtattcagcacgtgctgctagacttgcagcaggtttgtgcactgatctagctacagatattttcactggccgtgtaaaaaatggttttgctttggttagacctcccggtcatcatgctggcgtcaggcatgctatggggttttgccttcacaataatgcagccgttgctgcattagtagcacaagcagcaggggcaaagaaggtgctgattgtggactgggatgtccatcatggcaacgggacccaagagatattcgaacaaaacaaatctgtattgtacatatccttgcacagacatgagggaggaatcttctatcccggtactggagctgctgatgaggttggttctaatggtggggaaggttattgtgtaaatgttccatggagttgcggtggagttggggataaagactatatctttgcgtttcaacatgtggttctccccatagcttctgcattttctccagattttgtcatcatatctgcgggatttgatgcggctagaggagacccactaggatgctgtgatgtgactccggctggctattctcgaatgacacagatgttgggtgatctgtgtggtgggaaaatgctagttattctcgagggcggctacaatcttcgctccatatctgcttctgcaacagcagtgatcaaggtgcttctgggtgaaaatccggagaacgagttgcccatcgccaccacgccttcagtagccggcctgcaaactgttcttgatgtactgaatatccaactggagttctggccatcacttgctatcagctactccaaattactctcagagttggaagcacgtctgatcgaaaacaaaaaaaatcagatgaaaaggaaggttgttcgggttccgacatggtggaaatggggacgaaagaagcttttgtacaactttctctcggctcgtatgatttcaagatcaaagtgattttagaaagcattcttcctaatccgtcgtaggaattgtctacacttacttgtaaccctaactgatctgggggaatttattgcaattagggagctctgaacaatctttatcacttacatttggtagggttttatagaaagaacccttttaacctgcttacc

SEQ ID NO: 3780 - protein, 552 aa, Arabidopsis thaliana
MVVETIERSCEGSKRRHVNGGDIAVPCSGEECSNGDINVAPGVSAKRARVSREMTFEDIYGADALLNDDDDEDDDCDWEPVQAPMEFVKWCCVNCTMSNPGDMVHCCICGEHKESGILRHGYLASPFFKDTGLIEVEEKYGGSSSATSSTAVGFDERMLLHSEFEVKAQPHPERPDRLRAIAASLATAGVFPGRCLPINAREITKQELQMVHTSEHVDAVDTTSQLLYSYFTSDTYANEYSARAARLAAGLCTDLATDIFTGRVKNGFALVRPPGHHAGVRHAMGFCLHNNAAVAALVAQAAGAKKVLIVDWDVHHGNGTQEIFEQNKSVLYISLHRHEGGIFYPGTGAADEVGSNGGEGYCVNVPWSCGGVGDKDYIFAFQHVVLPIASAFSPDFVIISAGFDAARGDPLGCCDVTPAGYSRMTQMLGDLCGGKMLVILEGGYNLRSISASATAVIKVLLGENPENELPIATTPSVAGLQTVLDVLNIQLEFWPSLAISYSKLLSELEARLIENKKNQMKRKVVRVPTWWKWGRKKLLYNFLSARMISRSK

SEQ ID NO: 3781 - protein, 499 aa, Arabidopsis thaliana
MTFEDIYGADALLNDDDDEDDDCDWEPVQAPMEFVKWCCVNCTMSNPGDMVHCCICGEHKESGILRHGYLASPFFKDTGLIEVEEKYGGSSSATSSTAVGFDERMLLHSEFEVKAQPHPERPDRLRAIAASLATAGVFPGRCLPINAREITKQELQMVHTSEHVDAVDTTSQLLYSYFTSDTYANEYSARAARLAAGLCTDLATDIFTGRVKNGFALVRPPGHHAGVRHAMGFCLHNNAAVAALVAQAAGAKKVLIVDWDVHHGNGTQEIFEQNKSVLYISLHRHEGGIFYPGTGAADEVGSNGGEGYCVNVPWSCGGVGDKDYIFAFQHVVLPIASAFSPDFVIISAGFDAARGDPLGCCDVTPAGYSRMTQMLGDLCGGKMLVILEGGYNLRSISASATAVIKVLLGENPENELPIATTPSVAGLQTVLDVLNIQLEFWPSLAISYSKLLSELEARLIENKKNQMKRKVVRVPTWWKWGRKKLLYNFLSARMISRSK

SEQ ID NO: 3782 - protein, 468 aa, Arabidopsis thaliana
MEFVKWCCVNCTMSNPGDMVHCCICGEHKESGILRHGYLASPFFKDTGLIEVEEKYGGSSSATSSTAVGFDERMLLHSEFEVKAQPHPERPDRLRAIAASLATAGVFPGRCLPINAREITKQELQMVHTSEHVDAVDTTSQLLYSYFTSDTYANEYSARAARLAAGLCTDLATDIFTGRVKNGFALVRPPGHHAGVRHAMGFCLHNNAAVAALVAQAAGAKKVLIVDWDVHHGNGTQEIFEQNKSVLYISLHRHEGGIFYPGTGAADEVGSNGGEGYCVNVPWSCGGVGDKDYIFAFQHVVLPIASAFSPDFVIISAGFDAARGDPLGCCDVTPAGYSRMTQMLGDLCGGKMLVILEGGYNLRSISASATAVIKVLLGENPENELPIATTPSVAGLQTVLDVLNIQLEFWPSLAISYSKLLSELEARLIENKKNQMKRKVVRVPTWWKWGRKKLLYNFLSARMISRSK

SEQ ID NO: 3783 - DNA, 1015 bp, Arabidopsis thaliana
acagaacaagtagccactctctcatctcaccacccctctttctctctacttgctctctatctctctctgtgtctctccactttctcttcttcttcttcttcttgctctagagatctctctatctccattcttttctctctctgtttctagaaagacaacagtgacattttgtctgaacgcatctatggctgctctggtgctttcacttctccttctatccttggctggacattctagtgcctcatggtgtgtgtgtaagacagggctgagtgatacagtgctacaggcaaccctagactatgcttgtggaaatggagcagattgtaatcctactaaaccaaaacaatcttgcttcaaccctgacaatgttaggtctcattgcaactatgcagtcaatagcttcttccaaaagaagggtcaatctcctggctcttgtaatttcgatggaactgccactcccactaactccgatcccagttatacaggttgtgcctttcctactagtgccagtggctctagcggcagcacaactgtgacacctggcacaaccaatccaaaaggcagcccaacgaccaccacacttcctggtagtggtaccaacagtccttattcagggaacccaaccaatggagtttttgggggaaatagcacaggaggcaccactgggacagggattaacccggattacacgacagacagcagcgcgtttgctctcaagaactcaagcaaattgttcatctgccttctcttgatcgcttcgagtggattctgctctttcctgatgctctaaggatgttaatggtctctggttctgtgggtgcacttagttatcgtttcgaggacattttggtctagtttagtggtaatctctgtctctgtgttatgggtctatgttatgtttttgtttgtaagaagatttcagctcttgcagttactcttaattacctctttgactgttctggtagatttgatgccagtgaaaaaaaatcttaatatataattacattatctcgtc

SEQ ID NO: 3784 - protein, 201 aa, Arabidopsis thaliana
MAALVLSLLLLSLAGHSSASWCVCKTGLSDTVLQATLDYACGNGADCNPTKPKQSCFNPDNVRSHCNYAVNSFFQKKGQSPGSCNFDGTATPTNSDPSYTGCAFPTSASGSSGSTTVTPGTTNPKGSPTTTTLPGSGTNSPYSGNPTNGVFGGNSTGGTTGTGINPDYTTDSSAFALKNSSKLFICLLLIASSGFCSFLML

SEQ ID NO: 3785 - DNA, 1376 bp, Arabidopsis thaliana
ctcttcttcttcttcttcatcttttttttttaacagatctggtggaaattttatcttttgaccccaccactggatctctctatatacacattcatctgagtaatagagtaaaaacgaaacacaagaagcaattatgaagaattgtgagagatttgctaatctcgctctcgcaggtttgacattggcaccactcgttgtgagagtaaatccaaatttgaatgttattctcacagcatgtatcactgtttatgtgggttgctttcgttcggtcaaggatactcctccaacggagacgatgtcaaaagaacatgccatgcgtttcccattggttgggagtgctatgcttctctcacttttcttattgttcaagtttctctcaaaggacttggttaatgctgtgctaacagcttacttctttgttcttgggattgtcgctctttcagcgacattgttaccagccatcagaagatttttaccaaatccttggaatgacaatcttatcgtctggcgttttccttatttcaagtctttggaggtagagttcacaaagtcccaagttgttgcgggaatccctggaacattcttctgtgcgtggtatgcgtggaaaaaacattggctggctaacaatatcctcggcctttccttctgcattcagggaattgagatgctctctctcggatcattcaagactggtgccatccttttggcaggactatttttctatgatatcttctgggttttctttactccagttatggttagtgttgccaaatccttcgatgctccaattaagctcttattccctacgggtgatgctctaagaccctattctatgcttggtcttggtgacattgtcattccgggtattttcgttgcactagctctaagatttgatgtgtcaagacgtagacaaccacaatacttcacaagtgcatttatcggatacgctgttggtgtgatcctcacgattgtagtcatgaactggtttcaagcagcacagcctgctttgttatacattgtcccagccgtaattgggttcttggcttctcactgcatttggaacggtgacatcaaaccgttgttggcgtttgatgaatcaaagacagaggaagcaacgactgatgaatcaaagactagtgaggaggttaataaagctcatgatgaatgaggaaaaatcgagaaagaagggcagaggagaaatatatacacataaatgtgtcttaatatatggaacaagaaggaaaacaattttgtttccaaatgatcatcaatcagtcccttctaaccccttttttgtttttttagattttcaaactttcttttggccaagacttgtgtaagttactataagttacaacaaattttctttgactaat

SEQ ID NO: 3786 - protein, 344 aa, Arabidopsis thaliana
MKNCERFANLALAGLTLAPLVVRVNPNLNVILTACITVYVGCFRSVKDTPPTETMSKEHAMRFPLVGSAMLLSLFLLFKFLSKDLVNAVLTAYFFVLGIVALSATLLPAIRRFLPNPWNDNLIVWRFPYFKSLEVEFTKSQVVAGIPGTFFCAWYAWKKHWLANNILGLSFCIQGIEMLSLGSFKTGAILLAGLFFYDIFWVFFTPVMVSVAKSFDAPIKLLFPTGDALRPYSMLGLGDIVIPGIFVALALRFDVSRRRQPQYFTSAFIGYAVGVILTIVVMNWFQAAQPALLYIVPAVIGFLASHCIWNGDIKPLLAFDESKTEEATTDESKTSEEVNKAHDE

SEQ ID NO: 3787 - protein, 290 aa, Arabidopsis thaliana
MSKEHAMRFPLVGSAMLLSLFLLFKFLSKDLVNAVLTAYFFVLGIVALSATLLPAIRRFLPNPWNDNLIVWRFPYFKSLEVEFTKSQVVAGIPGTFFCAWYAWKKHWLANNILGLSFCIQGIEMLSLGSFKTGAILLAGLFFYDIFWVFFTPVMVSVAKSFDAPIKLLFPTGDALRPYSMLGLGDIVIPGIFVALALRFDVSRRRQPQYFTSAFIGYAVGVILTIVVMNWFQAAQPALLYIVPAVIGFLASHCIWNGDIKPLLAFDESKTEEATTDESKTSEEVNKAHDE

SEQ ID NO: 3788 - protein, 284 aa, Arabidopsis thaliana
MRFPLVGSAMLLSLFLLFKFLSKDLVNAVLTAYFFVLGIVALSATLLPAIRRFLPNPWNDNLIVWRFPYFKSLEVEFTKSQVVAGIPGTFFCAWYAWKKHWLANNILGLSFCIQGIEMLSLGSFKTGAILLAGLFFYDIFWVFFTPVMVSVAKSFDAPIKLLFPTGDALRPYSMLGLGDIVIPGIFVALALRFDVSRRRQPQYFTSAFIGYAVGVILTIVVMNWFQAAQPALLYIVPAVIGFLASHCIWNGDIKPLLAFDESKTEEATTDESKTSEEVNKAHDE

SEQ ID NO: 3789 - DNA, 1057 bp, Arabidopsis thaliana
agaagtttcaactttcaaacatatctttacagttctttcttgctaaacaacaataaaggggaaaataggttaattatgatgaaatctggggctgatttgcaatttccaccaggatttagatttcatcctacggatgaggagctagtcctcatgtatctctgtcgtaaatgcgcgtcgcagccgatccctgctccgattatcaccgaactcgatttgtaccgatatgatccttgggaccttcccgacatggctttgtacggtgaaaaggagtggtattttttctcaccaagagatcgaaagtatccaaacggttcaagacccaaccgtgcagctggtactggatattggaaagctaccggagctgataaaccaataggtcgtcctaaaccggttggtattaagaaggctctagtgttttactcgggaaaacctccaaatggagagaaaaccaattggattatgcacgaataccggctcgctgacgttgaccggtcggttcgtaagaaaaacagtctaagattggacgattgggtattgtgtcgtatatataacaagaaaggtgtcatcgagaagcgacgaagcgatatcgaggacgggttaaagcctgtgactgacacgtgtccaccggaatctgtggcgagattgatctccggctcggagcaagcggtgtcaccggaattcacgtgtagcaacggtcggttgagtaatgcccttgattttccgtttaattacgtagatgccatcgccgataacgagattgtgtcacggctattgggcgggaatcagatgtggtcgacgacgcttgatccacttgtggttaggcagggaactttctgagttgtcacgtgcgattagagttagtggaaagtggaaactatcactgtctgttttcgcacgtgtcgggtagccgtcttgaaacccgctagctgatccagaagtgacctcattgggcttttcaacaacaattgggccttagcctttcttctcccttagtaagacaagctactgtattgtgttgttattttcaggaagcaatataaattcattttaatcactc

SEQ ID NO: 3790 - protein, 278 aa, Arabidopsis thaliana
RSFNFQTYLYSSFLLNNNKGENRLIMMKSGADLQFPPGFRFHPTDEELVLMYLCRKCASQPIPAPIITELDLYRYDPWDLPDMALYGEKEWYFFSPRDRKYPNGSRPNRAAGTGYWKATGADKPIGRPKPVGIKKALVFYSGKPPNGEKTNWIMHEYRLADVDRSVRKKNSLRLDDWVLCRIYNKKGVIEKRRSDIEDGLKPVTDTCPPESVARLISGSEQAVSPEFTCSNGRLSNALDFPFNYVDAIADNEIVSRLLGGNQMWSTTLDPLVVRQGTF

SEQ ID NO: 3791 - protein, 253 aa, Arabidopsis thaliana
MMKSGADLQFPPGFRFHPTDEELVLMYLCRKCASQPIPAPIITELDLYRYDPWDLPDMALYGEKEWYFFSPRDRKYPNGSRPNRAAGTGYWKATGADKPIGRPKPVGIKKALVFYSGKPPNGEKTNWIMHEYRLADVDRSVRKKNSLRLDDWVLCRIYNKKGVIEKRRSDIEDGLKPVTDTCPPESVARLISGSEQAVSPEFTCSNGRLSNALDFPFNYVDAIADNEIVSRLLGGNQMWSTTLDPLVVRQGTF

SEQ ID NO: 3792 - protein, 252 aa, Arabidopsis thaliana
MKSGADLQFPPGFRFHPTDEELVLMYLCRKCASQPIPAPIITELDLYRYDPWDLPDMALYGEKEWYFFSPRDRKYPNGSRPNRAAGTGYWKATGADKPIGRPKPVGIKKALVFYSGKPPNGEKTNWIMHEYRLADVDRSVRKKNSLRLDDWVLCRIYNKKGVIEKRRSDIEDGLKPVTDTCPPESVARLISGSEQAVSPEFTCSNGRLSNALDFPFNYVDAIADNEIVSRLLGGNQMWSTTLDPLVVRQGTF

SEQ ID NO: 3793 - DNA, 1325 bp, Arabidopsis thaliana
actccgaccgtttcctttctcacaagccaatggcgcaacttactaattccctcaattatctcttttctgtttctctcttattatttgtatcgttccactgcttatgttttcgtttttcgttggttgcagcttgttcaaactccactgacgatcaacagattcaacaccatcaccaccggaaatgggttggtccctcaggccacaaagtcatcaccgtctcacttaacggccacgctcagtttcgctccgtccaagacgctgtggattccataccaaagaacaataacaagagcatcacaatcaagattgctcccggattttacagagagaaagtggtggttccagctacaaaaccgtacataacgttcaaaggagctggtagggatgtgaccgctatagagtggcacgaccgtgcgtccgaccttggcgctaacggtcaacagttacgtacctatcaaaccgcttccgtcaccgtctacgctaattatttcaccgctagaaacattagcttcacgaatactgcgccggctccattgccggggatgcaagggtggcaagcggtggcgtttaggatctccggcgacaaagctttcttttccggctgcgggttttacggtgcacaagacactttatgcgacgatgctggccgtcattacttcaaggagtgttacattgaaggctctatcgactttatctttggtaatggccgctccatgtataaagattgtgagttgcattcgatagcgtcaagattcgggtcgatagcggcgcatggtaggacatgcccggaagagaaaacgggtttcgcgttcgtgggttgtcgggtaacaggtacgggtccattgtatgtgggccgggccatgggacaatactcacgtatcgtttacgcctacacttactttgatgctctcgtcgctcacggtggttgggacgattgggaccacaaatccaacaaaagcaagacggcatttttcggagtgtacaattgctatgggccaggagcagcagcgacgagaggcgtgtcttgggctagagctttggactatgaatcggcccatccatttatcgctaagagcttcgttaatgggagacattggatcgctcctcgagatgcttaaccaacttcaaaccttggcggggtttcttttcctaattcctcggttcctcccagtcccaagtcctaaaagcttactatatttttatcattcgtttatttcttttattgtttattttttccaatttatttatacattgtgtgatcgtacaacaaagtattgcttcttcttcatctgtatccatttcagttaaatgttttgagcttacac

SEQ ID NO: 3794 - protein, 371 aa, Arabidopsis thaliana
SDRFLSHKPMAQLTNSLNYLFSVSLLLFVSFHCLCFRFSLVAACSNSTDDQQIQHHHHRKWVGPSGHKVITVSLNGHAQFRSVQDAVDSIPKNNNKSITIKIAPGFYREKVVVPATKPYITFKGAGRDVTAIEWHDRASDLGANGQQLRTYQTASVTVYANYFTARNISFTNTAPAPLPGMQGWQAVAFRISGDKAFFSGCGFYGAQDTLCDDAGRHYFKECYIEGSIDFIFGNGRSMYKDCELHSIASRFGSIAAHGRTCPEEKTGFAFVGCRVTGTGPLYVGRAMGQYSRIVYAYTYFDALVAHGGWDDWDHKSNKSKTAFFGVYNCYGPGAAATRGVSWARALDYESAHPFIAKSFVNGRHWIAPRDA

SEQ ID NO: 3795 - protein, 362 aa, Arabidopsis thaliana
MAQLTNSLNYLFSVSLLLFVSFHCLCFRFSLVAACSNSTDDQQIQHHHHRKWVGPSGHKVITVSLNGHAQFRSVQDAVDSIPKNNNKSITIKIAPGFYREKVVVPATKPYITFKGAGRDVTAIEWHDRASDLGANGQQLRTYQTASVTVYANYFTARNISFTNTAPAPLPGMQGWQAVAFRISGDKAFFSGCGFYGAQDTLCDDAGRHYFKECYIEGSIDFIFGNGRSMYKDCELHSIASRFGSIAAHGRTCPEEKTGFAFVGCRVTGTGPLYVGRAMGQYSRIVYAYTYFDALVAHGGWDDWDHKSNKSKTAFFGVYNCYGPGAAATRGVSWARALDYESAHPFIAKSFVNGRHWIAPRDA

SEQ ID NO: 3796 - protein, 191 aa, Arabidopsis thaliana
MQGWQAVAFRISGDKAFFSGCGFYGAQDTLCDDAGRHYFKECYIEGSIDFIFGNGRSMYKDCELHSIASRFGSIAAHGRTCPEEKTGFAFVGCRVTGTGPLYVGRAMGQYSRIVYAYTYFDALVAHGGWDDWDHKSNKSKTAFFGVYNCYGPGAAATRGVSWARALDYESAHPFIAKSFVNGRHWIAPRDA

SEQ ID NO: 3797 - DNA, 1324 bp, Arabidopsis thaliana
agtaaacaaaaagaatgactataagatccggattatgatccaagtctcatcgagctgacccggtaaagagactaatctctttcgataaccgattcatttaaaattcccttttgcttacttttctctctcctttcatcgagaaatttcgcggctacttctcttctgaaacgcaccgggacgcgccgtcgcacaagttacagaggagtgttggaaaggataaagacttggttttctggggtgccgtagatatggttacaggcgtggcttccgccatggcggagcggttaaaggaagacggaaacaattgctttaagaaagaacgttttggtgctgccattgatgcttataccgaggcaatagctttgtctccaaatgttcctgcttattggaccaatcgagcactttgccacatgaagcgaaaggattggactaaggttgaagaggattgtcgcaaagctattcagcttgtccacaattccgtcaaggcacactacatgctaggacttgcattattgcagaagaaagaatttactaatggagtcaaagaattgcaaagggctttagatcttggaagatgctcgaatccaacaggatatatggtagaagaaatatgggaagagctttctaaagcaaaatacatggagtgggaactggtttctgcaatgcggtcatgggaactgaatagtttgaaggaaacttgtgaggctgctcttaatcaacaacgtgctttagatatgtctcgaacagaagagtcctcagacgaagcatatactgcccatactgagcgtttgaaagctcttgaacgagtgtttaagaaagctgcagaagaagataaaccaactgaggtgccagattatttatgttgcaatataactcttgagattttccgagatcctgtaatttctccaagtggggttacatatgaaagagcagcaatccttgaacatctcaagaaggtggggaagtttgatcctataactcgtgaaaaaatcgacccggctaatctcgttccaaatctggctatcaaagaggcagtggcagcatatctagaaaaacacgtctgggcttacaagatgggttgttgatcgaaatggggattaacataaacacaatgaagcggatgagaaattgaggttaactactcaggtgaccgaacaaaacagatgggtgcgtttacctttttttcacatttgtgtttgttgttgccgatgttttcagtgtaagattctctgccctgtgtatatattacaatgtttttttgtgcactctgtacacattggccatatggcttagcctatataacacacatacagaatttatttac

SEQ ID NO: 3798 - protein, 278 aa, Arabidopsis thaliana
MVTGVASAMAERLKEDGNNCFKKERFGAAIDAYTEAIALSPNVPAYWTNRALCHMKRKDWTKVEEDCRKAIQLVHNSVKAHYMLGLALLQKKEFTNGVKELQRALDLGRCSNPTGYMVEEIWEELSKAKYMEWELVSAMRSWELNSLKETCEAALNQQRALDMSRTEESSDEAYTAHTERLKALERVFKKAAEEDKPTEVPDYLCCNITLEIFRDPVISPSGVTYERAAILEHLKKVGKFDPITREKIDPANLVPNLAIKEAVAAYLEKHVWAYKMGC

SEQ ID NO: 3799 - protein, 270 aa, Arabidopsis thaliana
MAERLKEDGNNCFKKERFGAAIDAYTEAIALSPNVPAYWTNRALCHMKRKDWTKVEEDCRKAIQLVHNSVKAHYMLGLALLQKKEFTNGVKELQRALDLGRCSNPTGYMVEEIWEELSKAKYMEWELVSAMRSWELNSLKETCEAALNQQRALDMSRTEESSDEAYTAHTERLKALERVFKKAAEEDKPTEVPDYLCCNITLEIFRDPVISPSGVTYERAAILEHLKKVGKFDPITREKIDPANLVPNLAIKEAVAAYLEKHVWAYKMGC

SEQ ID NO: 3800 - protein, 224 aa, Arabidopsis thaliana
MKRKDWTKVEEDCRKAIQLVHNSVKAHYMLGLALLQKKEFTNGVKELQRALDLGRCSNPTGYMVEEIWEELSKAKYMEWELVSAMRSWELNSLKETCEAALNQQRALDMSRTEESSDEAYTAHTERLKALERVFKKAAEEDKPTEVPDYLCCNITLEIFRDPVISPSGVTYERAAILEHLKKVGKFDPITREKIDPANLVPNLAIKEAVAAYLEKHVWAYKMGC

SEQ ID NO: 3801 - DNA, 1232 bp, Arabidopsis thaliana
gcaaaaacagtttgaccgaaaaaaaaggatttgtaaaacagagcacctgatggcgtcggtgaagttgccgtgggatttggaggaagagatactgtctcggcttccacctcgatctcttgttcggttcaggaccgtatgtaaacactggaacggtcttttcagcgacaagaggtttgtcaaaaagcacttggtccgtgcccgtccccaattcatcttccttaccgaatcgaagaagatgtactcgatagagatcgatctgggtggaacgatagaggtgcgtgaggtaccctacgattttcattgtcagcctatgaagaagaattttacaactatcatggcttgcgatgggttattgtttcgtgatttttggaaacaaggtgttgcggtttggaatccgtggttgagacaggttgggtggatcgggtatgaggataaaggtttccgtttttgcggtgtaggatacgatagttgtaaacccgataagtgttacaagatcttggggtattttaattgtacgcgtagactcagcgactctctccaggaaggttactaccaagctgcgatctacgagtgtgcatcgcaggcgttcaaatttattgatacccctgaccctttcaacctgtggcccaacaaggatcctttgtccgtgaacgggaatctttattggcttgctcataaccaccctgagactcttgagtatttcatcgaaacctttgatttctccatggagattttcaaacccttttgtctactgccgtgtcggaaggactttggtagcaatgaacttgtcctggcggtttttaaggaagatcggttttcattgttaaagcaatgcttcgaaacaacgaagattgagatttgggtaacaaagatgaagattgatagagaggaggaagtggtgtggataaagtttatgacattgccgacaaccaacttgcctaatctagatgatacttattgttgcagtagttacttcatctttgacaagaccataatcatgtgttgtggcgattacaaaactggagctacttgcatctatatggtgaggggagatatgttcaagaagattcagatcaattctgggatttttcagttttcttactgtgtctatcttccaaatttgatctcggttccttttgaatcacatcaagtttaattttttttttttgctaagagaacgaaacaagtttaaattctgaattttcttgattagttacaaatttgaattcgat

SEQ ID NO: 3802 - protein, 384 aa, Arabidopsis thaliana
QKQFDRKKRICKTEHLMASVKLPWDLEEEILSRLPPRSLVRFRTVCKHWNGLFSDKRFVKKHLVRARPQFIFLTESKKMYSIEIDLGGTIEVREVPYDFHCQPMKKNFTTIMACDGLLFRDFWKQGVAVWNPWLRQVGWIGYEDKGFRFCGVGYDSCKPDKCYKILGYFNCTRRLSDSLQEGYYQAAIYECASQAFKFIDTPDPFNLWPNKDPLSVNGNLYWLAHNHPETLEYFIETFDFSMEIFKPFCLLPCRKDFGSNELVLAVFKEDRFSLLKQCFETTKIEIWVTKMKIDREEEVVWIKFMTLPTTNLPNLDDTYCCSSYFIFDKTIIMCCGDYKTGATCIYMVRGDMFKKIQINSGIFQFSYCVYLPNLISVPFESHQV

SEQ ID NO: 3803 - protein, 368 aa, Arabidopsis thaliana
MASVKLPWDLEEEILSRLPPRSLVRFRTVCKHWNGLFSDKRFVKKHLVRARPQFIFLTESKKMYSIEIDLGGTIEVREVPYDFHCQPMKKNFTTIMACDGLLFRDFWKQGVAVWNPWLRQVGWIGYEDKGFRFCGVGYDSCKPDKCYKILGYFNCTRRLSDSLQEGYYQAAIYECASQAFKFIDTPDPFNLWPNKDPLSVNGNLYWLAHNHPETLEYFIETFDFSMEIFKPFCLLPCRKDFGSNELVLAVFKEDRFSLLKQCFETTKIEIWVTKMKIDREEEVVWIKFMTLPTTNLPNLDDTYCCSSYFIFDKTIIMCCGDYKTGATCIYMVRGDMFKKIQINSGIFQFSYCVYLPNLISVPFESHQV

SEQ ID NO: 3804 - protein, 306 aa, Arabidopsis thaliana
MYSIEIDLGGTIEVREVPYDFHCQPMKKNFTTIMACDGLLFRDFWKQGVAVWNPWLRQVGWIGYEDKGFRFCGVGYDSCKPDKCYKILGYFNCTRRLSDSLQEGYYQAAIYECASQAFKFIDTPDPFNLWPNKDPLSVNGNLYWLAHNHPETLEYFIETFDFSMEIFKPFCLLPCRKDFGSNELVLAVFKEDRFSLLKQCFETTKIEIWVTKMKIDREEEVVWIKFMTLPTTNLPNLDDTYCCSSYFIFDKTIIMCCGDYKTGATCIYMVRGDMFKKIQINSGIFQFSYCVYLPNLISVPFESHQV

SEQ ID NO: 3805 - DNA, 1600 bp, Arabidopsis thaliana
acttcttccaccttcttcttctcttcttcttctcttcttcttctacttccgcaaaaaccctttgagaaagagaagcaaaattctctaatcgttctttctctgccctaatccacgtatcgtttggtgttcttcttcatcgaatcgacatggcttcagatgctgacatggaggactatggattcgagtattctgatgaggagcaagaggaacaagatgttgacattgagaaccagtattataactctaaaggtatggttgagactgaacctgaagaagcactttctggatttgctgaggttgttcagatggaacctgagaaagctgactggggtttcaaagctcttaagcagactgtgaagatctattatcgtctaggtaaatacaaagaaatgatggaagcctatacagagatgcttacatatatcaagtcagcagtcaccaggaattacagcgaaaaatgtataaacaatatcatggatttcgtctctggatctgctagccagaacactggcctgctgcaagagttctatcagaccactttgaaagcccttgaagaggctaagaatgagagactctggttcaagacaaatcttaaactctgcaacatctggtttgacattggtgaatacagacggatgactaagattctgaaggaactccataagtcttgtcaaaaggaagatggaactgatgatcagaagaaaggaagtcagctgcttgaggtttatgcaattgaaattcagatttacactgaaacgaaggacaacaaaaagcttaagcaactataccataaggcacttgccatcaagtctgccatacctcatcctaggatcatgggtataatccgcgagtgtggtggaaaaatgcacatggcagaacgtcagtgggaagaagcagcgacagacttctttgaggcttttaaaaattacgatgaagctggcaaccaaagacgtatacagtgcctgaagtatcttgttctggcgaatatgctgatggagtcagaagtgaatccgtttgatggccaagaggcaaagccgtacaaaaacgaccctgagattttggcaatgacaaatttgatcgcagcatatcaacgaaatgagatcatagagtttgagagaatactaaagagtaaccggaggacgataatggatgatccattcatcagaaactacatggaagatctgctgaagaaagtgagaacacaagtgttactgaagctgattaagccatacacaaagatagggattccgttcatatcaaaggaactgaacgtgccagagacggatgtgacggagttactagtgtcgctgatactcgacagcagaatcgatggtcacattgatgaaatgaaccgttacttactgagaggcgacagtggcaatggaaggaagttgcataaggcggttgataaatggaactcacagctcaagtctctttcttcaaatatcaccagccgagtctgttaacttggaaacctctcttttggatagattttgtgatttggcgttgattctttgtggattatctgtttctcttcacatagctggatttgatggagtttataaaccacttcaatgccaagaaaaaggatttgaaactc

SEQ ID NO: 3806 - protein, 439 aa, Arabidopsis thaliana
MASDADMEDYGFEYSDEEQEEQDVDIENQYYNSKGMVETEPEEALSGFAEVVQMEPEKADWGFKALKQTVKIYYRLGKYKEMMEAYTEMLTYIKSAVTRNYSEKCINNIMDFVSGSASQNTGLLQEFYQTTLKALEEAKNERLWFKTNLKLCNIWFDIGEYRRMTKILKELHKSCQKEDGTDDQKKGSQLLEVYAIEIQIYTETKDNKKLKQLYHKALAIKSAIPHPRIMGIIRECGGKMHMAERQWEEAATDFFEAFKNYDEAGNQRRIQCLKYLVLANMLMESEVNPFDGQEAKPYKNDPEILAMTNLIAAYQRNEIIEFERILKSNRRTIMDDPFIRNYMEDLLKKVRTQVLLKLIKPYTKIGIPFISKELNVPETDVTELLVSLILDSRIDGHIDEMNRYLLRGDSGNGRKLHKAVDKWNSQLKSLSSNITSRVC

SEQ ID NO: 3807 - protein, 433 aa, Arabidopsis thaliana
MEDYGFEYSDEEQEEQDVDIENQYYNSKGMVETEPEEALSGFAEVVQMEPEKADWGFKALKQTVKIYYRLGKYKEMMEAYTEMLTYIKSAVTRNYSEKCINNIMDFVSGSASQNTGLLQEFYQTTLKALEEAKNERLWFKTNLKLCNIWFDIGEYRRMTKILKELHKSCQKEDGTDDQKKGSQLLEVYAIEIQIYTETKDNKKLKQLYHKALAIKSAIPHPRIMGIIRECGGKMHMAERQWEEAATDFFEAFKNYDEAGNQRRIQCLKYLVLANMLMESEVNPFDGQEAKPYKNDPEILAMTNLIAAYQRNEIIEFERILKSNRRTIMDDPFIRNYMEDLLKKVRTQVLLKLIKPYTKIGIPFISKELNVPETDVTELLVSLILDSRIDGHIDEMNRYLLRGDSGNGRKLHKAVDKWNSQLKSLSSNITSRVC

SEQ ID NO: 3808 - protein, 404 aa, Arabidopsis thaliana
MVETEPEEALSGFAEVVQMEPEKADWGFKALKQTVKIYYRLGKYKEMMEAYTEMLTYIKSAVTRNYSEKCINNIMDFVSGSASQNTGLLQEFYQTTLKALEEAKNERLWFKTNLKLCNIWFDIGEYRRMTKILKELHKSCQKEDGTDDQKKGSQLLEVYAIEIQIYTETKDNKKLKQLYHKALAIKSAIPHPRIMGIIRECGGKMHMAERQWEEAATDFFEAFKNYDEAGNQRRIQCLKYLVLANMLMESEVNPFDGQEAKPYKNDPEILAMTNLIAAYQRNEIIEFERILKSNRRTIMDDPFIRNYMEDLLKKVRTQVLLKLIKPYTKIGIPFISKELNVPETDVTELLVSLILDSRIDGHIDEMNRYLLRGDSGNGRKLHKAVDKWNSQLKSLSSNITSRVC

SEQ ID NO: 3809 - DNA, 1414 bp, Arabidopsis thaliana
gccgctgtgtcatcgtggaactcccattttctctcttttacttgttcgttcccaaactcttctccctcgatcgtctccgtcgccgatctcgtttcttcattttccgcgtgttgattggtacaaaggtttaatcaaatggttggaggaggagttatccagcaaattcttaggaggaagcttcactcccaatcacttgcaactccggttttgtcttggttttcttcgaagaaagctcatgaggatgctggttcttctggtgtaagagcacttgccttgttgggtgctggtgttacaggactgttgagtttttctacagtagcatctgctgatgaggctgaacatggattggagagtccagagtacccttggcctcatgatggcattcttagctcatatgaccatgcttcgatccgtcgtgggcatcaagtttatcagcaagtctgtgcatcatgccattcaatgtctctgatctcataccgagacttggtgggtgtcgcctacgcagaggaagaggcaaaggcaatggcagctgaaatcgaggtagtagatggacctaatgatgagggtgagatgttcacccgccctggtaaactcagtgaccggtttcctcagccatatgcaaatgaatcagctgcaaggtttgctaatggtggagcgtatcctcctgatctaagtcttataactaaggcacgtcacaatggtccaaactatgtctttgcgcttctgactggttaccgtgatccccctgctggcatatcgattagagaggggttacactacaatccttatttccctgggggagcaattgctatgccgaaaatgctcaatgatgaagctgttgagtatgaagatggtgtccccgccacagaggcacagatgggtaaagatattgtatcattcttggcctgggcagctgaaccagaaatggaagagaggaaactgatgggtttcaaatggatattcctactctctctcgctcttctccaagctgcttactacaggcgactaaaatggtcggttctcaagtcccgcaagctggttcttgacgtggttaactaaagcgccgctgagaagcttttgcattggcctggccacacacagtcgtattttcaacaaaggatgttaaatagagaagagcctttctctggtaataacgtatcatcatttttatgtgtcataaaaatctttgatgagaccagttctcacctgaaggtgaaaagacctcatcgttcttctttttccttcgattattactagagagttttatgaggataatcacgaaaacttgtttttttcgcctcataataatcacacatgattttgagattatatcatttgttatgtttttcctcttgtctcaataaaaaataactttgtactctgattttgttgtctattttcggcatttcttgcg

SEQ ID NO: 3810 - protein, 307 aa, Arabidopsis thaliana
MVGGGVIQQILRRKLHSQSLATPVLSWFSSKKAHEDAGSSGVRALALLGAGVTGLLSFSTVASADEAEHGLESPEYPWPHDGILSSYDHASIRRGHQVYQQVCASCHSMSLISYRDLVGVAYAEEEAKAMAAEIEVVDGPNDEGEMFTRPGKLSDRFPQPYANESAARFANGGAYPPDLSLITKARHNGPNYVFALLTGYRDPPAGISIREGLHYNPYFPGGAIAMPKMLNDEAVEYEDGVPATEAQMGKDIVSFLAWAAEPEMEERKLMGFKWIFLLSLALLQAAYYRRLKWSVLKSRKLVLDVVN

SEQ ID NO: 3811 - protein, 199 aa, Arabidopsis thaliana
MSLISYRDLVGVAYAEEEAKAMAAEIEVVDGPNDEGEMFTRPGKLSDRFPQPYANESAARFANGGAYPPDLSLITKARHNGPNYVFALLTGYRDPPAGISIREGLHYNPYFPGGAIAMPKMLNDEAVEYEDGVPATEAQMGKDIVSFLAWAAEPEMEERKLMGFKWIFLLSLALLQAAYYRRLKWSVLKSRKLVLDVVN

SEQ ID NO: 3812 - protein, 178 aa, Arabidopsis thaliana
MAAEIEVVDGPNDEGEMFTRPGKLSDRFPQPYANESAARFANGGAYPPDLSLITKARHNGPNYVFALLTGYRDPPAGISIREGLHYNPYFPGGAIAMPKMLNDEAVEYEDGVPATEAQMGKDIVSFLAWAAEPEMEERKLMGFKWIFLLSLALLQAAYYRRLKWSVLKSRKLVLDVVN

SEQ ID NO: 3813 - DNA, 1610 bp, Arabidopsis thaliana
accaccaactcaacacacacacgaatcccttaaaaccgatcagatcaaacaaaaacgaacgaatcaaaattcaataaaaaaaaacctttcgatttctctcatccaatcgaatcgaaaatcttgttatctctttctctctaactctactgcactcagaatctctctgtatagaaaaaccctaagtaggttgtgatgttgcgagctttagcacggcctctcgaacggtgtttgggaagcagagctagtggtgatggtttactctggcaatcggaattgagacctcacgctggcggtgattattcgatcgcggtggttcaagccaattccaggcttgaagatcagagtcaggttttcacatcttcttctgctacttacgtcggtgtatacgatggtcatggtggacctgaagcttctagattcgttaacagacatctctttccttatatgcacaaatttgcaagagaacatgggggattatctgtagatgttatcaaaaaggcattcaaagaaacagaagaagagttttgtggtatggttaaacgatcccttcccatgaaaccgcaaatggctactgtaggatcttgctgtcttgttggtgcaatctctaatgacacactgtatgttgctaatcttggggactcgagagccgttcttggaagcgttgtttcaggggttgatagtaataaaggtgccgtagctgaacggttatctactgatcataatgttgctgttgaagaagtgagaaaggaggttaaggcacttaaccctgatgactcacaaatcgtcttatacacacgtggagtttggcggattaaaggcattattcaggtatcgagatcaattggggatgtatacttgaaaaaaccggagtattacagggacccgattttccagcgacatggaaatcccattcctttgaggagacccgcgatgacagccgaaccctccattatagtaaggaagcttaagccacaggacttgtttctgatatttgcatcagatggtctctgggaacatcttagtgatgaaacagccgtagaaatcgtcctcaaacacccaagaactggtattgcccgaagacttgtaagagctgctctggaagaagcggcaaagaagagagaaatgagatatggagatataaagaaaatagccaaaggaattcgacgacatttccatgacgacataagcgttattgtagtttatctagatcaaaacaaaaccagttcatcgaatagtaaattggtgaagcaaggaggtatcaccgctccaccggatatctactcattacactctgatgaagcagagcaacgacggttactcaatgtgttatactgactgtttgattatggtaaaatggctgcttgggaaagatccgaatagggagaaaacttgtttacatatttgtttatttgtttttctacgaagaactggttttttttttttttcaatattggagttggatttgtatattcttttaccagcaaagaaggtcgaaaccctttagtttttgggcaaagcagttttgcttttgacacaaacaatacttttgtatgaaaatctagtgtgaaaccgttgaggacaactcttcatatatcagattgttttttttt

SEQ ID NO: 3814 - protein, 380 aa, Arabidopsis thaliana
MLRALARPLERCLGSRASGDGLLWQSELRPHAGGDYSIAVVQANSRLEDQSQVFTSSSATYVGVYDGHGGPEASRFVNRHLFPYMHKFAREHGGLSVDVIKKAFKETEEEFCGMVKRSLPMKPQMATVGSCCLVGAISNDTLYVANLGDSRAVLGSVVSGVDSNKGAVAERLSTDHNVAVEEVRKEVKALNPDDSQIVLYTRGVWRIKGIIQVSRSIGDVYLKKPEYYRDPIFQRHGNPIPLRRPAMTAEPSIIVRKLKPQDLFLIFASDGLWEHLSDETAVEIVLKHPRTGIARRLVRAALEEAAKKREMRYGDIKKIAKGIRRHFHDDISVIVVYLDQNKTSSSNSKLVKQGGITAPPDIYSLHSDEAEQRRLLNVLY

SEQ ID NO: 3815 - protein, 296 aa, Arabidopsis thaliana
MHKFAREHGGLSVDVIKKAFKETEEEFCGMVKRSLPMKPQMATVGSCCLVGAISNDTLYVANLGDSRAVLGSVVSGVDSNKGAVAERLSTDHNVAVEEVRKEVKALNPDDSQIVLYTRGVWRIKGIIQVSRSIGDVYLKKPEYYRDPIFQRHGNPIPLRRPAMTAEPSIIVRKLKPQDLFLIFASDGLWEHLSDETAVEIVLKHPRTGIARRLVRAALEEAAKKREMRYGDIKKIAKGIRRHFHDDISVIVVYLDQNKTSSSNSKLVKQGGITAPPDIYSLHSDEAEQRRLLNVLY

SEQ ID NO: 3816 - protein, 267 aa, Arabidopsis thaliana
MVKRSLPMKPQMATVGSCCLVGAISNDTLYVANLGDSRAVLGSVVSGVDSNKGAVAERLSTDHNVAVEEVRKEVKALNPDDSQIVLYTRGVWRIKGIIQVSRSIGDVYLKKPEYYRDPIFQRHGNPIPLRRPAMTAEPSIIVRKLKPQDLFLIFASDGLWEHLSDETAVEIVLKHPRTGIARRLVRAALEEAAKKREMRYGDIKKIAKGIRRHFHDDISVIVVYLDQNKTSSSNSKLVKQGGITAPPDIYSLHSDEAEQRRLLNVLY

SEQ ID NO: 3817 - DNA, 1792 bp, Arabidopsis thaliana
aaattttagaaagggaaaaaaaaaaaaggttacgcgaaggaaaccaaaaaccctttagggacttggatagaaaaaaaaaaaccattttgtgcatcttcttcaagctgcgccgctttctcactcttttttatctctcaaatttgaccttctccgttgttctttcgcatcgctcaggagcagaagcttcaatctttgataatgtcgaggaacaagggtttggctgagcaagatcttaaaaaattggatgtaactgtgctacatcctctgtctcctgaggtcatttctcgccaggccactattaatataggaaccattggtcatgtcgctcatggaaagtccactgttgttaaagctatttctggtgtccagactgtccgttttaaaaatgaattggagcgtaacattaccattaagcttggatatgcaaacgccaagatttacaaatgtgaggatgagaaatgccctagaccaatgtgttacaaggcctacggaagtggaaaggaagacactcccaattgtgatgtccccggatttgaaaactccaagatgaaactattgaggcatgtctcattcgttgattgcccgggtcacgatattctcatggcaacaatgcttaatggagcagccatcatggatggtgcactacttttaatcgctgcaaatgaaacttgtccacaaccacaaacgtctgaacatcttgctgccgttgagattatgcaacttaagcatatcatcatccttcagaacaagattgatcttattcaagagaatgttgccattaatcagcacgaggcaattcagaaatttataatgaacactgttgctgatgctgctccgatcgtccctgtctcagcacaactgaaatacaacattgatgtggtgtgcgagtacattgtcaagaagatcccaatccctgagaggaattttgtgtcacccccaaatatgatagtgattcggtcttttgatgtcaacaaacctggttatgaggttgatgagatcaaaggtggagttgcaggtggaagtatcctacggggtgttttgagagtcaaccaattaatcgaaatccgacctggtatcgttaccaaagacgagcgtggcaactcaaaatgcactccaatttactctcgcatcatttcactctacgcggaacagaacgagcttcagtttgctgttcctggaggtctaataggagttggaacaacaatggacccaactctcactcgtgcagatcgattagttggtcaagtccttggtgaaatcggttcacttcctgatgtatttgttgaactcgaggtgaacttctttcttctacgacgtttgttgggagtgagaacaaagggatcagagaaacaagggaaagtgtcaaagctaacgaaaggagagattctgatgctcaacattggttcgatgtccactggagccaaagttgtaggagttaaagtcgatctggctaaactgcaactgactgcgcctgtttgtaccagcaaaggagagaaagtggctctaagcagacgtgtggaaaagcattggcgtttgattggttggggtcagattcaagctggaaccaccatcgaagttcctccttcacctttctaagctatgtgttatttttgtcctttttgtttgtgtttctgaaaaaaagattgttaaacccctcaaaaagataataaaactctttttctcgttgggggattttggagagttcgtctttgcggattaaacatcttcaaacagtacctgatttgttattgttactagtttgctctttgttattgttactagtttgctcttt

SEQ ID NO: 3818 - protein, 465 aa, Arabidopsis thaliana
MSRNKGLAEQDLKKLDVTVLHPLSPEVISRQATINIGTIGHVAHGKSTVVKAISGVQTVRFKNELERNITIKLGYANAKIYKCEDEKCPRPMCYKAYGSGKEDTPNCDVPGFENSKMKLLRHVSFVDCPGHDILMATMLNGAAIMDGALLLIAANETCPQPQTSEHLAAVEIMQLKHIIILQNKIDLIQENVAINQHEAIQKFIMNTVADAAPIVPVSAQLKYNIDVVCEYIVKKIPIPERNFVSPPNMIVIRSFDVNKPGYEVDEIKGGVAGGSILRGVLRVNQLIEIRPGIVTKDERGNSKCTPIYSRIISLYAEQNELQFAVPGGLIGVGTTMDPTLTRADRLVGQVLGEIGSLPDVFVELEVNFFLLRRLLGVRTKGSEKQGKVSKLTKGEILMLNIGSMSTGAKVVGVKVDLAKLQLTAPVCTSKGEKVALSRRVEKHWRLIGWGQIQAGTTIEVPPSPF

SEQ ID NO: 3819 - protein, 374 aa, Arabidopsis thaliana
MCYKAYGSGKEDTPNCDVPGFENSKMKLLRHVSFVDCPGHDILMATMLNGAAIMDGALLLIAANETCPQPQTSEHLAAVEIMQLKHIIILQNKIDLIQENVAINQHEAIQKFIMNTVADAAPIVPVSAQLKYNIDVVCEYIVKKIPIPERNFVSPPNMIVIRSFDVNKPGYEVDEIKGGVAGGSILRGVLRVNQLIEIRPGIVTKDERGNSKCTPIYSRIISLYAEQNELQFAVPGGLIGVGTTMDPTLTRADRLVGQVLGEIGSLPDVFVELEVNFFLLRRLLGVRTKGSEKQGKVSKLTKGEILMLNIGSMSTGAKVVGVKVDLAKLQLTAPVCTSKGEKVALSRRVEKHWRLIGWGQIQAGTTIEVPPSPF

SEQ ID NO: 3820 - protein, 349 aa, Arabidopsis thaliana
MKLLRHVSFVDCPGHDILMATMLNGAAIMDGALLLIAANETCPQPQTSEHLAAVEIMQLKHIIILQNKIDLIQENVAINQHEAIQKFIMNTVADAAPIVPVSAQLKYNIDVVCEYIVKKIPIPERNFVSPPNMIVIRSFDVNKPGYEVDEIKGGVAGGSILRGVLRVNQLIEIRPGIVTKDERGNSKCTPIYSRIISLYAEQNELQFAVPGGLIGVGTTMDPTLTRADRLVGQVLGEIGSLPDVFVELEVNFFLLRRLLGVRTKGSEKQGKVSKLTKGEILMLNIGSMSTGAKVVGVKVDLAKLQLTAPVCTSKGEKVALSRRVEKHWRLIGWGQIQAGTTIEVPPSPF

SEQ ID NO: 3821 - DNA, 1209 bp, Arabidopsis thaliana
aaacactctccgaaacagagaacattttgagtttttatctaaagctaaatcctttgagcaacaatggtgaaggcaacaaaagcagagaagaagatagcgtatgacacaaaactatgtcagcttatcgacgaatacactcagatcttagtcgttgcggcggacaacgtcggatcgactcagcttcagaacatcaggaaaggtcttcgtggagactcagtggttctcatgggtaagaacactatgatgaaacgttccgttagaatccactccgagaactctggaaacactgcaattttgaatctgcttcccctccttcagggaaacgttggtttgatcttcactaaaggtgatctcaaggaagtgagcgaggaggttgccaaatacaaggttggtgctcctgctcgtgtgggtttagttgctcctattgatgtggttgttcaacctggcaacactggtcttgacccatctcaaacatcgttcttccaggtgcttaacattcccactaagattaacaagggtactgttgaaattatcacccctgtggagcttatcaagcaaggtgacaaggttgggtcttctgaggctgcccttctagctaagcttggcattaggcctttctcgtatggtctagttgttcagtcggtttatgataatggatcagtcttcagtccagaggttcttgatcttactgaagatcaacttgttgaaaagtttgcttctggtatctctatggtcacttccttggctctagctgtttcttaccctacccttgcggctgcaccgcatatgttcatcaatgcctacaagaatgctttagctattgctgttgctactgactacactttccctcaagcagagaaggtcaaggaattcttaaaggatcccagcaagtttgttgttgctgcagcggcagtgtctgcggatgcaggtggtggtagtgctcaagctggagctgcagctaaggtagaggagaagaaagaagaatcagacgaagaagactatgagggtggtttcggtttgtttgacgaagagtaggttttgtctataaggttttacctttttttgtggtggcttatagttataatctaagtgttgcttcgtttgtagtaaggctgatctcaaatgtttttggtttcaagacaattcagattttatgtttggaaagacttttatctaccaacttcaaaagaaatgttagtttttttcttt

SEQ ID NO: 3822 - protein, 323 aa, Arabidopsis thaliana
MVKATKAEKKIAYDTKLCQLIDEYTQILVVAADNVGSTQLQNIRKGLRGDSVVLMGKNTMMKRSVRIHSENSGNTAILNLLPLLQGNVGLIFTKGDLKEVSEEVAKYKVGAPARVGLVAPIDVVVQPGNTGLDPSQTSFFQVLNIPTKINKGTVEIITPVELIKQGDKVGSSEAALLAKLGIRPFSYGLVVQSVYDNGSVFSPEVLDLTEDQLVEKFASGISMVTSLALAVSYPTLAAAPHMFINAYKNALAIAVATDYTFPQAEKVKEFLKDPSKFVVAAAAVSADAGGGSAQAGAAAKVEEKKEESDEEDYEGGFGLFDEE

SEQ ID NO: 3823 - protein, 269 aa, Arabidopsis thaliana
MGKNTMMKRSVRIHSENSGNTAILNLLPLLQGNVGLIFTKGDLKEVSEEVAKYKVGAPARVGLVAPIDVVVQPGNTGLDPSQTSFFQVLNIPTKINKGTVEIITPVELIKQGDKVGSSEAALLAKLGIRPFSYGLVVQSVYDNGSVFSPEVLDLTEDQLVEKFASGISMVTSLALAVSYPTLAAAPHMFINAYKNALAIAVATDYTFPQAEKVKEFLKDPSKFVVAAAAVSADAGGGSAQAGAAAKVEEKKEESDEEDYEGGFGLFDEE

SEQ ID NO: 3824 - protein, 264 aa, Arabidopsis thaliana
MMKRSVRIHSENSGNTAILNLLPLLQGNVGLIFTKGDLKEVSEEVAKYKVGAPARVGLVAPIDVVVQPGNTGLDPSQTSFFQVLNIPTKINKGTVEIITPVELIKQGDKVGSSEAALLAKLGIRPFSYGLVVQSVYDNGSVFSPEVLDLTEDQLVEKFASGISMVTSLALAVSYPTLAAAPHMFINAYKNALAIAVATDYTFPQAEKVKEFLKDPSKFVVAAAAVSADAGGGSAQAGAAAKVEEKKEESDEEDYEGGFGLFDEE

SEQ ID NO: 3825 - DNA, 2754 bp, Arabidopsis thaliana
acgatacaaccaaaaactcaactctcaactccggaactcccccaaactattcaactcttatcttcttcttctgaaatttcatagctttctgactaaaagttctgattttttttgaagctgtgcacgtgaaagggatttcaatgtattctaaactatcatcacctctatgccccgtgattccattatgtcttttcttcttttcacacagtctgtcttctttctgagctttcccatccaactttctccagtcccagacaccaccaagttatgaggttgtctctatggggatctctcctgttcttctccttcttcgtcaagcatctgacgagcctagatcccaacaccgacgcttatcatctctctagcttcttctccgcaatgagattacccaattctccccaagctcatacgttttcttccttgtgttcatggccaggagtggtcgtctgtgactctagtgagaatgtgttgcatatttcggcttctgggttggacctgtctggttcgatccccgacaacactattggcaaaatgagtaagctccaaactttagatctcagtggaaacaagattacgtctctcccctcggatttgtggagtctcagcttgcttgagagtctcaatctctcctccaaccggatttctgagcctcttcccagcaacatcggcaatttcatgtcgcttcacacccttgatctttctttcaacagcatctctggcaaaatccctgccgcaataagcaaccttgtcaatctaacaactctcaagctccacaacaatgactttcagtttggcgtccctccagaacttgtccattgccgatctctactctccatcgacctctcatccaaccgcctcaacgagtctctgcctgtcggttttggttcagctttcccactactaaaaagcttgaacctttcacgaaatctgtttcagggttcattgataggagtcttgcatgaaaacgtggaaacagttgatctcagtgaaaaccgatttgatgggcatatcttgcagttaatacccggccacaaacacaactggtctagtctgattcatcttgacttgtccgataatagctttgtcggccatatattcaatggtttgagttcagctcacaagctgggacaccttaacctcgcgtgcaatcgattcagggcacaagagttcccagaaatcggcaagctttctgcgctacattatctgaatctatcaaggaccaatctcactaatatcattccgcgtgaaatctcgcggctgagtcatctgaaggttcttgatctctcctccaataatctcactggccacgtgcctatgctgagcgtcaagaacattgaagtacttgatctctcgttgaataagctagacggagatatcccaaggccgcttttggagaaactcgccatgatgcaaaggtttaacttctctttcaacaatctaaccttttgcaaccccaacttctcccaagaaacaatccagagatccttcattaatattagaaacaactgccccttcgctgcaaagccaattattacaaaaggaaagaaagtcaacaagaagaatacagggcttaagattggtttggggttagcaatctccatggcgttcttacttataggactactgctcatacttgtagccttgagagttagaagaaaatcaagaacttgggcaacaaagctagccataaacaacacagaacccaactccccagaccaacacgactcaaccactgatatcaagcaagcaacgcaaatccctgtggtaatgatcgacaagccattaatgaaaatgacgcttgcagacctaaaggctgcgactttcaacttcgacagaggcacaatgttgtgggaaggcaagtctggtcctacttacggagcagtcttacccggtggattcagagcagctctaaaagttatcccaagtggaaccacattgactgatactgaagtctcgattgcatttgaacgtctcgctaggatcaatcacccaaatcttttcccgctctgtggatactgtatagcgacagagcaaagaattgcaatctacgaggacttagacatggttaatttgcaaagtctactccataacaacggagatgattctgcaccttggagacttcggcataagatagctttggggacagcgagggcattagctttccttcaccatggctgcattcctccaatggtccacggagaagtgaaggctgcaacaatcttgttagactctagccaggagccacgcttagcagactttggtttagttaaactcttggacgagcaatttcccggttccgaaagtttagacgggtacacaccaccggaacaggagcgaaatgcttctccgacattagaatccgatgtgtatagctttggagttgttttgcttgagctcgtgagtgggaagaagccggagggtgacttggtgaattgggtgagagggttggtgaggcagggacaaggattgagagccattgatccgacgatgcaagagacagttccggaggatgaaatcgcggaggcggtgaagatagggtacttgtgtaccgccgatctgccatggaagcgacctacgatgcagcaggtggttggacttctcaaagacatttctcccaactactagtgggctagttatgggcctcataatgggcttatcacacttaacatgaatattaacatggctcttaagtttgtatgtttattgttgttgattagaagaaatggaaaaacatgaaaagagccgtttatattt

SEQ ID NO: 3826 - protein, 785 aa, Arabidopsis thaliana
MRLSLWGSLLFFSFFVKHLTSLDPNTDAYHLSSFFSAMRLPNSPQAHTFSSLCSWPGVVVCDSSENVLHISASGLDLSGSIPDNTIGKMSKLQTLDLSGNKITSLPSDLWSLSLLESLNLSSNRISEPLPSNIGNFMSLHTLDLSFNSISGKIPAAISNLVNLTTLKLHNNDFQFGVPPELVHCRSLLSIDLSSNRLNESLPVGFGSAFPLLKSLNLSRNLFQGSLIGVLHENVETVDLSENRFDGHILQLIPGHKHNWSSLIHLDLSDNSFVGHIFNGLSSAHKLGHLNLACNRFRAQEFPEIGKLSALHYLNLSRTNLTNIIPREISRLSHLKVLDLSSNNLTGHVPMLSVKNIEVLDLSLNKLDGDIPRPLLEKLAMMQRFNFSFNNLTFCNPNFSQETIQRSFINIRNNCPFAAKPIITKGKKVNKKNTGLKIGLGLAISMAFLLIGLLLILVALRVRRKSRTWATKLAINNTEPNSPDQHDSTTDIKQATQIPVVMIDKPLMKMTLADLKAATFNFDRGTMLWEGKSGPTYGAVLPGGFRAALKVIPSGTTLTDTEVSIAFERLARINHPNLFPLCGYCIATEQRIAIYEDLDMVNLQSLLHNNGDDSAPWRLRHKIALGTARALAFLHHGCIPPMVHGEVKAATILLDSSQEPRLADFGLVKLLDEQFPGSESLDGYTPPEQERNASPTLESDVYSFGVVLLELVSGKKPEGDLVNWVRGLVRQGQGLRAIDPTMQETVPEDEIAEAVKIGYLCTADLPWKRPTMQQVVGLLKDISPNY

SEQ ID NO: 3827 - protein, 748 aa, Arabidopsis thaliana
MRLPNSPQAHTFSSLCSWPGVVVCDSSENVLHISASGLDLSGSIPDNTIGKMSKLQTLDLSGNKITSLPSDLWSLSLLESLNLSSNRISEPLPSNIGNFMSLHTLDLSFNSISGKIPAAISNLVNLTTLKLHNNDFQFGVPPELVHCRSLLSIDLSSNRLNESLPVGFGSAFPLLKSLNLSRNLFQGSLIGVLHENVETVDLSENRFDGHILQLIPGHKHNWSSLIHLDLSDNSFVGHIFNGLSSAHKLGHLNLACNRFRAQEFPEIGKLSALHYLNLSRTNLTNIIPREISRLSHLKVLDLSSNNLTGHVPMLSVKNIEVLDLSLNKLDGDIPRPLLEKLAMMQRFNFSFNNLTFCNPNFSQETIQRSFINIRNNCPFAAKPIITKGKKVNKKNTGLKIGLGLAISMAFLLIGLLLILVALRVRRKSRTWATKLAINNTEPNSPDQHDSTTDIKQATQIPVVMIDKPLMKMTLADLKAATFNFDRGTMLWEGKSGPTYGAVLPGGFRAALKVIPSGTTLTDTEVSIAFERLARINHPNLFPLCGYCIATEQRIAIYEDLDMVNLQSLLHNNGDDSAPWRLRHKIALGTARALAFLHHGCIPPMVHGEVKAATILLDSSQEPRLADFGLVKLLDEQFPGSESLDGYTPPEQERNASPTLESDVYSFGVVLLELVSGKKPEGDLVNWVRGLVRQGQGLRAIDPTMQETVPEDEIAEAVKIGYLCTADLPWKRPTMQQVVGLLKDISPNY

SEQ ID NO: 3828 - protein, 697 aa, Arabidopsis thaliana
MSKLQTLDLSGNKITSLPSDLWSLSLLESLNLSSNRISEPLPSNIGNFMSLHTLDLSFNSISGKIPAAISNLVNLTTLKLHNNDFQFGVPPELVHCRSLLSIDLSSNRLNESLPVGFGSAFPLLKSLNLSRNLFQGSLIGVLHENVETVDLSENRFDGHILQLIPGHKHNWSSLIHLDLSDNSFVGHIFNGLSSAHKLGHLNLACNRFRAQEFPEIGKLSALHYLNLSRTNLTNIIPREISRLSHLKVLDLSSNNLTGHVPMLSVKNIEVLDLSLNKLDGDIPRPLLEKLAMMQRFNFSFNNLTFCNPNFSQETIQRSFINIRNNCPFAAKPIITKGKKVNKKNTGLKIGLGLAISMAFLLIGLLLILVALRVRRKSRTWATKLAINNTEPNSPDQHDSTTDIKQATQIPVVMIDKPLMKMTLADLKAATFNFDRGTMLWEGKSGPTYGAVLPGGFRAALKVIPSGTTLTDTEVSIAFERLARINHPNLFPLCGYCIATEQRIAIYEDLDMVNLQSLLHNNGDDSAPWRLRHKIALGTARALAFLHHGCIPPMVHGEVKAATILLDSSQEPRLADFGLVKLLDEQFPGSESLDGYTPPEQERNASPTLESDVYSFGVVLLELVSGKKPEGDLVNWVRGLVRQGQGLRAIDPTMQETVPEDEIAEAVKIGYLCTADLPWKRPTMQQVVGLLKDISPNY

SEQ ID NO: 3829 - DNA, 927 bp, Arabidopsis thaliana
tgaagacaaagcgcagaaaatggtgggagcgactgtagttagtaaatggactcccctatgtgtggcttcgccgccggagagaaactcggcaagtctcaatccacactgttctccagccagggttaattttagaacagcgttggccgcatttcgtcctcagttccgtcttttctctcgcaattccgcgtctcgccgccgtcttcgcgcttccagctccgccgaatcgggaatcttccttcctcaccttgtagcttctatggaggacgttgaggagacttacattatggtgaaacctgatggcatacaacgaggccttgtaggagaaatcatttctcgctttgagaaaaaggggtttaaacttattgggctcaagatgtttcagtgcccaaaagaattggctgaggagcattataaggatcttagtgctaaatcattctttcctaacctgattgagtacatcacttcaggtccagttgtgtgtatggcttgggaaggtgttggtgttgttgcttcagccaggaagctaatagggaaaacagatccgcttcaagctgaacctggtactataagaggagatcttgctgtgcaaaccggaaggaacattgtgcatggtagtgacagccctgaaaacggcaagcgtgagattggtctgtggttcaaagagggcgagctatgcaagtgggattcggctctagctacatggctaagggagtgatccttgagaagacagagtcaattataatggtgtccttacttgttttcttgttaccgatgatgagctttggtgttttgttcctgattttgggcggcaatataatataactgccaatctatggcttgattcttctcatatctgtgatcacttgtcatgtaatcaaaactagttacagattcatctgcatttggttctacgttacagacacctcc

SEQ ID NO: 3830 - protein, 237 aa, Arabidopsis thaliana
EDKAQKMVGATVVSKWTPLCVASPPERNSASLNPHCSPARVNFRTALAAFRPQFRLFSRNSASRRRLRASSSAESGIFLPHLVASMEDVEETYIMVKPDGIQRGLVGEIISRFEKKGFKLIGLKMFQCPKELAEEHYKDLSAKSFFPNLIEYITSGPVVCMAWEGVGVVASARKLIGKTDPLQAEPGTIRGDLAVQTGRNIVHGSDSPENGKREIGLWFKEGELCKWDSALATWLRE

SEQ ID NO: 3831 - protein, 231 aa, Arabidopsis thaliana
MVGATVVSKWTPLCVASPPERNSASLNPHCSPARVNFRTALAAFRPQFRLFSRNSASRRRLRASSSAESGIFLPHLVASMEDVEETYIMVKPDGIQRGLVGEIISRFEKKGFKLIGLKMFQCPKELAEEHYKDLSAKSFFPNLIEYITSGPVVCMAWEGVGVVASARKLIGKTDPLQAEPGTIRGDLAVQTGRNIVHGSDSPENGKREIGLWFKEGELCKWDSALATWLRE

SEQ ID NO: 3832 - protein, 152 aa, Arabidopsis thaliana
MEDVEETYIMVKPDGIQRGLVGEIISRFEKKGFKLIGLKMFQCPKELAEEHYKDLSAKSFFPNLIEYITSGPVVCMAWEGVGVVASARKLIGKTDPLQAEPGTIRGDLAVQTGRNIVHGSDSPENGKREIGLWFKEGELCKWDSALATWLRE

SEQ ID NO: 3833 - DNA, 1070 bp, Arabidopsis thaliana
attacatgtaaatatctctcattaatacaacctcacgaagaaaaccatttgttttcttagagagagccaagaatattaaaagagatatagagaaaagatttgctttaataatgccaacgtcgatacagtttcagagatcctccaccgccgcagaagcagccaacgccaccgtaagaaactatccccaccaccatcagaaacaggttcaaaaagtgagcctcacgcgcgggatggctgatgtgccggagcacgtggagctttcccacacgcacgtggttggtccttctcagtgcttctccgtcgtggtacaagacgtggaggctccggtttccacagtctggtcgatcctaagccgcttcgaacaccctcaagcgtacaaacacttcgtgaaaagctgccacgtggttatcggagacggtcgagaggttgggtcggtgagagaggtcagagtcgtctctggtctccccgcggcgtttagcttagagcggcttgagatcatggacgatgatcgccacgtcatcagtttcagcgtcgttggtggggaccacagactcatgaactacaagtcggtgacgacggtgcatgagtcggaggaggactccgacggcaagaagaggacacgtgtcgttgagtcatacgtcgttgacgtaccggcgggtaacgataaggaagagacttgtagctttgctgatactatagtacggtgcaacttgcaatcgctggctaaactcgccgagaacacttctaaattctcgtaattacattttttcaatctttttatttttattttattttctatatttctctctttcaaaatttatcttttatttttgggattctcgaggtggttttggattttaagatttaagtatttaactatcgtcggggatttttcgaaactaaaacaaaaaacaagaattatatcaaacaagatggttttggtttttcgaagttagggtttttagggtctgttaaatgtatgtctcaacgatactttggttttacccttaaaaccatttcttcttgtacagctctcgtagctttattatataaacattgattgtttagtt

SEQ ID NO: 3834 - protein, 215 aa, Arabidopsis thaliana
MPTSIQFQRSSTAAEAANATVRNYPHHHQKQVQKVSLTRGMADVPEHVELSHTHVVGPSQCFSVVVQDVEAPVSTVWSILSRFEHPQAYKHFVKSCHVVIGDGREVGSVREVRVVSGLPAAFSLERLEIMDDDRHVISFSVVGGDHRLMNYKSVTTVHESEEDSDGKKRTRVVESYVVDVPAGNDKEETCSFADTIVRCNLQSLAKLAENTSKFS

SEQ ID NO: 3835 - protein, 175 aa, Arabidopsis thaliana
MADVPEHVELSHTHVVGPSQCFSVVVQDVEAPVSTVWSILSRFEHPQAYKHFVKSCHVVIGDGREVGSVREVRVVSGLPAAFSLERLEIMDDDRHVISFSVVGGDHRLMNYKSVTTVHESEEDSDGKKRTRVVESYVVDVPAGNDKEETCSFADTIVRCNLQSLAKLAENTSKFS

SEQ ID NO: 3836 - DNA, 1152 bp, Arabidopsis thaliana
aaaaatttgaggtgtcttctacagatcaatattgatctccaacactctctggttcccagatcttcttcaaccttataccctagtttcgcaatttcattctcattttctccgctcttcatctctttcgatcaaccaatttacgacatggatgaggttgttgttgaagtggagaagacgaagagagaatgggaagaagcgtacgagaagacgattggacatattatctcgattcaacagtacggtaaatcaaggaggggagatggaggagaagagaagttttcgttacagaggctcaacggattggctcaggatggtctctctcttctcaattcccttcaattcaatttggatctgctcgcacctcagcttccttctgatgatcaggttcaatccactcagtcactccttgaaacgtggaagaatcaatatcacagtttgagggtaaacttgagaagtgctaatttgcaagctaaggataacatgaggaaagcagctcaagaagagagagagcttctcctcggtggtggaacagagtctacagttctcagacgtaaacgacaggcaaatgctggcgtgacatccgatgctgaaagcataactgaaagtctcaggcattcacggcagctgatggttcaggaggttgaacgaagtacaaacactctcgtggcttttgatgaatctactggagtacttaaaaaagccgagagtgaatacaaaggtcatagatctctgttgtcgaggacccgtaatctactttcaacaatgcagcgtcaagatgtaattgacaggataatcctcatagttggattttctctctttgtctttgctgttgtttacgttgtttcaaaacgcatcggaattctgaaactgcaacgaatggctactgctgctattaaagctcaattagctggaaaagcagcaaatggtgtaggagatgatgttatgccgctcggacaacagtttgatggcaatacagttccaactgttaatattcctctacaacaacgcatgcacgatgaactatgaagctcattagatgcttgtaacattgttcaggaatatatatattacaagttgatgttgttacctaggaatgctctctatattaccacatgtttcatggacaactgaaattaaagtttctttaagatg

SEQ ID NO: 3837 - protein, 341 aa, Arabidopsis thaliana
KNLRCLLQINIDLQHSLVPRSSSTLYPSFAISFSFSPLFISFDQPIYDMDEVVVEVEKTKREWEEAYEKTIGHIISIQQYGKSRRGDGGEEKFSLQRLNGLAQDGLSLLNSLQFNLDLLAPQLPSDDQVQSTQSLLETWKNQYHSLRVNLRSANLQAKDNMRKAAQEERELLLGGGTESTVLRRKRQANAGVTSDAESITESLRHSRQLMVQEVERSTNTLVAFDESTGVLKKAESEYKGHRSLLSRTRNLLSTMQRQDVIDRIILIVGFSLFVFAVVYVVSKRIGILKLQRMATAAIKAQLAGKAANGVGDDVMPLGQQFDGNTVPTVNIPLQQRMHDEL

SEQ ID NO: 3838 - protein, 293 aa, Arabidopsis thaliana
MDEVVVEVEKTKREWEEAYEKTIGHIISIQQYGKSRRGDGGEEKFSLQRLNGLAQDGLSLLNSLQFNLDLLAPQLPSDDQVQSTQSLLETWKNQYHSLRVNLRSANLQAKDNMRKAAQEERELLLGGGTESTVLRRKRQANAGVTSDAESITESLRHSRQLMVQEVERSTNTLVAFDESTGVLKKAESEYKGHRSLLSRTRNLLSTMQRQDVIDRIILIVGFSLFVFAVVYVVSKRIGILKLQRMATAAIKAQLAGKAANGVGDDVMPLGQQFDGNTVPTVNIPLQQRMHDEL

SEQ ID NO: 3839 - protein, 181 aa, Arabidopsis thaliana
MRKAAQEERELLLGGGTESTVLRRKRQANAGVTSDAESITESLRHSRQLMVQEVERSTNTLVAFDESTGVLKKAESEYKGHRSLLSRTRNLLSTMQRQDVIDRIILIVGFSLFVFAVVYVVSKRIGILKLQRMATAAIKAQLAGKAANGVGDDVMPLGQQFDGNTVPTVNIPLQQRMHDEL

SEQ ID NO: 3840 - DNA, 941 bp, Arabidopsis thaliana
aaaatcagccctaactctgtttttgttttcttcgacgactggggtcttttctctctcgctctcgtcttcctcttgattctcttcttcttttctggagtttcgctgcttttttagcctgtaaaaatgacgaaaattttataaaaagattcatacaagaaaaaagcaaatttcgccactgatggatcctatggagtcgtctagtgaacaggacattgttgaagagagtcaaaagctggttgactcattggacaagcttcgtgttagtgctgcgagttcatcttctaatttcaagaagaagcctatcattattattgttgttggaatggcaggtagtggaaaaactagctttcttcatcgcttggtctgtcatacttttgattcaaagagccgtgggtatgtggtgaaccttgaccctgctgttatgtctttaccatttggtgccaacatcgatataagagacactgtcaagtacaaggaagttatgaagcagtacaatctggggcctaatggtggaattctcacttcactcaacttgtttgctactaaattcgacgaggttgtctctgtgattgagaaacgtgcagaccagcttgattatgttcttgtggacactcctggtcagattgagatttttacatggtctgcttctggggctataatcactgaagctttcgcttcaaccttccccactgttgtcacctatgtggttgatactccccgttcctcaagcccaatcacttttatgagcaacatgctctacgcttgtagtattctctacaagactcggttgcctcttgtcttggctttcaacaaaactgatgtggcagatcacaagtttgctttagagtggatggaagatttcgaggtttttcaagcagcgattcagactgataactcgtacacggcgaccttagctaacagtctctccctttcactctacg

SEQ ID NO: 3841 - protein, 254 aa, Arabidopsis thaliana
MDPMESSSEQDIVEESQKLVDSLDKLRVSAASSSSNFKKKPIIIIVVGMAGSGKTSFLHRLVCHTFDSKSRGYVVNLDPAVMSLPFGANIDIRDTVKYKEVMKQYNLGPNGGILTSLNLFATKFDEVVSVIEKRADQLDYVLVDTPGQIEIFTWSASGAIITEAFASTFPTVVTYVVDTPRSSSPITFMSNMLYACSILYKTRLPLVLAFNKTDVADHKFALEWMEDFEVFQAAIQTDNSYTATLANSLSLSLY

SEQ ID NO: 3842 - protein, 251 aa, Arabidopsis thaliana
MESSSEQDIVEESQKLVDSLDKLRVSAASSSSNFKKKPIIIIVVGMAGSGKTSFLHRLVCHTFDSKSRGYVVNLDPAVMSLPFGANIDIRDTVKYKEVMKQYNLGPNGGILTSLNLFATKFDEVVSVIEKRADQLDYVLVDTPGQIEIFTWSASGAIITEAFASTFPTVVTYVVDTPRSSSPITFMSNMLYACSILYKTRLPLVLAFNKTDVADHKFALEWMEDFEVFQAAIQTDNSYTATLANSLSLSLY

SEQ ID NO: 3843 - protein, 206 aa, Arabidopsis thaliana
MAGSGKTSFLHRLVCHTFDSKSRGYVVNLDPAVMSLPFGANIDIRDTVKYKEVMKQYNLGPNGGILTSLNLFATKFDEVVSVIEKRADQLDYVLVDTPGQIEIFTWSASGAIITEAFASTFPTVVTYVVDTPRSSSPITFMSNMLYACSILYKTRLPLVLAFNKTDVADHKFALEWMEDFEVFQAAIQTDNSYTATLANSLSLSLY

SEQ ID NO: 3844 - DNA, 2261 bp, Arabidopsis thaliana
gtttcttcttcaacctctttgtcagagaagtttcaaaaccccccacacacactttacacactcttcatcttcttcttcttcttcatcgttttcgatttgttgctccgataatgtcgtttctataacccgaagatcatcaacgaagaaagcgaaataaacctcaaaaatcacagagattattacaaatggcggctactgattttttcttcgctttcgtcttctctttcgctcttatcttcggcttctctttcgctggtgatccttacgtctcttacgatttcaccctctcctacatcactgcttctcctctcggtgttcctcaacaggttatagcagtcaatgggaaatttccaggtcctgtgattaacgctacgacaaactacaatgttcatgttaacgtactcaatcatttggatgagcctcttttacttacttggcctggtgttcagatgaggcgtaactcgtggcaagacggtgttcttggaacaaactgtccaattccaccgaattggaacttcacttatgattttcagttgaaagatcagattggaagttatttctactctccttcacttaactttcagagagcctctggtggttttggtgcactcataatcaataacagagaccttgttcctattccgttcactgagcctgatggtgaaatcatctttattattggtgattggtatactcagaaccatacagctttaaggaggatacttgactctggtaaagaacttgggatgcccgatggagtactcatcaatgggaaaggtcctttcaagtacaatagcagtgtacctgatggaattgaacatgaaaccgttaatgttgatccagggaaaacatacaggatccgtgttcacaatgttggtatctcgacaagcttgaacttcaggattcagaaccacaaattgctcttgattgagactgagggtcgctacacctcccaaatgaacttcaccgattttgatgttcatgtgggacagtcttattctttcctggtaaccatggaccaaaacgccacaagtgactactacattgtggcgagtgctagatttgttaatgaaacagtgtggcaaagagtcacaggtgttggcattctccattattccaattccaaaggacctgcttctggtcctttgccagtttcagcaactgatgttaatcacccttggtctgcaatgaaccaaccgagagccataaagcaaaacacatctgcaagtggagctcgtccaaatccgcagggatcatttcactacggacagatcaacattacaagaacatacatcttgaggagtttgcctccaacaaaaatcaatgggaaacttcgtgctacacttaatggaatttcatttgtcaatccaagcacccccatgaggcttgcggatgaccataaagtgaaaggagattatatgttagattttccagacagaccacttgatgaaaaacttccacgtttgtccagctctatcatcaacgcaacatacaagggctttatacaagttatcttccagaacaatgacaccaaaatccagagcttccatattgatggatatgcattttacgtggttgcgatggactttggtatatggtcagaagacagaaacagttcttataacaactgggatgcagtagcacgaagcacggtggaggtctatccaggagcatggactgctgtacttatttctctcgataatgttggagtttggaatatccgggttgagaatcttgacagatggtatcttggccaagaaacatacatgcgaattataaaccctgaggaaaacggaagtacggaaatggatccgcctgaaaatgttatgtattgtggtgctcttcaggccatgcaaaaggaacaacatcacagctcggccacaaaatcaatgacaaatggacagttgatactaattttcagcatgatgatggttttgctctcctcgttttcgtccttttgctgagtctgttccatcatttacgaatctactctggtttggtattctgatctcccattagggctgtagatggagaatgtataactacaaacagctgttgggttcgttctgtttctctcatatttcattgattgttaggtactcatatcttctatcctcatgattctaaacaacgttagttcgtgagggtttgtgtttagagctttgttcttcgtagttctaggtcatttggagttcaaaactttggcaacgactgtaactaaagttctcatttgttggtcttctacattaatttctactatt

SEQ ID NO: 3845 - protein, 592 aa, Arabidopsis thaliana
MAATDFFFAFVFSFALIFGFSFAGDPYVSYDFTLSYITASPLGVPQQVIAVNGKFPGPVINATTNYNVHVNVLNHLDEPLLLTWPGVQMRRNSWQDGVLGTNCPIPPNWNFTYDFQLKDQIGSYFYSPSLNFQRASGGFGALIINNRDLVPIPFTEPDGEIIFIIGDWYTQNHTALRRILDSGKELGMPDGVLINGKGPFKYNSSVPDGIEHETVNVDPGKTYRIRVHNVGISTSLNFRIQNHKLLLIETEGRYTSQMNFTDFDVHVGQSYSFLVTMDQNATSDYYIVASARFVNETVWQRVTGVGILHYSNSKGPASGPLPVSATDVNHPWSAMNQPRAIKQNTSASGARPNPQGSFHYGQINITRTYILRSLPPTKINGKLRATLNGISFVNPSTPMRLADDHKVKGDYMLDFPDRPLDEKLPRLSSSIINATYKGFIQVIFQNNDTKIQSFHIDGYAFYVVAMDFGIWSEDRNSSYNNWDAVARSTVEVYPGAWTAVLISLDNVGVWNIRVENLDRWYLGQETYMRIINPEENGSTEMDPPENVMYCGALQAMQKEQHHSSATKSMTNGQLILIFSMMMVLLSSFSSFC

SEQ ID NO: 3846 - protein, 504 aa, Arabidopsis thaliana
MRRNSWQDGVLGTNCPIPPNWNFTYDFQLKDQIGSYFYSPSLNFQRASGGFGALIINNRDLVPIPFTEPDGEIIFIIGDWYTQNHTALRRILDSGKELGMPDGVLINGKGPFKYNSSVPDGIEHETVNVDPGKTYRIRVHNVGISTSLNFRIQNHKLLLIETEGRYTSQMNFTDFDVHVGQSYSFLVTMDQNATSDYYIVASARFVNETVWQRVTGVGILHYSNSKGPASGPLPVSATDVNHPWSAMNQPRAIKQNTSASGARPNPQGSFHYGQINITRTYILRSLPPTKINGKLRATLNGISFVNPSTPMRLADDHKVKGDYMLDFPDRPLDEKLPRLSSSIINATYKGFIQVIFQNNDTKIQSFHIDGYAFYVVAMDFGIWSEDRNSSYNNWDAVARSTVEVYPGAWTAVLISLDNVGVWNIRVENLDRWYLGQETYMRIINPEENGSTEMDPPENVMYCGALQAMQKEQHHSSATKSMTNGQLILIFSMMMVLLSSFSSFC

SEQ ID NO: 3847 - protein, 405 aa, Arabidopsis thaliana
MPDGVLINGKGPFKYNSSVPDGIEHETVNVDPGKTYRIRVHNVGISTSLNFRIQNHKLLLIETEGRYTSQMNFTDFDVHVGQSYSFLVTMDQNATSDYYIVASARFVNETVWQRVTGVGILHYSNSKGPASGPLPVSATDVNHPWSAMNQPRAIKQNTSASGARPNPQGSFHYGQINITRTYILRSLPPTKINGKLRATLNGISFVNPSTPMRLADDHKVKGDYMLDFPDRPLDEKLPRLSSSIINATYKGFIQVIFQNNDTKIQSFHIDGYAFYVVAMDFGIWSEDRNSSYNNWDAVARSTVEVYPGAWTAVLISLDNVGVWNIRVENLDRWYLGQETYMRIINPEENGSTEMDPPENVMYCGALQAMQKEQHHSSATKSMTNGQLILIFSMMMVLLSSFSSFC

SEQ ID NO: 3848 - DNA, 791 bp, Arabidopsis thaliana
ataaatctgataatcaatatatatcaaatactcaaaacaaaagagaaagaaattaaagagagagatgggaaacagcctaaggtgttgtctggcttgtgttcttccatgtggagcactagatttgatcaggatcgttcatctaaacggctacgttgaggagatcacacggtcaataaccgccggagagatcctccaagcaaaccctaaccatgtcctaagcaaaccatgttctcaaggagttgtccgcaaaatcttgatcttgtctcctgaatccgagctcaaacgaggaagcatctattttctcatccccgattcttccttgccggagaagaaaaggcggagaaaggacactcctcgccggaagaagaatctccaaaaccctagtgccgacgccgccggccgagaaattaaaggtgatgaggaatgtgtgaagttgtgtgagaagtacttagaagaagtagtgtcgtcggcgtcgacaggtaaagagcaccgtcatcgccggcggcacagcagatcggcgtcagtatccacgtggcgacctctccttgacagtatctctgaggatcttaattaattcctctttcctttaaatctcttttttttttgttgcttctagctaatggtgttttttgtccggaagccggatttttatcattctctttttcattttttctctctttttttttggttttggggaaattttcacgaaaagagttatataatgtggataagatctgtgttaaaattcggttgtgatttcgagtcacctgagaatgatgatattcaatcag

SEQ ID NO: 3849 - protein, 169 aa, Arabidopsis thaliana
MGNSLRCCLACVLPCGALDLIRIVHLNGYVEEITRSITAGEILQANPNHVLSKPCSQGVVRKILILSPESELKRGSIYFLIPDSSLPEKKRRRKDTPRRKKNLQNPSADAAGREIKGDEECVKLCEKYLEEVVSSASTGKEHRHRRRHSRSASVSTWRPLLDSISEDLN

SEQ ID NO: 3850 - DNA, 1395 bp, Arabidopsis thaliana
gttaaaggaaaaaaagtctcgccgctcactaaccctaaaaaaagtaactctctcactcactcttcttcatcataccgaaaaaaatccaatggcttctttggaaaatccagcaatcgattcttcaagcgaatttgagagttcttctgaagagatctcttcttctaaagaaagcaaacccaaagaagctcccgtcactgttccgtcaacaaaaaccctaaactctccttccgccgccgtggcagtttctgatgactcagagtcagagaagcagtcattcgtcttaaccaggcggaagaagaaagaaggtgctgctgaatcaccggcagtgaagtcagggaagaaagaaggtgctgctgaatcaccggcagtgaagtcagggaataacgaaggtgctactgaatcaccggcggtgaagtcagggaagaagcgagctagcgaaggaaccacgtcaagggacatgcatgtcaaaagaattaagaaagagggcgataacaaaaaggggcatgctcagagagtatggagtgaagaagacgagatctctctcctgcaagcaatgatcgatttcaaagctgagacaggtacaagtccttgggatcataaggataggttttttgatatcgccaagaaatctataagctttgatgttagtaaagtccagttctttgacaagattagaagctttaagagaaagtattttggtgaccggaaggtgagaagtgttgaatcggatcatgataagaagtgtttgggtttggctgtttctttttggggatctgatggtgtgagccttgaaactcctgtgaagaagaaagtgaaagatgaatctgttcttgttaaggctaatagcaaggagaagaacgtgaaacctttggttaaagaagatgagcaagtcgtgattcttggagaagattcggagtggtttgaggagtcttttcttgttccggttatcgctagtctcggtttggatgagtattctgtgaagaagaagtggagcaaggtgtccgtggagactaagaagaggattcaagagaagatgaagcttgtggatgctaagaaatgtgagttgttgttggcgaacatggatgttttgaaggaggtgacttcagtgcttactcaaaccaactaagaagaagaagaggaagctattggattgtatatgtttatccgtttaatctcgggtttaatgaagatgtaatgccttattttgttatctatcttaggcttcatctttctatctactctaatgaacttttaggactttggattctcgtgtgagaattagctttgtctaacaagccttttggtcgatggttgtaatgaattagctaagttgtctaactagccttttggtctatggttataatgaacttttaagactttgtaaatgtgcttctt

SEQ ID NO: 3851 - protein, 374 aa, Arabidopsis thaliana
LKEKKSRRSLTLKKVTLSLTLLHHTEKNPMASLENPAIDSSSEFESSSEEISSSKESKPKEAPVTVPSTKTLNSPSAAVAVSDDSESEKQSFVLTRRKKKEGAAESPAVKSGKKEGAAESPAVKSGNNEGATESPAVKSGKKRASEGTTSRDMHVKRIKKEGDNKKGHAQRVWSEEDEISLLQAMIDFKAETGTSPWDHKDRFFDIAKKSISFDVSKVQFFDKIRSFKRKYFGDRKVRSVESDHDKKCLGLAVSFWGSDGVSLETPVKKKVKDESVLVKANSKEKNVKPLVKEDEQVVILGEDSEWFEESFLVPVIASLGLDEYSVKKKWSKVSVETKKRIQEKMKLVDAKKCELLLANMDVLKEVTSVLTQTN

SEQ ID NO: 3852 - protein, 345 aa, Arabidopsis thaliana
MASLENPAIDSSSEFESSSEEISSSKESKPKEAPVTVPSTKTLNSPSAAVAVSDDSESEKQSFVLTRRKKKEGAAESPAVKSGKKEGAAESPAVKSGNNEGATESPAVKSGKKRASEGTTSRDMHVKRIKKEGDNKKGHAQRVWSEEDEISLLQAMIDFKAETGTSPWDHKDRFFDIAKKSISFDVSKVQFFDKIRSFKRKYFGDRKVRSVESDHDKKCLGLAVSFWGSDGVSLETPVKKKVKDESVLVKANSKEKNVKPLVKEDEQVVILGEDSEWFEESFLVPVIASLGLDEYSVKKKWSKVSVETKKRIQEKMKLVDAKKCELLLANMDVLKEVTSVLTQTN

SEQ ID NO: 3853 - protein, 222 aa, Arabidopsis thaliana
MHVKRIKKEGDNKKGHAQRVWSEEDEISLLQAMIDFKAETGTSPWDHKDRFFDIAKKSISFDVSKVQFFDKIRSFKRKYFGDRKVRSVESDHDKKCLGLAVSFWGSDGVSLETPVKKKVKDESVLVKANSKEKNVKPLVKEDEQVVILGEDSEWFEESFLVPVIASLGLDEYSVKKKWSKVSVETKKRIQEKMKLVDAKKCELLLANMDVLKEVTSVLTQTN

SEQ ID NO: 3854 - DNA, 476 bp, Arabidopsis thaliana
atgcaaagaaatcccttattctttcgtctctgtaaaattagggtttttgcctctcacgcttatcgccgcatctccgtcaaccttcatctacagatcaagcacgctgtggtggttaaggtcatgggtaggactggttcaaggggtcaggttactcaggttcgagtgaagtttaccgactctgatcgttacatcatgaggaatgttaaaggaccagtgagggaaggtgatatcctcaccttgctcgagtctgagagagaagctaggagacttcgttgatcttcttcttcgtactccaaaatgtggaaacaagaaaacatttggttatttctcttttgctttctttggattggattagtggattatgcttttggagtcttaattttgttgttgctttaagacaattgctggatttataagttgtttggtattcgaaatctcttcatccctttttatattgttcatcaagaatttgctct

SEQ ID NO: 3855 - protein, 91 aa, Arabidopsis thaliana
MQRNPLFFRLCKIRVFASHAYRRISVNLHLQIKHAVVVKVMGRTGSRGQVTQVRVKFTDSDRYIMRNVKGPVREGDILTLLESEREARRLR

SEQ ID NO: 3856 - protein, 54 aa, Arabidopsis thaliana
CKEIPYSFVSVKLGFLPLTLIAASPSTFIYRSSTLWWLRSWVGLVQGVRLLRFE

SEQ ID NO: 3857 - protein, 51 aa, Arabidopsis thaliana
MGRTGSRGQVTQVRVKFTDSDRYIMRNVKGPVREGDILTLLESEREARRLR

SEQ ID NO: 3858 - DNA, 837 bp, Arabidopsis thaliana
gctctctaaaaaccaaaactcttatcttcggtacagagcaaatcacagctcccgatggccgccacgtcatcatcaccgccgtgtaacatctccgcgtcctccctcctcctccgtcaaccttctcgctcaatccttaaagtgttcggtttattaccacctgtaagtaggaataaccgtaaactcggccggttaacggtgacccggtctaatctggcgcaggattttcttggtgacttcggagctcgtgacccttacccggaggagatagcgagtcaattcggagataaagtgttgggatgccaaagcactgagcacaagattttgataccaaacgcatctgttttgtctctctcccagcttcagtgttcccctgtttcgtcttcacagcctcctttgtccggcgatgatgccagaactctcctccacaaggttttgggatggagtatagtggataatgaagcgggtggtctgaaaataaggtgtatgtggaaagtgagggattttgggtgcggtgttgaactcataaacaggatccataaggttgctgaagcttctggtcattacccttctcttcacttggaaagtcctacccaagttcgagctgaactatttacctcttctatcggagggttgagcatgaatgatttcataatggcggctaaaatagatgatatcaagacttctgatctttcccctaggaaaagagcttgggcgtgatcttcttttcattattttggaacatttttgtttgatagtatgtaatgtatgtgatgtattctaaattgtgtgtgatcggtctacatgtcgagttatatagaaagcattgtcataaccgcc

SEQ ID NO: 3859 - protein, 220 aa, Arabidopsis thaliana
MAATSSSPPCNISASSLLLRQPSRSILKVFGLLPPVSRNNRKLGRLTVTRSNLAQDFLGDFGARDPYPEEIASQFGDKVLGCQSTEHKILIPNASVLSLSQLQCSPVSSSQPPLSGDDARTLLHKVLGWSIVDNEAGGLKIRCMWKVRDFGCGVELINRIHKVAEASGHYPSLHLESPTQVRAELFTSSIGGLSMNDFIMAAKIDDIKTSDLSPRKRAWA

SEQ ID NO: 3860 - DNA, 687 bp, Arabidopsis thaliana
aaaaatataaacaaacaaacatctctcgccgtcaggttacatctatcgccaccgcaaagagaccaccgtctcctccgcaatcttcataacctaaacaacactcatcccctggtacttaaacaatgggaaagaggaaatcaagagcaaagcctgctcctacgaagcgaatggataagcttgacacaatctttagttgtcctttctgcaatcacgggtctagtgtcgaatgcatcattgatatgaagcatctgattggtaaagcagcttgtagaatctgtgaagaaagctttagtactactatcacagctttgactgaagctatagacatttatagcgaatggatcgatgagtgcgagagggttaataccgcggaagatgatgttgtgcaagaagaggaagaagaagtagaagaggaagaagaagaggaagaagaggaggatgatgaagatgaccatgtctctgtcaaaaggaagtataacttctgagacgagtgttttatcgaaaatcatgtaagtcgtcgtcttagagttatctgctttatgttgtaatatctatctgatgaaatcacaagaacaatctttagtgttttctcagtgtctgatagagaaacatacatttaagtgaacaatctttaatcacaataacagtgtatgattatgatttgtaagtggatttaaggctttgctt

SEQ ID NO: 3861 - protein, 120 aa, Arabidopsis thaliana
MGKRKSRAKPAPTKRMDKLDTIFSCPFCNHGSSVECIIDMKHLIGKAACRICEESFSTTITALTEAIDIYSEWIDECERVNTAEDDVVQEEEEEVEEEEEEEEEEDDEDDHVSVKRKYNF

SEQ ID NO: 3862 - protein, 105 aa, Arabidopsis thaliana
MDKLDTIFSCPFCNHGSSVECIIDMKHLIGKAACRICEESFSTTITALTEAIDIYSEWIDECERVNTAEDDVVQEEEEEVEEEEEEEEEEDDEDDHVSVKRKYNF

SEQ ID NO: 3863 - protein, 81 aa, Arabidopsis thaliana
MKHLIGKAACRICEESFSTTITALTEAIDIYSEWIDECERVNTAEDDVVQEEEEEVEEEEEEEEEEDDEDDHVSVKRKYNF

SEQ ID NO: 3864 - DNA, 2154 bp, Arabidopsis thaliana
agagagagagggagaggtgcttttttagtcgttctcgtcgagagacttatttatacacgaaaaaggaagaagaagactgttgaaagcgagagagagagagagagagagagagagagagagagagagagagagatggaggatatacaggaggaagagaacggtacggacgaggaggttctgggatcgagcttgaccatggagaaagtggccgcagcgaagcagtacatcgagaatcactacaaagctcagaacaagaacattcaagagaggaaagagagacggtggatcttagaaagaaagttggcgtcttctggagtgccaaaagaggagcaaatcaacatgattaaagacctggagagaaaagagacagagtttatgaggcttaaaaggaacaagattagtgtcgatgactttgagcttttgactatcattggaagaggtgcttttggtgaggttcgcttatgtcgggagagaaagtctggaaatatttatgccatgaagaagttaaagaaatctgaaatggtcatgagaggacaggttgagcatgtcagagcagagaggaacctgctggctgaggttgaaagccattatattgtgaagctttactattcatttcaggatcccgagtatctgtatctgattatggaatatctccccggtggtgatatgatgaccttgctcatgagggaggacacattacgggaagatgttgccagattttatattgctcaaagtgtcctggccattgaatccatacacagatacaactatattcatagggatatcaaacctgataacctacttttggacaaagatgggcacatgaaactctcggactttgggctctgtaagcctcttgattgtagaaatttaccttcaattcaggagaatagggccacggatgatgaaactatgtcagaacctatggatgttgatagatgctttcctgacactgataacaagagaagctggcgcagtccccaggaacaacttcagcattggcagatgaatcgcagaaaactagcattttcaactgtgggaacaccggactatattgctcctgaagttttgctgaagaaaggatatggcatggaatgtgattggtggtcattaggtgcaattatgtacgaaatgctcgttgggtatcctcctttttatgctgatgaccctatatcaacttgcagaaagatcgtccattggagaaaccatttgaaatttcctgaggatgcgaagttttcatctgaggcaaaagatcttatctgcaggttgctgtgcaacgttgaccataggcttggtactggaggaggagcccagcaaatcaaggatcatccttggttcaaggatgttgtgtgggaaaagctctatgaaatggaggctgcgtacaaaccagaagtgaacgacgagctagatacacaaaattttatgaagtttgatgaagtgaattctcctgcacctgaaagaactagatcaggactctccaggaagatgcttcttgctcccaaggatttaagttttgttggctacacatacaagaactttgacgctgtaaaaggattgcgtcattcacttgagatggcaagaactatgtctctagatcgatcaccagctgaggcgatgcctgtggagctgataagcggggaagcagcagaggcacagatggtatcatcgatggatgatccaatgataatttgaaagaaccgatcaaagatataagatcttcctcaggtttgggatcttaaagccttctaaaaaaaaataactgtacagcaagcccagaggttaaagaggaagaagatcaaaatggtttgtgtgggagattgattaacaatgttagcctttcctgattattctgtgtattagaagaagaagacaagagaagggagaaaaagatttagaggtatgagtaaaagtctcagtgttatataaaagctgcccaggttggctgtagtaatgttgccttctctagtggcagttttattgcaacttttttactttttacctttatgtatgtgtgtgtgtgtatcaacttctatttctaaatttgaagacccaccgaggagtgaggacttagattgtatatttgagttttgttgggagtccatttctaaccaaacttgtatattaaatttaaaggatcattttgccttaggttga

SEQ ID NO: 3865 - protein, 563 aa, Arabidopsis thaliana
RERGRGAFLVVLVERLIYTRKRKKKTVESEREREREREREREREMEDIQEEENGTDEEVLGSSLTMEKVAAAKQYIENHYKAQNKNIQERKERRWILERKLASSGVPKEEQINMIKDLERKETEFMRLKRNKISVDDFELLTIIGRGAFGEVRLCRERKSGNIYAMKKLKKSEMVMRGQVEHVRAERNLLAEVESHYIVKLYYSFQDPEYLYLIMEYLPGGDMMTLLMREDTLREDVARFYIAQSVLAIESIHRYNYIHRDIKPDNLLLDKDGHMKLSDFGLCKPLDCRNLPSIQENRATDDETMSEPMDVDRCFPDTDNKRSWRSPQEQLQHWQMNRRKLAFSTVGTPDYIAPEVLLKKGYGMECDWWSLGAIMYEMLVGYPPFYADDPISTCRKIVHWRNHLKFPEDAKFSSEAKDLICRLLCNVDHRLGTGGGAQQIKDHPWFKDVVWEKLYEMEAAYKPEVNDELDTQNFMKFDEVNSPAPERTRSGLSRKMLLAPKDLSFVGYTYKNFDAVKGLRHSLEMARTMSLDRSPAEAMPVELISGEAAEAQMVSSMDDPMII

SEQ ID NO: 3866 - protein, 519 aa, Arabidopsis thaliana
MEDIQEEENGTDEEVLGSSLTMEKVAAAKQYIENHYKAQNKNIQERKERRWILERKLASSGVPKEEQINMIKDLERKETEFMRLKRNKISVDDFELLTIIGRGAFGEVRLCRERKSGNIYAMKKLKKSEMVMRGQVEHVRAERNLLAEVESHYIVKLYYSFQDPEYLYLIMEYLPGGDMMTLLMREDTLREDVARFYIAQSVLAIESIHRYNYIHRDIKPDNLLLDKDGHMKLSDFGLCKPLDCRNLPSIQENRATDDETMSEPMDVDRCFPDTDNKRSWRSPQEQLQHWQMNRRKLAFSTVGTPDYIAPEVLLKKGYGMECDWWSLGAIMYEMLVGYPPFYADDPISTCRKIVHWRNHLKFPEDAKFSSEAKDLICRLLCNVDHRLGTGGGAQQIKDHPWFKDVVWEKLYEMEAAYKPEVNDELDTQNFMKFDEVNSPAPERTRSGLSRKMLLAPKDLSFVGYTYKNFDAVKGLRHSLEMARTMSLDRSPAEAMPVELISGEAAEAQMVSSMDDPMII

SEQ ID NO: 3867 - protein, 498 aa, Arabidopsis thaliana
MEKVAAAKQYIENHYKAQNKNIQERKERRWILERKLASSGVPKEEQINMIKDLERKETEFMRLKRNKISVDDFELLTIIGRGAFGEVRLCRERKSGNIYAMKKLKKSEMVMRGQVEHVRAERNLLAEVESHYIVKLYYSFQDPEYLYLIMEYLPGGDMMTLLMREDTLREDVARFYIAQSVLAIESIHRYNYIHRDIKPDNLLLDKDGHMKLSDFGLCKPLDCRNLPSIQENRATDDETMSEPMDVDRCFPDTDNKRSWRSPQEQLQHWQMNRRKLAFSTVGTPDYIAPEVLLKKGYGMECDWWSLGAIMYEMLVGYPPFYADDPISTCRKIVHWRNHLKFPEDAKFSSEAKDLICRLLCNVDHRLGTGGGAQQIKDHPWFKDVVWEKLYEMEAAYKPEVNDELDTQNFMKFDEVNSPAPERTRSGLSRKMLLAPKDLSFVGYTYKNFDAVKGLRHSLEMARTMSLDRSPAEAMPVELISGEAAEAQMVSSMDDPMII

SEQ ID NO: 3868 - DNA, 781 bp, Arabidopsis thaliana
atttttttgaaaacttaaaaatatctcgtcacatatcttcatcgacaaaaaatttactgaaagcgaaaaaaataatggcagctttggcatcaaacccccaaatgctaactagacaagctcacggtaacaagaaggaacaattgtggaggaaagagagtttaaatttggagaagaagtgtgggttttgtgtgagcgtttacagtaatgaaaagcttgggaggtcacatatggagaaagagtggagactaaaagccttttggtcaaacatagctcagcctactactttggagatggaacccattaacaacgttgaagaactcgatgctgttctctctcacgcacgccaagtctctcagcctatcatcatcgaatggatggcttcttggtgtcgaaaatgtatttacttgaagcctaagttggagaaattagcggcagaatataataaccgagcaaagttttactatgtggatgtaaacaaggtccctcaaaccttggtgaaacgaggaaacatttcgaaaatgcccactattcagttatggaaggaagatgagatgaaagaggaggtgattggaggtcacaaaggatggcttgtcatcgaagaagttagagaattgatcaacaaatttgtctaattctctcattttttttcatttcctaccttttttttcttttaaaaaaaattaatatgtacagtcagttttcttattttctttctttatacaatttcaaacttaaaaactcctttttttggtaatcaagaaatttcacatttttttttctt

SEQ ID NO: 3869 - protein, 209 aa, Arabidopsis thaliana
FFENLKISRHISSSTKNLLKAKKIMAALASNPQMLTRQAHGNKKEQLWRKESLNLEKKCGFCVSVYSNEKLGRSHMEKEWRLKAFWSNIAQPTTLEMEPINNVEELDAVLSHARQVSQPIIIEWMASWCRKCIYLKPKLEKLAAEYNNRAKFYYVDVNKVPQTLVKRGNISKMPTIQLWKEDEMKEEVIGGHKGWLVIEEVRELINKFV

SEQ ID NO: 3870 - protein, 185 aa, Arabidopsis thaliana
MAALASNPQMLTRQAHGNKKEQLWRKESLNLEKKCGFCVSVYSNEKLGRSHMEKEWRLKAFWSNIAQPTTLEMEPINNVEELDAVLSHARQVSQPIIIEWMASWCRKCIYLKPKLEKLAAEYNNRAKFYYVDVNKVPQTLVKRGNISKMPTIQLWKEDEMKEEVIGGHKGWLVIEEVRELINKFV

SEQ ID NO: 3871 - protein, 176 aa, Arabidopsis thaliana
MLTRQAHGNKKEQLWRKESLNLEKKCGFCVSVYSNEKLGRSHMEKEWRLKAFWSNIAQPTTLEMEPINNVEELDAVLSHARQVSQPIIIEWMASWCRKCIYLKPKLEKLAAEYNNRAKFYYVDVNKVPQTLVKRGNISKMPTIQLWKEDEMKEEVIGGHKGWLVIEEVRELINKFV

SEQ ID NO: 3872 - DNA, 667 bp, Arabidopsis thaliana
aataaggcaaaaaggatttgcttttacgaacagagagcgagccagagagagtgagtaagagaatgacgagcgtgagtgggtgtggttcagtgagtctgataactaaccgcagtgcgttcttgggaaacggacttcaacaccgtgccgttttccttaaaccatggtcgtcttcttcgcttcagtctcggtccatggttgtcgaagccaaaaccaaaaccagcagcgaagacagaatcgcccgccactctcgtatccgtaagaaggttaatggtacaacagagaggccaaggctgtgtgtattccgatcaaacaagcatctttatgttcaagtgattgatgataccaagatgcacaccttagcttcagcttctactaagcagaaacctatctctgaagagttcgactacacctctggaccaaccattgaggtagcgaagaaagttggggaagtgatagcaaaatcttgcttggagaaaggtatcacaaaggtagcctttgaccgtggtggttacccttaccatggacgtattgaggctcttgctgctgcagcacgtgaacacggtcttcagttttaaccgtcgttttctttccttgtttctttccgatgaacagcagtgtatgaatgtagagaacccattttccccaattgaaatgttgagatttttct

SEQ ID NO: 3873 - protein, 170 aa, Arabidopsis thaliana
MTSVSGCGSVSLITNRSAFLGNGLQHRAVFLKPWSSSSLQSRSMVVEAKTKTSSEDRIARHSRIRKKVNGTTERPRLCVFRSNKHLYVQVIDDTKMHTLASASTKQKPISEEFDYTSGPTIEVAKKVGEVIAKSCLEKGITKVAFDRGGYPYHGRIEALAAAAREHGLQF

SEQ ID NO: 3874 - protein, 127 aa, Arabidopsis thaliana
MVVEAKTKTSSEDRIARHSRIRKKVNGTTERPRLCVFRSNKHLYVQVIDDTKMHTLASASTKQKPISEEFDYTSGPTIEVAKKVGEVIAKSCLEKGITKVAFDRGGYPYHGRIEALAAAAREHGLQF

SEQ ID NO: 3875 - DNA, 1075 bp, Arabidopsis thaliana
gattcaagtctcagttccaagaataaaaacaaagattttgtattttcatttaaagagatgaaatcaatcttagccaacacttctctcgactcttcattctctctttctaaacgttacttcaattggaagaagaagaaagttcaagaagacgacgacgaagaagaggaagaagaagaggacgattacaaccacaacgagaaaaaagtcttgacccgtttcaatttctcctctgacccgacccgaccggatcagttcaatgcccaacagataatgaagaaaaaaaagaaaaagactctcgaaaagatccgttacgctctcgggttctctaactcgggtctgggtttccgggtcgtgggtacgttattcggtaaccgtcgtggacacgtgtacttcgccgtacaagatgacccgactcgtttacctgcggtgttgatccagttaccgactccaacgagcgttcttgtccgtgaaatggcttcagggctagtgagaatcgcgctcgaaacggctgcgtataagacagattcaaagaagaagcttttagaagagtccacgtggagaacgtattgtaacggtaaaaaatgtggttacgcggcgaggaaagagtgtggagaagcggagtggaaggtgttgaaggcggttgggcctataacaatgggtgctggagttttaccggcgactacgacgacggtggatgaagaagggaatggagcggttgggtccgaaaaaggtgaactcatgtatatgagagcccggttcgagcgggttgtcgggtcgagagactcggaggcgttttacatgatgaaccctgatgtgtcaagtggtggacctgagcttagtgtgtattttctaagggtttaatgcgaaaaaaagataagattagtatatgattaagaaggtattatatgaccattttagtttttaagaatgtgttttggtttttggcttttgtttagatgatgttcaacgtataatattggaagtatcttaatgatgttccaaaagattagtgattaaaaagtgaatgctttatctggaagcaatgtactatgatgaatccatatttctttaactt

SEQ ID NO: 3876 - protein, 286 aa, Arabidopsis thaliana
DSSLSSKNKNKDFVFSFKEMKSILANTSLDSSFSLSKRYFNWKKKKVQEDDDEEEEEEEDDYNHNEKKVLTRFNFSSDPTRPDQFNAQQIMKKKKKKTLEKIRYALGFSNSGLGFRVVGTLFGNRRGHVYFAVQDDPTRLPAVLIQLPTPTSVLVREMASGLVRIALETAAYKTDSKKKLLEESTWRTYCNGKKCGYAARKECGEAEWKVLKAVGPITMGAGVLPATTTTVDEEGNGAVGSEKGELMYMRARFERVVGSRDSEAFYMMNPDVSSGGPELSVYFLRV

SEQ ID NO: 3877 - protein, 267 aa, Arabidopsis thaliana
MKSILANTSLDSSFSLSKRYFNWKKKKVQEDDDEEEEEEEDDYNHNEKKVLTRFNFSSDPTRPDQFNAQQIMKKKKKKTLEKIRYALGFSNSGLGFRVVGTLFGNRRGHVYFAVQDDPTRLPAVLIQLPTPTSVLVREMASGLVRIALETAAYKTDSKKKLLEESTWRTYCNGKKCGYAARKECGEAEWKVLKAVGPITMGAGVLPATTTTVDEEGNGAVGSEKGELMYMRARFERVVGSRDSEAFYMMNPDVSSGGPELSVYFLRV

SEQ ID NO: 3878 - protein, 196 aa, Arabidopsis thaliana
MKKKKKKTLEKIRYALGFSNSGLGFRVVGTLFGNRRGHVYFAVQDDPTRLPAVLIQLPTPTSVLVREMASGLVRIALETAAYKTDSKKKLLEESTWRTYCNGKKCGYAARKECGEAEWKVLKAVGPITMGAGVLPATTTTVDEEGNGAVGSEKGELMYMRARFERVVGSRDSEAFYMMNPDVSSGGPELSVYFLRV

SEQ ID NO: 3879 - DNA, 1416 bp, Arabidopsis thaliana
gaagcttttggatttctaatgtgtgtgaatcgtgatgttgtcatcaggacagatgatgggccatgtcgtggcccgaactcagatgatcttgtctcgaagtaacttcgccgattgtatacggtgtcagggcgtgagagtttcaaaaaccctaaaaatggggacaaagcgacccacttgcccttcttgcgataaacctagccagctctgtctctgcaagaagatgagatctccatgttttgataatcaggtgagtattactattcttcagcatagtctcgagagaaaacacgcgctaaattctactcgaatcgctagattagggcttaagaatgttggtgtgactactgttttcgatgttcatgatgaggcagagttcttaatcagggttattggatcgggttgcagcaagattgacacgaatcatttggattctgagtatagggtagagaatgttgcttctttggaacttgatgatagctttaagttaggtagtagtggcaatgtggagaacttagaatctgagaagaatgtggtgcttgttgatcatggaagcttggaaattgctgaaagtttgaatctttctcaacatttgagtgaaatttcttatcgggattcgcgggttagggataagataggttcttatgaagaagatttgataaaaatctgtatgaagaaacatggtgtcatcagcaatgtctcacactctttgatgcttgaaaccaatgtgaaggttcttagttttgatcatatattggcttctcctgcagccatggatgtcttggcaaaaggttttatggtaacaaagttttcagaaggaaagcaagagtttgagctcgaggttcctcctggatcagctttgttgttcccgagcgaagaatcggtaaagatcaattatcttaaagagaaagaagagttaaaagtaaggaatctgattgttcttgatgggacttggtcgaaggctagaagaatataccttgagaatccatggctaaagcttttacgttgccatgtgaagctagaaatagaaggtacaagtttatacaaagaagtacgacggcagccaagagcgggatgtttatccacgatagagagtattgtatacgcgatgaaggagatcggtgaagatcctgaaggtttagataatatgttgaatgtttttgaatccatggttgaagatcaacgaagatgtaaagatgagaactttaacaagattatctgaaagacaaaattactctgctgttgtaacttgtaagctgaatgaattagattcttcaattttgataattatgccgaaagttggagtcgtttttggcaatttattaaaacaattgaagatataaatgttggggtgtgaacaagaaaaattcatagttctgggccaatatgtaaattaggaaatataagttttgttgagtg

SEQ ID NO: 3880 - protein, 394 aa, Arabidopsis thaliana
MLSSGQMMGHVVARTQMILSRSNFADCIRCQGVRVSKTLKMGTKRPTCPSCDKPSQLCLCKKMRSPCFDNQVSITILQHSLERKHALNSTRIARLGLKNVGVTTVFDVHDEAEFLIRVIGSGCSKIDTNHLDSEYRVENVASLELDDSFKLGSSGNVENLESEKNVVLVDHGSLEIAESLNLSQHLSEISYRDSRVRDKIGSYEEDLIKICMKKHGVISNVSHSLMLETNVKVLSFDHILASPAAMDVLAKGFMVTKFSEGKQEFELEVPPGSALLFPSEESVKINYLKEKEELKVRNLIVLDGTWSKARRIYLENPWLKLLRCHVKLEIEGTSLYKEVRRQPRAGCLSTIESIVYAMKEIGEDPEGLDNMLNVFESMVEDQRRCKDENFNKII

SEQ ID NO: 3881 - protein, 388 aa, Arabidopsis thaliana
MMGHVVARTQMILSRSNFADCIRCQGVRVSKTLKMGTKRPTCPSCDKPSQLCLCKKMRSPCFDNQVSITILQHSLERKHALNSTRIARLGLKNVGVTTVFDVHDEAEFLIRVIGSGCSKIDTNHLDSEYRVENVASLELDDSFKLGSSGNVENLESEKNVVLVDHGSLEIAESLNLSQHLSEISYRDSRVRDKIGSYEEDLIKICMKKHGVISNVSHSLMLETNVKVLSFDHILASPAAMDVLAKGFMVTKFSEGKQEFELEVPPGSALLFPSEESVKINYLKEKEELKVRNLIVLDGTWSKARRIYLENPWLKLLRCHVKLEIEGTSLYKEVRRQPRAGCLSTIESIVYAMKEIGEDPEGLDNMLNVFESMVEDQRRCKDENFNKII

SEQ ID NO: 3882 - protein, 387 aa, Arabidopsis thaliana
MGHVVARTQMILSRSNFADCIRCQGVRVSKTLKMGTKRPTCPSCDKPSQLCLCKKMRSPCFDNQVSITILQHSLERKHALNSTRIARLGLKNVGVTTVFDVHDEAEFLIRVIGSGCSKIDTNHLDSEYRVENVASLELDDSFKLGSSGNVENLESEKNVVLVDHGSLEIAESLNLSQHLSEISYRDSRVRDKIGSYEEDLIKICMKKHGVISNVSHSLMLETNVKVLSFDHILASPAAMDVLAKGFMVTKFSEGKQEFELEVPPGSALLFPSEESVKINYLKEKEELKVRNLIVLDGTWSKARRIYLENPWLKLLRCHVKLEIEGTSLYKEVRRQPRAGCLSTIESIVYAMKEIGEDPEGLDNMLNVFESMVEDQRRCKDENFNKII

SEQ ID NO: 3883 - DNA, 1357 bp, Arabidopsis thaliana
caatctctctctccgcggttcacgttttttctcaatctgtccggagagagagaaactcaccggggaatcttgaaatcaccatcacatcctctcttccctcgatctccgttatcgactgtaaatcgaattttgttgttgctttgttttcttgggcgaataaaagaggataatttagtggcggggttttcgagaaagagagagaaagaatgagttttcaagatttagaggcgggaagaggaagatcattagcttcttcaaggaacatcaatggtggtggtagtagacaagacacgactcaagatgttgcttctggtatatttcagatcaatacaagtgtttccactttccatcgtcttgtcaatactcttggtactcctaaagatacgcctgagctcagagagaagctgcataagacaagattatatattggacagttagtgaaagatacatcagctaaacttaaagaagctagtgaaactgatcatcaaagaggtgtaaatcaaaagaagaagattgtggatgctaagcttgcaaaggactttcaagctgtgttgaaagagtttcaaaaggctcagcgtcttgctgctgaaagagaaaccgtatatgctcctcttgtccacaagccatctcttccctcaagctacacatccagtgagatagatgtgaatggagataagcatccagagcagcgtgcccttcttgtggaatcaaaaagacaagaacttgtactgttggacaatgagattgcgttcaatgaggctgttattgaggaaagagagcaagggatacaagaaattcagcagcaaattggcgaggtgcacgagatcttcaaagacttggcagtgttggtgcacgatcaaggaaacatgatagatgatattggtactcacatcgataactcttacgctgcaactgcccaaggaaaatcccatctcgtaaggcatcaaagacacaaagatcaaattcttctctgacgtgcttgctcttggtgatttttggtatcgtgctcatgattgttattatagtgctcgcagtttgatttccccaagctcataaaagcatggacaagtgcttcatcatcaatcaagaagcatcaatgagtatatgtttgtcacgactctctttgttcctacaatttagtctgttggactattggtctcttgtttcttgttatcgagtatatagagtagttcactttggtttgatttggcttgtgtttgctgagtcttggttctgaaggagagagtgttactgctttgtctctgtaatataacttggttctgaaggaaaatcctctgtttgtgttcttaaatgtgaaatttctggtttcgattagctaaagctatggcgaatcttc

SEQ ID NO: 3884 - protein, 255 aa, Arabidopsis thaliana
MSFQDLEAGRGRSLASSRNINGGGSRQDTTQDVASGIFQINTSVSTFHRLVNTLGTPKDTPELREKLHKTRLYIGQLVKDTSAKLKEASETDHQRGVNQKKKIVDAKLAKDFQAVLKEFQKAQRLAAERETVYAPLVHKPSLPSSYTSSEIDVNGDKHPEQRALLVESKRQELVLLDNEIAFNEAVIEEREQGIQEIQQQIGEVHEIFKDLAVLVHDQGNMIDDIGTHIDNSYAATAQGKSHLVRHQRHKDQILL

SEQ ID NO: 3885 - DNA, 1501 bp, Arabidopsis thaliana
accacaagattgttggagaaatggtttcatcacttaacatcatcgaagtggcacgagtcaccccttcaaactctgactcggccgagtcactcagtctcccactcacttatttcgaccttatctattataaacttcgcgccgtcgaacgagtcatcttctaccgaatcaccaacgtaactcgccctttctttgactcagtcatcgtcccaaatctcaaaacctctctatcctcatgcctctctcactatctcccactcgctggcaaacttatatgggaaccacttgatcacaaaccaaccattgtctactcccaaaacgacgacgtttcattcagcgtcgccgaaacaaacgctgatttctctagtttatccggcaatgaaccattcccctccaccgagttgtacccgttagtccccgcgttacaaagctccgacgactcggcctccattgtgtcgttccaagtcacgttatttccaaaccaaggattttgcatcggcgtaagtgcacatcatgccgttttagatggaaaaacgacaaccatgtttctcaaatcctgggctcacatatgtaaacatcaagatttttctctaccgcaggatttaatcccaacttacgatcgtacggtcattaaaagtccaacggatagtgaaaacaaagttttgaatgagtggcgctctttcaccaaaatattagctggtggtaaagaacctgccaaccccaagagtttaaagcttaatccatcatttgagattggtcctgacgttgtccgatacactctccagctcacgcgtgaagatatccaaacgcttcgcgagagacttaagagagaagtttcctcctcctcctcctcaacctcatcctcaaaagagcttcgcttgtctacatttgttattgtttactcgtatgtattagtatgcataataagagctcgaggcggggaaccacatagaccggttggatatgcgttttcggtggattgtcgaagcctcatgaatccgccgactccaaattattttggaaattgcatcgctggttgctctagaatgatgctgacggcaaaaatgtttatgggtgaagaaggacttttggctgctgcgacaatggtcagcgattcgatcgaagaatgggacgagagttttgcgtggaagattccggattttgtagcatatgcaactcttccaccagagacacaacttattttagtttcagggtctaaccgatttggagtatacgagttggattttgggtggggtagacctgataaagtgatggttgtgtcgatcagtccaggcaatgggatttccatggcggaaagtagagaccaaaacggcagtgtggagattggcttctcactcaagaagcacgaaatggacacattgattgatttgcttcattgtgaactaactatttaaataaacttttctttacatgaaaaaattgattctctaaacaatatctttaaaacgataacgccaatttatctaatcaatttatttttagc

SEQ ID NO: 3886 - protein, 469 aa, Arabidopsis thaliana
HKIVGEMVSSLNIIEVARVTPSNSDSAESLSLPLTYFDLIYYKLRAVERVIFYRITNVTRPFFDSVIVPNLKTSLSSCLSHYLPLAGKLIWEPLDHKPTIVYSQNDDVSFSVAETNADFSSLSGNEPFPSTELYPLVPALQSSDDSASIVSFQVTLFPNQGFCIGVSAHHAVLDGKTTTMFLKSWAHICKHQDFSLPQDLIPTYDRTVIKSPTDSENKVLNEWRSFTKILAGGKEPANPKSLKLNPSFEIGPDVVRYTLQLTREDIQTLRERLKREVSSSSSSTSSSKELRLSTFVIVYSYVLVCIIRARGGEPHRPVGYAFSVDCRSLMNPPTPNYFGNCIAGCSRMMLTAKMFMGEEGLLAAATMVSDSIEEWDESFAWKIPDFVAYATLPPETQLILVSGSNRFGVYELDFGWGRPDKVMVVSISPGNGISMAESRDQNGSVEIGFSLKKHEMDTLIDLLHCELTI

SEQ ID NO: 3887 - protein, 463 aa, Arabidopsis thaliana
MVSSLNIIEVARVTPSNSDSAESLSLPLTYFDLIYYKLRAVERVIFYRITNVTRPFFDSVIVPNLKTSLSSCLSHYLPLAGKLIWEPLDHKPTIVYSQNDDVSFSVAETNADFSSLSGNEPFPSTELYPLVPALQSSDDSASIVSFQVTLFPNQGFCIGVSAHHAVLDGKTTTMFLKSWAHICKHQDFSLPQDLIPTYDRTVIKSPTDSENKVLNEWRSFTKILAGGKEPANPKSLKLNPSFEIGPDVVRYTLQLTREDIQTLRERLKREVSSSSSSTSSSKELRLSTFVIVYSYVLVCIIRARGGEPHRPVGYAFSVDCRSLMNPPTPNYFGNCIAGCSRMMLTAKMFMGEEGLLAAATMVSDSIEEWDESFAWKIPDFVAYATLPPETQLILVSGSNRFGVYELDFGWGRPDKVMVVSISPGNGISMAESRDQNGSVEIGFSLKKHEMDTLIDLLHCELTI

SEQ ID NO: 3888 - protein, 290 aa, Arabidopsis thaliana
MFLKSWAHICKHQDFSLPQDLIPTYDRTVIKSPTDSENKVLNEWRSFTKILAGGKEPANPKSLKLNPSFEIGPDVVRYTLQLTREDIQTLRERLKREVSSSSSSTSSSKELRLSTFVIVYSYVLVCIIRARGGEPHRPVGYAFSVDCRSLMNPPTPNYFGNCIAGCSRMMLTAKMFMGEEGLLAAATMVSDSIEEWDESFAWKIPDFVAYATLPPETQLILVSGSNRFGVYELDFGWGRPDKVMVVSISPGNGISMAESRDQNGSVEIGFSLKKHEMDTLIDLLHCELTI

SEQ ID NO: 3889 - DNA, 1276 bp, Arabidopsis thaliana
atcgaatagtcgaaaaatatttgaactttcttaggaaaccaaaccaacaaaacaaaaaggaaaacgagataatggtgttaccttggagatcaagaggaggagtagcaaagagacgtaatcaattgatttccggcgatatctccgtcgtggaaaccaagattccagttcaactccgatcgccatcaaggatagagcggattcagtcaccgcgcgtgctgttgacgccgcgtgatgcggtggagataagtcggagattgcaaaacgcagcggcgcgtgaggagtatgccgagtgtttggagattgtgagcaaaatcaagaacttgggaagaggaggggacacgaacaagaagtgtttggtccaaaacggaagcgttttggctttgtcttcttgttttgaaagattcgcggcggcgcgtgatggacacatgcgtttattggaggaaatcttgtttgttctatcatcttggttgcctctgaatcgatcagaaggtttcaacaagatgggatcaacggcttctcttaactgtctcgtacggttcttgaacggtaaggacgctaaaacgagacaaaacgctgcgttttgcatcagagaggttattgcagtagacaagaggtatgtgtacgcgttaacagatgtggaaggagcttgtgaaggattagttaagatcatcagagactctgtttcgactagctccacgaaagcatctttaatggtgatttatagagcgatttcttctaacgacaagatcactgaaaaatttgtgaaactgggtttggttgagttgatcacagagatgatggtgaacaatgccgaaaagagcgtttgcgagagatctctagttgttttaaacgctacatgcgataacgagcaaggcaaagaagatgttcttagaaacgctttgatcgttcctcttctggtgaagaagattcttagagtttcggatctcgcgacacaatgttcggtttcgatactttggaagctatggaagaataagaaagacggagaatgtgatgatcgtttgttagttgaagctcttcaagttggtgcctttgagaaactcttagtgctcttacaagtcgggtgcgaggataagacgaaggagaaagcgagcgagctcttgcggaatttaaaccgttgtagaaacgagatcgagaagacaaattgtgtcgattcttcaatgcatttgaagaatgtgaagaaatcattttagtcaaacaaacaaaacacactattattctttgtaattactctgtttctaaataaactgatttttcg

SEQ ID NO: 3890 - protein, 402 aa, Arabidopsis thaliana
RIVEKYLNFLRKPNQQNKKENEIMVLPWRSRGGVAKRRNQLISGDISVVETKIPVQLRSPSRIERIQSPRVLLTPRDAVEISRRLQNAAAREEYAECLEIVSKIKNLGRGGDTNKKCLVQNGSVLALSSCFERFAAARDGHMRLLEEILFVLSSWLPLNRSEGFNKMGSTASLNCLVRFLNGKDAKTRQNAAFCIREVIAVDKRYVYALTDVEGACEGLVKIIRDSVSTSSTKASLMVIYRAISSNDKITEKFVKLGLVELITEMMVNNAEKSVCERSLVVLNATCDNEQGKEDVLRNALIVPLLVKKILRVSDLATQCSVSILWKLWKNKKDGECDDRLLVEALQVGAFEKLLVLLQVGCEDKTKEKASELLRNLNRCRNEIEKTNCVDSSMHLKNVKKSF

SEQ ID NO: 3891 - protein, 379 aa, Arabidopsis thaliana
MVLPWRSRGGVAKRRNQLISGDISVVETKIPVQLRSPSRIERIQSPRVLLTPRDAVEISRRLQNAAAREEYAECLEIVSKIKNLGRGGDTNKKCLVQNGSVLALSSCFERFAAARDGHMRLLEEILFVLSSWLPLNRSEGFNKMGSTASLNCLVRFLNGKDAKTRQNAAFCIREVIAVDKRYVYALTDVEGACEGLVKIIRDSVSTSSTKASLMVIYRAISSNDKITEKFVKLGLVELITEMMVNNAEKSVCERSLVVLNATCDNEQGKEDVLRNALIVPLLVKKILRVSDLATQCSVSILWKLWKNKKDGECDDRLLVEALQVGAFEKLLVLLQVGCEDKTKEKASELLRNLNRCRNEIEKTNCVDSSMHLKNVKKSF

SEQ ID NO: 3892 - protein, 261 aa, Arabidopsis thaliana
MRLLEEILFVLSSWLPLNRSEGFNKMGSTASLNCLVRFLNGKDAKTRQNAAFCIREVIAVDKRYVYALTDVEGACEGLVKIIRDSVSTSSTKASLMVIYRAISSNDKITEKFVKLGLVELITEMMVNNAEKSVCERSLVVLNATCDNEQGKEDVLRNALIVPLLVKKILRVSDLATQCSVSILWKLWKNKKDGECDDRLLVEALQVGAFEKLLVLLQVGCEDKTKEKASELLRNLNRCRNEIEKTNCVDSSMHLKNVKKSF

SEQ ID NO: 3893 - DNA, 1174 bp, Arabidopsis thaliana
gaatagaaatccaaatcgtgggcaaagaaagaaacacaaaacaaaatcgtcgatggctgttacaaaaaggcttttgtgagtgtcccaattccattcacaaagttttagtgtttaataatatctgacactctctttctttgaccgtcgccgccgcaatgaccgtcggagttttagctttgcaaggttctttcaatgagcacatcgcggctctgcggcggctcggtgtccaaggcgtcgagattaggaaggctgaccagcttctcaccgtttcttctcttatcattcctggcggcgagagcaccaccatggccaaactcgccgagtatcataacttgtttccggctctacgtgagtttgttaagatggggaaacctgtttgggggacatgcgcaggtcttatattcttggcagacagagcagttggtcagaaagagggaggtcaggaattagttggtggccttgattgcaccgtacataggaacttcttcggtagccagattcaaagttttgaagctgatatcttagtacctcaactaacatctcaagaaggtgggccagagacatacaggggagtgttcatacgtgctccagctgttcttgatgtaggtcctgatgtcgaagtcctggcggattatcccgtcccatcaaacaaggtcttgtattcaagctccaccgtacaaattcaagaggaagatgctcttcctgaaacaaaagtcattgttgctgtgaagcaaggaaacttgttagcaactgcttttcatcccgagcttactgcagacactcgatggcacagttatttcataaagatgacgaaagagattgagcaaggagcttcttcaagcagtagtaagactattgtatctgttggagaaacaagtgctggtcccgagccagctaagcctgatcttcctatatttcaataactgaacagagagaagatacacacttcttaaaataaaaaccagagaaagtgtcagattctttatctttctaaagatgttttggaaaaattgcaagctagtttgcaatttgcactcaagaaagtttcacaagactctttaatggattcatgtacttgtttcttgatacaactttatatatacagttgaatctcaaacttttttgctgattcaatttggtctatgtcttgtgaaatgtgaaaggtcgtttggcc

SEQ ID NO: 3894 - protein, 255 aa, Arabidopsis thaliana
MTVGVLALQGSFNEHIAALRRLGVQGVEIRKADQLLTVSSLIIPGGESTTMAKLAEYHNLFPALREFVKMGKPVWGTCAGLIFLADRAVGQKEGGQELVGGLDCTVHRNFFGSQIQSFEADILVPQLTSQEGGPETYRGVFIRAPAVLDVGPDVEVLADYPVPSNKVLYSSSTVQIQEEDALPETKVIVAVKQGNLLATAFHPELTADTRWHSYFIKMTKEIEQGASSSSSKTIVSVGETSAGPEPAKPDLPIFQ

SEQ ID NO: 3895 - protein, 205 aa, Arabidopsis thaliana
MAKLAEYHNLFPALREFVKMGKPVWGTCAGLIFLADRAVGQKEGGQELVGGLDCTVHRNFFGSQIQSFEADILVPQLTSQEGGPETYRGVFIRAPAVLDVGPDVEVLADYPVPSNKVLYSSSTVQIQEEDALPETKVIVAVKQGNLLATAFHPELTADTRWHSYFIKMTKEIEQGASSSSSKTIVSVGETSAGPEPAKPDLPIFQ

SEQ ID NO: 3896 - protein, 186 aa, Arabidopsis thaliana
MGKPVWGTCAGLIFLADRAVGQKEGGQELVGGLDCTVHRNFFGSQIQSFEADILVPQLTSQEGGPETYRGVFIRAPAVLDVGPDVEVLADYPVPSNKVLYSSSTVQIQEEDALPETKVIVAVKQGNLLATAFHPELTADTRWHSYFIKMTKEIEQGASSSSSKTIVSVGETSAGPEPAKPDLPIFQ

SEQ ID NO: 3897 - DNA, 1301 bp, Arabidopsis thaliana
tgtttttagacaaaactagtggcagactgaaaaatgaacgcagcgcttgcaacaaccaccgccacaactcccgtactccgccgtgagacgcctcttcttcattattgttctctcacaacaaaatcgccggtttaccaaatcaacagagttagattcggatcttgcgtgcaaacagtcagcaagaaattcttgaaaatctcggcgagctctcagagcgcttcagcggcggtcaatgtcacggcggatgcttcgattccgaaagagatgaaggcgtgggtgtatagtgactacggcggagttgatgttctgaagctggagagtaacattgttgtgccggagattaaagaagatcaggttttgattaaagttgttgcggcggctcttaatcccgtcgatgctaagagacggcaagggaaatttaaagccactgattcgcctctcccgactgttccgggatacgacgttgccggagtagtggtgaaagtgggaagtgcggtgaaggatttgaaagaaggagatgaagtttatgctaacgtgagcgagaaagcattggaaggtccaaagcagtttggttctttagcggagtacacggcagtggaagagaagttattagctttaaaacctaaaaacatcgattttgcgcaagctgcagggcttccgttggcgatagaaaccgctgatgaaggtttagttaggactgaattctcagccggaaagtcaattcttgttcttaatggtgccggaggagtagggagtcttgtgattcagttggcgaagcacgtgtatggagcttcaaaagtagctgcaactgcgagtacagaaaagctagagctagtgagaagcttaggtgctgatttagctattgattacacaaaggagaatatagaagacttgcctgacaagtacgatgttgtctttgacgccattgggatgtgtgataaggcagtgaaggtgattaaggaaggagggaaagttgtggcattgactggagctgtcacgcctcctggttttcgattcgttgttacatctaatggcgatgttttgaagaaacttaacccatatattgagagtgggaaggtgaagcctgtggttgatcccaaaggaccgttcccattctcacgcgttgctgatgctttttcatacttagaaacgaaccatgccacagggaaggtcgttgtttatcccattccttaaggggctggcttgagtgtagtagcctttatctatctatgtgtataagcatagcaagtgttatcttctctttgtattaatgagggtggaaataaaagtaaatgctcttt

SEQ ID NO: 3898 - protein, 386 aa, Arabidopsis thaliana
MNAALATTTATTPVLRRETPLLHYCSLTTKSPVYQINRVRFGSCVQTVSKKFLKISASSQSASAAVNVTADASIPKEMKAWVYSDYGGVDVLKLESNIVVPEIKEDQVLIKVVAAALNPVDAKRRQGKFKATDSPLPTVPGYDVAGVVVKVGSAVKDLKEGDEVYANVSEKALEGPKQFGSLAEYTAVEEKLLALKPKNIDFAQAAGLPLAIETADEGLVRTEFSAGKSILVLNGAGGVGSLVIQLAKHVYGASKVAATASTEKLELVRSLGADLAIDYTKENIEDLPDKYDVVFDAIGMCDKAVKVIKEGGKVVALTGAVTPPGFRFVVTSNGDVLKKLNPYIESGKVKPVVDPKGPFPFSRVADAFSYLETNHATGKVVVYPIP

SEQ ID NO: 3899 - protein, 309 aa, Arabidopsis thaliana
MKAWVYSDYGGVDVLKLESNIVVPEIKEDQVLIKVVAAALNPVDAKRRQGKFKATDSPLPTVPGYDVAGVVVKVGSAVKDLKEGDEVYANVSEKALEGPKQFGSLAEYTAVEEKLLALKPKNIDFAQAAGLPLAIETADEGLVRTEFSAGKSILVLNGAGGVGSLVIQLAKHVYGASKVAATASTEKLELVRSLGADLAIDYTKENIEDLPDKYDVVFDAIGMCDKAVKVIKEGGKVVALTGAVTPPGFRFVVTSNGDVLKKLNPYIESGKVKPVVDPKGPFPFSRVADAFSYLETNHATGKVVVYPIP

SEQ ID NO: 3900 - DNA, 1833 bp, Arabidopsis thaliana
atctctctccctctctatctctctccctctctatctctctcttaccaatttccatttctcgggggaaaataataatacgacttttgaaatctctcactaatatttcccaagaaaacctgatgaattaaaagttcatattttcttggtgttgattggtattagatgactatttcttagtattagtcaattctctgtttccatcttatatggatagtctagacacagagcaaagatccttctttggagaaaaagaagatgagagacgagagaggatcgtttcttcacgtattggtcgtagatagatcttaatcgataaccatctaggccttgatctaaccattcaatataaactttatttccttcttcttttcgatctcaattgttccgaccaaacaagatgaagagatcacgtggaagctccgattctttatccggtttcttaccaattcgccattctacaacagacaaacaaataagcccaagaccaacaactaccggctttctctattccggcgccggagactactcccagatgtttgacgcattagaagacgacggaagtctagaggacctcggcggcgttggacacgcgtcttctacggcggcggagaaaaaacggcggttgggtgtagagcaagtgaaagcgttagagaagaatttcgagattgataacaagttagagccagagaggaaagtgaagctggctcaagagcttgggttgcagccacgccaagtcgcgatctggtttcaaaaccgccgtgctcggtggaagacaaagcagcttgaacgtgattacggcgttcttaagtcaaactttgatgcactcaaacgcaaccgcgactcgcttcaacgcgataacgattcactccttggacagattaaagagctgaaagcaaaacttaacgtggaaggggttaaaggtatagaagagaacggcgctttaaaagcagtggaagcaaatcaatcggtgatggctaataatgaagtcttagagctaagccaccgttctccatcgccaccaccgcatattcctacggacgctccgacatcggagctcgcattcgaaatgtttagcatttttccacgcacggaaaacttcagagacgatcctgccgatagcagcgactcaagcgcggttttgaacgaagagtatagtcccaatacggttgaagcagctggcgcagtggcggccacgactgtagaaatgtcgacgatgggttgttttagccaattcgtgaaaatggaagagcatgaagatctgtttagtggagaggaagcttgcaagttgtttgcggacaatgagcaatggtattgctccgatcagtggaattcgtaaaatgtgggggcagaattaaaagcatagaaaagctgaagggggtatgtggaaatattactgaagtcatattgggtcggaaaatgcattactcaaaatattggggtttttcttgagaaaatggaatatgacgcgagagggtagtaaaaacgagcgtgtggtgttccatgcacgtgtggccgtaatcttttcaaggttgaatgagagaggacaaaaaagtctgaaatcatcgggaataaaaaaaatatgtgacgaagaaatcgttttttcgtcgtttataatattatttgaataattttacttaggtgaatgtaatcgtcaaaaatctttaaattccgaagggttaaagattctgagcacgactaactatctatcctcttttattgttctcgtcgtccattgacgactatgcacaattcataagattattccctatgtacaatgtgtctttttagagaaacctatctgaattttgaaaatgttatataatttaattttgg

SEQ ID NO: 3901 - protein, 312 aa, Arabidopsis thaliana
MKRSRGSSDSLSGFLPIRHSTTDKQISPRPTTTGFLYSGAGDYSQMFDALEDDGSLEDLGGVGHASSTAAEKKRRLGVEQVKALEKNFEIDNKLEPERKVKLAQELGLQPRQVAIWFQNRRARWKTKQLERDYGVLKSNFDALKRNRDSLQRDNDSLLGQIKELKAKLNVEGVKGIEENGALKAVEANQSVMANNEVLELSHRSPSPPPHIPTDAPTSELAFEMFSIFPRTENFRDDPADSSDSSAVLNEEYSPNTVEAAGAVAATTVEMSTMGCFSQFVKMEEHEDLFSGEEACKLFADNEQWYCSDQWNS

SEQ ID NO: 3902 - protein, 267 aa, Arabidopsis thaliana
MFDALEDDGSLEDLGGVGHASSTAAEKKRRLGVEQVKALEKNFEIDNKLEPERKVKLAQELGLQPRQVAIWFQNRRARWKTKQLERDYGVLKSNFDALKRNRDSLQRDNDSLLGQIKELKAKLNVEGVKGIEENGALKAVEANQSVMANNEVLELSHRSPSPPPHIPTDAPTSELAFEMFSIFPRTENFRDDPADSSDSSAVLNEEYSPNTVEAAGAVAATTVEMSTMGCFSQFVKMEEHEDLFSGEEACKLFADNEQWYCSDQWNS

SEQ ID NO: 3903 - DNA, 1202 bp, Arabidopsis thaliana
gataattagggtttgaagataaagataaaaaacagagaattgttctctatttcatcaaaatcttctcaatggaaacagcaaagcgtagaaccatgtcaacaatcgtctccaggcttagctctgtctctgagcaaaccagagccgctgctttagctgagcttagactcatctccaaacaagatcctgatagccgtctaatcatcgccgacgccggagctattccgtacctcgccgagactctttactcgtcgtcacactcttctcaggaaaacgccgccgcgactctcctcaacctctcaatcacctctcgcgaacccctaatgtcttcacgcggcttactcgacgcgctttctcacgcgcttcgtcatcacgacaccaccacttcccccgccgcggttcaatcctccgccgctacgatttatagccttttgatagccgaagagtcttaccgacctatcatcggatctaagcgcgatatcatcttctccctcattcacatcattagatatccagattcgcatcctcggatcaaagactcgctcaaggcactcttcgcgatcgctctgtatccgatgaaccgatcgacgatgatctctctcggcgcgattccggctctgttttcgctgatcgtgaaagattcgcggtgcgggatcgttgaagatgcgacggcggttatggcgcaagtcgctggatgcgaagatagcgaggacgggatgaggagagtttcaggagctaacgttctagcggatctgttagatccttgcactggttcgagcctacggatcaaagagaactccgttggtgcgcttttgaatctggcgagatgtggaggagctgcagcgaggtctgaagttgcggcggcggttgcgtctggtgctgatgaaggagccatggaagggatcgtgtatgtagctgagaatggtagtctgaaaggaaggaagaaagcggttgatctgttgaagctcgttgtctccggtaatggcggcggcgattcacgttttgattatttgttcaatgaaaatccaaatagcagaagcagctgattgcacaaatatctcaaatgttactttgtttcactaatacattcattgattcaaacactttatattatacacatatatattgtcattgtacaatgtacactttgaacatactttgttttgtagaactgaatcaatcaatcaaacacagaatctgttacg

SEQ ID NO: 3904 - protein, 324 aa, Arabidopsis thaliana
METAKRRTMSTIVSRLSSVSEQTRAAALAELRLISKQDPDSRLIIADAGAIPYLAETLYSSSHSSQENAAATLLNLSITSREPLMSSRGLLDALSHALRHHDTTTSPAAVQSSAATIYSLLIAEESYRPIIGSKRDIIFSLIHIIRYPDSHPRIKDSLKALFAIALYPMNRSTMISLGAIPALFSLIVKDSRCGIVEDATAVMAQVAGCEDSEDGMRRVSGANVLADLLDPCTGSSLRIKENSVGALLNLARCGGAAARSEVAAAVASGADEGAMEGIVYVAENGSLKGRKKAVDLLKLVVSGNGGGDSRFDYLFNENPNSRSS

SEQ ID NO: 3905 - protein, 316 aa, Arabidopsis thaliana
MSTIVSRLSSVSEQTRAAALAELRLISKQDPDSRLIIADAGAIPYLAETLYSSSHSSQENAAATLLNLSITSREPLMSSRGLLDALSHALRHHDTTTSPAAVQSSAATIYSLLIAEESYRPIIGSKRDIIFSLIHIIRYPDSHPRIKDSLKALFAIALYPMNRSTMISLGAIPALFSLIVKDSRCGIVEDATAVMAQVAGCEDSEDGMRRVSGANVLADLLDPCTGSSLRIKENSVGALLNLARCGGAAARSEVAAAVASGADEGAMEGIVYVAENGSLKGRKKAVDLLKLVVSGNGGGDSRFDYLFNENPNSRSS

SEQ ID NO: 3906 - protein, 240 aa, Arabidopsis thaliana
MSSRGLLDALSHALRHHDTTTSPAAVQSSAATIYSLLIAEESYRPIIGSKRDIIFSLIHIIRYPDSHPRIKDSLKALFAIALYPMNRSTMISLGAIPALFSLIVKDSRCGIVEDATAVMAQVAGCEDSEDGMRRVSGANVLADLLDPCTGSSLRIKENSVGALLNLARCGGAAARSEVAAAVASGADEGAMEGIVYVAENGSLKGRKKAVDLLKLVVSGNGGGDSRFDYLFNENPNSRSS

SEQ ID NO: 3907 - DNA, 1795 bp, Arabidopsis thaliana
gggaagcgacgactgactcttcttcctcctcctcctccacctcttgtttaggttcttagcactgaaatttgatcagaaggtgttgacggtgtagagcttcacgaaacataaactttcatttcttctagcttcttgatttgctcttaaaggtgcatgttgaagtgattgaaagcgatttacatgtgacttgcagctcggtcagacattatacattacactcaacacgagattggaaaggatgcttgagaatccaaagttcgatttgcacgctgttggcaatcacaacaacgacaacaattactatgccttcacccaagacttttatcaaaagctcggggaagaaggtacaaacatgtctgttgacagtatgcagacaagtaatgctggagggtctgtgtcaatgtctgtcgataacagtagcgttggttcgagtgatgctcttattggccatcctggtttgaagcctatgcgccatccctactctctctcggatggccaaagcgtatttcggccaggaaaagttactcatgcacttaacgatgatgccttagcacaagcgttgatggatagtaagtatccaaccgagggactggtgaactatgaagagtggacaatagatctgaggaaactacatatgggtcctgcttttgctcaaggggcttttggaaagttatacagagggacttacaacggagaagatgtagccattaagctactcgagaggtcagatagcaaccctgaaaaggcacaagccctcgaacagcagtttcagcaggaagtttctatgcttgcatttttgaagcatcctaacatcgttaggtttattggtgcgtgcattaaaccgatggtgtggtgcatcgtgactgaatatgcaaaaggagggtctgtcagacagtttctgactaagagacaaaaccgagctgtgcctttgaagttagctgttatgcaggcgttggatgttgccaggggtatggcttacgtccatgagcgcaactttatacaccgggatctaaagtcagataacctcctcatatcagctgatcggtccatcaagattgctgattttggtgttgcaagaattgaagttcaaaccgaagggatgacaccagagactggaacttacagatggatggcaccagagatgatccagcacagaccctacactcaaaaagtggacgtgtatagttttggaatcgtgctgtgggagttgattacaggtctgttaccgttccagaacatgacggcggttcaggctgcatttgcagtggtgaacagaggagtccgtccaacagtcccagcagattgtcttcctgtgcttggagagatcatgacacgttgctgggatgcggaccctgaagtccgtccttgttttgcagagattgtcaatcttctggaggcggcggaaactgagataatgacgaatgtgagaaaagcccgtttcagatgttgcatgacgcaaccaatgacagtcgactaatctgttgtgaagaaagagagaggagaagaagaggaatgaacaaagaagagaacataaaagaaaaaaacagagagagagagagagaaagcaagaagggctttagatatatgtaagtttgtgtgtgtatctatctatctatatatatatatccgattgtatctcttttctcaagataggagaagtaacccaaccattttagactactgattttctagattttgtattaagaaagaacaacgaaaaaattagatgtacggtgattgtctcaagtgtttggtttagttttccttgaatttgatgatgcatacttttctccac

SEQ ID NO: 3908 - protein, 412 aa, Arabidopsis thaliana
MLENPKFDLHAVGNHNNDNNYYAFTQDFYQKLGEEGTNMSVDSMQTSNAGGSVSMSVDNSSVGSSDALIGHPGLKPMRHPYSLSDGQSVFRPGKVTHALNDDALAQALMDSKYPTEGLVNYEEWTIDLRKLHMGPAFAQGAFGKLYRGTYNGEDVAIKLLERSDSNPEKAQALEQQFQQEVSMLAFLKHPNIVRFIGACIKPMVWCIVTEYAKGGSVRQFLTKRQNRAVPLKLAVMQALDVARGMAYVHERNFIHRDLKSDNLLISADRSIKIADFGVARIEVQTEGMTPETGTYRWMAPEMIQHRPYTQKVDVYSFGIVLWELITGLLPFQNMTAVQAAFAVVNRGVRPTVPADCLPVLGEIMTRCWDADPEVRPCFAEIVNLLEAAETEIMTNVRKARFRCCMTQPMTVD

SEQ ID NO: 3909 - protein, 374 aa, Arabidopsis thaliana
MSVDSMQTSNAGGSVSMSVDNSSVGSSDALIGHPGLKPMRHPYSLSDGQSVFRPGKVTHALNDDALAQALMDSKYPTEGLVNYEEWTIDLRKLHMGPAFAQGAFGKLYRGTYNGEDVAIKLLERSDSNPEKAQALEQQFQQEVSMLAFLKHPNIVRFIGACIKPMVWCIVTEYAKGGSVRQFLTKRQNRAVPLKLAVMQALDVARGMAYVHERNFIHRDLKSDNLLISADRSIKIADFGVARIEVQTEGMTPETGTYRWMAPEMIQHRPYTQKVDVYSFGIVLWELITGLLPFQNMTAVQAAFAVVNRGVRPTVPADCLPVLGEIMTRCWDADPEVRPCFAEIVNLLEAAETEIMTNVRKARFRCCMTQPMTVD

SEQ ID NO: 3910 - protein, 369 aa, Arabidopsis thaliana
MQTSNAGGSVSMSVDNSSVGSSDALIGHPGLKPMRHPYSLSDGQSVFRPGKVTHALNDDALAQALMDSKYPTEGLVNYEEWTIDLRKLHMGPAFAQGAFGKLYRGTYNGEDVAIKLLERSDSNPEKAQALEQQFQQEVSMLAFLKHPNIVRFIGACIKPMVWCIVTEYAKGGSVRQFLTKRQNRAVPLKLAVMQALDVARGMAYVHERNFIHRDLKSDNLLISADRSIKIADFGVARIEVQTEGMTPETGTYRWMAPEMIQHRPYTQKVDVYSFGIVLWELITGLLPFQNMTAVQAAFAVVNRGVRPTVPADCLPVLGEIMTRCWDADPEVRPCFAEIVNLLEAAETEIMTNVRKARFRCCMTQPMTVD

SEQ ID NO: 3911 - DNA, 1182 bp, Arabidopsis thaliana
agattaagtcttcttcgtcatcttcgagtgtgagtggatccagagagagaattagatatttccgacacgaggcaaattcctagtggctcatggcgtcatcatctgatcacacggcgaagataatcgacggcaaggcgattgctcataccatcagatcagagatcgccgaggaagttcgcggtctatctgagaaacacggcaaggtcccaggactagctgtagttattgttgggagccgaaaggattcacagacctatgtgaatacgaagaggaaagcgtgcgctgaggttgggattaagtcatttgacgtgggcctaccagaggaagtttctgaagctgatcttattagcaaagttcatgaactaaattcaaatccggatgtccatggcatattagttcaactcccattgccgaaacatattaatgaggagaatatattgggtgcaatcagcattgataaagatgtcgatggcttccatcctttgaatattggtaagctagccatgaaaggcagagaacccctcttccttccttgcaccccaaagggatgtttggaactcctagctagaagcggcgtaaagataaaggggcaacgagcagttgttgtaggtcggagtaacattgttggtttgcccgtttcacttcttttgctcaaggctgatgctactgtcacaactgtacattctcacaccaaggatcctgaggctatcatacgggaagctgacattgttattgctgcatgcggacaagcccacatgattaagggcaactggataaagccaggggctgcagtaattgatgttggaactaatgcagtcagcgacccgagcaagaaatcaggataccggttggttggagatgttgatttcgcagaagcttcaaaagttgcaggtttcataactccggtccctggtggtgtaggcccaatgacagtggcaatgcttctcaggaacaccgtagacggtgccaagcgtgtctttggcgagtaaaacaatctactgtatgtaataaagaaaccaagagtttctccattctgtaattgtgtacttggcttgacgatatttttccactcaaataaattgaaattggcgttccctttggattaccttacattgttctgcaactagctagaacgattatttccgcaattcagttaaatacaagggtgtcatcatgtgaccc

SEQ ID NO: 3912 - protein, 299 aa, Arabidopsis thaliana
MASSSDHTAKIIDGKAIAHTIRSEIAEEVRGLSEKHGKVPGLAVVIVGSRKDSQTYVNTKRKACAEVGIKSFDVGLPEEVSEADLISKVHELNSNPDVHGILVQLPLPKHINEENILGAISIDKDVDGFHPLNIGKLAMKGREPLFLPCTPKGCLELLARSGVKIKGQRAVVVGRSNIVGLPVSLLLLKADATVTTVHSHTKDPEAIIREADIVIAACGQAHMIKGNWIKPGAAVIDVGTNAVSDPSKKSGYRLVGDVDFAEASKVAGFITPVPGGVGPMTVAMLLRNTVDGAKRVFGE

SEQ ID NO: 3913 - protein, 161 aa, Arabidopsis thaliana
MKGREPLFLPCTPKGCLELLARSGVKIKGQRAVVVGRSNIVGLPVSLLLLKADATVTTVHSHTKDPEAIIREADIVIAACGQAHMIKGNWIKPGAAVIDVGTNAVSDPSKKSGYRLVGDVDFAEASKVAGFITPVPGGVGPMTVAMLLRNTVDGAKRVFGE

SEQ ID NO: 3914 - DNA, 1679 bp, Arabidopsis thaliana
aagcaaaaatgctacaaattaaaaagtgtctccaacatgtgcatattcacacacaagttggtgtcaacgctcagacaagaaaggcgtgtgttcattgttgaatcttcccatttcctcatccaaattccgacataactatcctagccgccatttgttctccacattacaaaaccctcagcagcttcaaaactcttccgatctctccctcacgctcgcaattctctcgtctccattttaatagtttttcttctcggaatcacaaatcttcggcttcttgttccttggcgtgtgtgtgtgttgttgaatggctcttgttcagcggattccaatttcctcctccagtattcggaattggcaacaagcgaggaccaatttgactcctatttgttgtttacattacaatactgcatcttcttcttcttcaccctttacagagaagcactctgtggagagataccaaagggatcaatggctgtacaaagcggttgaaccaacgccaccatcgactccatctccatcgccatttgaagatgaagtctttgttagggaaaacgacattgcatcgcagctgcctgagctgaagaagcttttggcagtgctgaaagagaagagagttaaaggatgcaaaggtggtgattgtggaccaggagatgtgtatcttgttgggacagggccaggagatcctgagcttttgactcttaaagctgtcagagttattcaaagtgccgatcttttgctttacgacaggcttgtctccaatgatgtcttggagttggttgctcctgatgctagacttctttatgtcggcaaaactgctggttatcatagcagaactcaggaagagattcatgaactactcctaaattttgctgaagctggtgccactgttgtcaggcttaaaggtggagatcctctggtctttggacggggcggcgaagaaatggactttctgcaacagcaagggattcgagttcaagttataccagggataactgcggcgtcggggatagcagcagagttggggattccactaacacatcgaggtgttgcaactagtgtaaggtttctcactggtcattcaaggaaaggagggacagaccctctgtttgttgcagagaatgcagctgacccggatacaacacttgtcgtttatatgggtttgggaactttaccttctcttgcacaaaaactaatggaccatggtctcccttctgatacaccagctgttgcggttgaacgtggaaccactcctctacagcgtacagtttttgctgagcttaaagattttgcaactgagattcagtcagctggattggtgtcaccaacactcatcatcatagggaaagtcgttgagctctcacctttatggccacattgcacgaaagaatcctcctgccttgtagagacccggtagatatttcactcttattttacgggcgtgtggcttccatcgacattacggtgaagttttaggagctatggagctatgaaggttgagacttgagagatgtaataaacaaaaaggaaagctgatagtttcttatgacgtgtccttcaattgttttgggacaatggtaatggcaatgttaatgtaataaacaagtttcaatcagtgccactgtgactaatttttccaccacaagatgatgtctttaaaactttaatagtcaaattcaaat

SEQ ID NO: 3915 - protein, 369 aa, Arabidopsis thaliana
MALVQRIPISSSSIRNWQQARTNLTPICCLHYNTASSSSSPFTEKHSVERYQRDQWLYKAVEPTPPSTPSPSPFEDEVFVRENDIASQLPELKKLLAVLKEKRVKGCKGGDCGPGDVYLVGTGPGDPELLTLKAVRVIQSADLLLYDRLVSNDVLELVAPDARLLYVGKTAGYHSRTQEEIHELLLNFAEAGATVVRLKGGDPLVFGRGGEEMDFLQQQGIRVQVIPGITAASGIAAELGIPLTHRGVATSVRFLTGHSRKGGTDPLFVAENAADPDTTLVVYMGLGTLPSLAQKLMDHGLPSDTPAVAVERGTTPLQRTVFAELKDFATEIQSAGLVSPTLIIIGKVVELSPLWPHCTKESSCLVETR

SEQ ID NO: 3916 - DNA, 2276 bp, Arabidopsis thaliana
ataattttacacaccttttttttttttttttttaataatatagctctcgtcgtttataatttttttttttcgtctggggcaaattgtaatctagaaacgacaggaaccaagggttacgaaattgaagatcgaagatgttagaacagcttttaatctttacccgaggaggattaatcctttggacatgcaaagagattggtaatgcattaaaaggatcacctatcgatactttgatccggtcctgtctccttgaggaacgatctggtgctgtttcgtttaactacgatgctcctggtgctgcctacactctcaagtggacgtttcacaatgatcttggacttgtctttgtcgctgtttatcagcggattctccatttgctttatgtggatgatttgctttctatggtcaagcaaagcttctctgaggtctatgatcctaaacggatggcttatgatgatttcgatgagacttttaggcagcttaggattgaagctgaagctcgtgctgaggaattgaggaagactaagcaagtggggaagcctgtgaccagtgttaagaagcaagggcaggtttcaaaacctggacttgaaggaggaaacaaaagggttagtagtgaaggtggttcgaagaaagatgatggcgatggtggtaataaggccaaagttagtaccttgactaatggtcattccaatgggaatcatcaaatggaagatgattctcaggagactaatgatcttgctaacgggaaagaaaacacgagttctaatgttgctgttgatttaagtaaacttcagaaacttagaagtaaaggagtcagaggtagaggaggtgtaaggaaaactgacagtataggtaataagagttccaaggtagcggaaccagccaaaaaggcgacaaagaaaaacagggtttgggatgatgcggctcccaaacaatcgaaattggacttcacggattccatcgatgaaaatgggaacaatgatcatgtagatattgtggctgctgaccaaggagaaagtatgatggacaaggaagaggttttcagcagtgatagtgaaagtgaagatgatgacgaaccaggaagtgatgagaagcctgctcaggctaagaaaaagggatggttttcttctgttttccagagtattactgggaaagcgaatcttgaaaggacagaccttggaccggcgttgaaagctctgaaggaacggctcatgaccaagaatgtggcagaagagattgctgagaagctttgcgaatcagtggaagctagtcttgaaggaaagaaattgtcatctttcaccaggatctcttcaaccgttcaggcagcgatggaggatgctctggttcgtatattgactccaagacgctccattgatatattaagagatgttcatgctgccaaagaacagaggaaaccttatgtggttgtgtttgttggagtcaatggagttgggaaatccaccaatctcgctaaagtggcgtattggcttcagcagcataaggtcagtgtaatgatggctgcttgtgacactttccgttctggagctgttgagcagttacggactcatgctcgtaggttacagataccgatatttgaaaagggttatgaaaaggatccagcagtagttgctaaagaagccatacaagaagcaactcgaaatggatccgatgttgttcttgttgacacagctggtcggatgcaggataatgaacctttgatgagagcactctcaaagctcatcaaccttaatcagccggacttggtcttgtttgttggtgaagctcttgttggaaacgatgcagtagaccagctctcgaagttcaatcagaaactttcggatctctcgacttctgggaacccaagactgatcgatggaatcttacttacaaagtttgataccattgacgacaaggtcggagcagcgttgtctatggtttacatatcgggatcaccggttatgttcgtgggttgtggccagtcttacactgacctgaagaagcttaatgtcaaagccatagtcaagacacttctcaagtgatctcctcttcatcatcatcatcatcatcatcactatcatcattaccatctactatcaacaatcaatgtcttatccatcatgctgttgtttttggttttttatttgaagacggtttctctttggaagtgttgtgttttctttaaaactcaaaagactggagtcgcaaaaaataccatcccatgactttatatgatgcaacgtaacttttgttttaaattaaagattaataatcatgtc

SEQ ID NO: 3917 - protein, 634 aa, Arabidopsis thaliana
MLEQLLIFTRGGLILWTCKEIGNALKGSPIDTLIRSCLLEERSGAVSFNYDAPGAAYTLKWTFHNDLGLVFVAVYQRILHLLYVDDLLSMVKQSFSEVYDPKRMAYDDFDETFRQLRIEAEARAEELRKTKQVGKPVTSVKKQGQVSKPGLEGGNKRVSSEGGSKKDDGDGGNKAKVSTLTNGHSNGNHQMEDDSQETNDLANGKENTSSNVAVDLSKLQKLRSKGVRGRGGVRKTDSIGNKSSKVAEPAKKATKKNRVWDDAAPKQSKLDFTDSIDENGNNDHVDIVAADQGESMMDKEEVFSSDSESEDDDEPGSDEKPAQAKKKGWFSSVFQSITGKANLERTDLGPALKALKERLMTKNVAEEIAEKLCESVEASLEGKKLSSFTRISSTVQAAMEDALVRILTPRRSIDILRDVHAAKEQRKPYVVVFVGVNGVGKSTNLAKVAYWLQQHKVSVMMAACDTFRSGAVEQLRTHARRLQIPIFEKGYEKDPAVVAKEAIQEATRNGSDVVLVDTAGRMQDNEPLMRALSKLINLNQPDLVLFVGEALVGNDAVDQLSKFNQKLSDLSTSGNPRLIDGILLTKFDTIDDKVGAALSMVYISGSPVMFVGCGQSYTDLKKLNVKAIVKTLLK

SEQ ID NO: 3918 - protein, 545 aa, Arabidopsis thaliana
MVKQSFSEVYDPKRMAYDDFDETFRQLRIEAEARAEELRKTKQVGKPVTSVKKQGQVSKPGLEGGNKRVSSEGGSKKDDGDGGNKAKVSTLTNGHSNGNHQMEDDSQETNDLANGKENTSSNVAVDLSKLQKLRSKGVRGRGGVRKTDSIGNKSSKVAEPAKKATKKNRVWDDAAPKQSKLDFTDSIDENGNNDHVDIVAADQGESMMDKEEVFSSDSESEDDDEPGSDEKPAQAKKKGWFSSVFQSITGKANLERTDLGPALKALKERLMTKNVAEEIAEKLCESVEASLEGKKLSSFTRISSTVQAAMEDALVRILTPRRSIDILRDVHAAKEQRKPYVVVFVGVNGVGKSTNLAKVAYWLQQHKVSVMMAACDTFRSGAVEQLRTHARRLQIPIFEKGYEKDPAVVAKEAIQEATRNGSDVVLVDTAGRMQDNEPLMRALSKLINLNQPDLVLFVGEALVGNDAVDQLSKFNQKLSDLSTSGNPRLIDGILLTKFDTIDDKVGAALSMVYISGSPVMFVGCGQSYTDLKKLNVKAIVKTLLK

SEQ ID NO: 3919 - protein, 531 aa, Arabidopsis thaliana
MAYDDFDETFRQLRIEAEARAEELRKTKQVGKPVTSVKKQGQVSKPGLEGGNKRVSSEGGSKKDDGDGGNKAKVSTLTNGHSNGNHQMEDDSQETNDLANGKENTSSNVAVDLSKLQKLRSKGVRGRGGVRKTDSIGNKSSKVAEPAKKATKKNRVWDDAAPKQSKLDFTDSIDENGNNDHVDIVAADQGESMMDKEEVFSSDSESEDDDEPGSDEKPAQAKKKGWFSSVFQSITGKANLERTDLGPALKALKERLMTKNVAEEIAEKLCESVEASLEGKKLSSFTRISSTVQAAMEDALVRILTPRRSIDILRDVHAAKEQRKPYVVVFVGVNGVGKSTNLAKVAYWLQQHKVSVMMAACDTFRSGAVEQLRTHARRLQIPIFEKGYEKDPAVVAKEAIQEATRNGSDVVLVDTAGRMQDNEPLMRALSKLINLNQPDLVLFVGEALVGNDAVDQLSKFNQKLSDLSTSGNPRLIDGILLTKFDTIDDKVGAALSMVYISGSPVMFVGCGQSYTDLKKLNVKAIVKTLLK

SEQ ID NO: 3920 - DNA, 2402 bp, Arabidopsis thaliana
gctctaagcactggaaaaaaaaaaagcctaaagggagccaaacataaaagcagtaccaaaaatttccacttttctttaaccttttttgcttgtctaagaaacttctcctctgaaatcatcgtagattaatctgttttcttagacatgattaagtctccgacgctttgaggtaaccggaaagtgtaatcaatcgcttgttgctgtatttgtcactctccggcgacaaaacttgatttccggtgatagtgtgttcctaagttagatttgcgatgggaactgtggttggaactgttgaggaccgcagagatatgtttgagggcaatgctcagacaaggatcacaccattttcttcaacaaatcagattggaaatcctgttgcctacaagcttgtccgggtttcaggagatgggagtctagtgcctgcaaccgatgaagaaattttggaagtcaatgacaccgatatgcatattccatcagatacttgtcagactataggctaccttgcaaccgatgaagaaaatgtggaggtcgatgagacggatatgcatattgcatcagatgcttgtcagactataggttaccttccagctgaagggataccttctcggttgtcccagattgaaagttcagaagctatcaattcaggtttattgcattctgataatgtgcaaccatatacagaccagtataacgaggagatgttgcaaaaggttgaacaggaagagaggcttgagaatgtacatggatctcagatgccttccactcctgcagatgccaatatccagtgttctaatgaaaacaacttttttgaggaggatcaagtccaccatgaagctttactgcaggatgaatgcaagatgaatgaatctgatatgatggaacgatgctcaaacgcagttgctagtccaaaagaaactgcattgtctgctgctgctcaaaaacctgatttttctagagttagaggtgagatctgcttggataatttaccgattaaagcactgcaagaaacattcagggcaacttttggccgtgatacgactgttaaggacaagacgtggcttaaaaggaggattgcaatgggacttattaattcttgtgatgtaccaacaactaacttgagggtgaaagataacaagttaattggaaatcaagagaagtccaacgatgtgacgaatgccattagaaaggagatgggagatgacgtaagagctactaaaatgaaagatgctccatcgagtactgatcatgtgaatggacattcaaacggtggcaaccactattacgctagtgaggattattccagtgaacagagggctgcaaaacgagttaggaagcctacacgaagatacattgaagaactttcggaaacagatgataaacagcaaaatgacaagtcagtgattccttctaaagatcagaggttgtccgaaaaatctgaggtcaggtctatcagtgtctcctcagggaagagagttactgtcaccaggatggtatcccttgctggatctgaaattgaggttccttatgtttctcatgtccggagaagccgtccaagagagaacattatggctcttttgggatgtcattccagttacttggaagataaagctagtgcagcagagagtaacctcaatctgagtccatcccagttaagcagtgaggttgtgaaccgagattcggtggaaaagtctgcttctcgaccggtccaaaacgaatttgctacaagtgacgagaacaatgtggagcatattctctctgaggttgatcaagagatggagccagagcacatagactcatctggaaatagctcggatgagaataacattggtgtgccaatcatgcaaggtggtgcgcttagaaggaagcatcatcgagcttggactctgtctgagatagcaaaactagttgagggtgtatcaaaatatggagccgggaagtggtctgaaatcaaaaagcatttgttttcatcacactcctatcgtacctctgtagatctcaaggacaaatggcgaaaccttttgaagacaagctttgctcagagtccctcaaacagcgtgggaagtctcaagaaacatgggtcgatgcatattcctacgcagattctgttacgggtaagggagcttgcggagaagcaatctcagtaagcaagtttgttggagatagcaacagaaaggaaatggaaacaaggtccgacttcttgtagctgaaatttttttgtaaaatagcaactcaagtaagggagacgagaaatgtgagataagataacagtttctgtagtagacttgtaactttctaaggaggctttgtgggttatatatatttatgagaaaagtattaagtagtgtctgtgtcctgaattggtatgaatgattctctataatatccatggaagtttgactcgc

SEQ ID NO: 3921 - protein, 624 aa, Arabidopsis thaliana
MGTVVGTVEDRRDMFEGNAQTRITPFSSTNQIGNPVAYKLVRVSGDGSLVPATDEEILEVNDTDMHIPSDTCQTIGYLATDEENVEVDETDMHIASDACQTIGYLPAEGIPSRLSQIESSEAINSGLLHSDNVQPYTDQYNEEMLQKVEQEERLENVHGSQMPSTPADANIQCSNENNFFEEDQVHHEALLQDECKMNESDMMERCSNAVASPKETALSAAAQKPDFSRVRGEICLDNLPIKALQETFRATFGRDTTVKDKTWLKRRIAMGLINSCDVPTTNLRVKDNKLIGNQEKSNDVTNAIRKEMGDDVRATKMKDAPSSTDHVNGHSNGGNHYYASEDYSSEQRAAKRVRKPTRRYIEELSETDDKQQNDKSVIPSKDQRLSEKSEVRSISVSSGKRVTVTRMVSLAGSEIEVPYVSHVRRSRPRENIMALLGCHSSYLEDKASAAESNLNLSPSQLSSEVVNRDSVEKSASRPVQNEFATSDENNVEHILSEVDQEMEPEHIDSSGNSSDENNIGVPIMQGGALRRKHHRAWTLSEIAKLVEGVSKYGAGKWSEIKKHLFSSHSYRTSVDLKDKWRNLLKTSFAQSPSNSVGSLKKHGSMHIPTQILLRVRELAEKQSQ

SEQ ID NO: 3922 - protein, 611 aa, Arabidopsis thaliana
MFEGNAQTRITPFSSTNQIGNPVAYKLVRVSGDGSLVPATDEEILEVNDTDMHIPSDTCQTIGYLATDEENVEVDETDMHIASDACQTIGYLPAEGIPSRLSQIESSEAINSGLLHSDNVQPYTDQYNEEMLQKVEQEERLENVHGSQMPSTPADANIQCSNENNFFEEDQVHHEALLQDECKMNESDMMERCSNAVASPKETALSAAAQKPDFSRVRGEICLDNLPIKALQETFRATFGRDTTVKDKTWLKRRIAMGLINSCDVPTTNLRVKDNKLIGNQEKSNDVTNAIRKEMGDDVRATKMKDAPSSTDHVNGHSNGGNHYYASEDYSSEQRAAKRVRKPTRRYIEELSETDDKQQNDKSVIPSKDQRLSEKSEVRSISVSSGKRVTVTRMVSLAGSEIEVPYVSHVRRSRPRENIMALLGCHSSYLEDKASAAESNLNLSPSQLSSEVVNRDSVEKSASRPVQNEFATSDENNVEHILSEVDQEMEPEHIDSSGNSSDENNIGVPIMQGGALRRKHHRAWTLSEIAKLVEGVSKYGAGKWSEIKKHLFSSHSYRTSVDLKDKWRNLLKTSFAQSPSNSVGSLKKHGSMHIPTQILLRVRELAEKQSQ

SEQ ID NO: 3923 - protein, 560 aa, Arabidopsis thaliana
MHIPSDTCQTIGYLATDEENVEVDETDMHIASDACQTIGYLPAEGIPSRLSQIESSEAINSGLLHSDNVQPYTDQYNEEMLQKVEQEERLENVHGSQMPSTPADANIQCSNENNFFEEDQVHHEALLQDECKMNESDMMERCSNAVASPKETALSAAAQKPDFSRVRGEICLDNLPIKALQETFRATFGRDTTVKDKTWLKRRIAMGLINSCDVPTTNLRVKDNKLIGNQEKSNDVTNAIRKEMGDDVRATKMKDAPSSTDHVNGHSNGGNHYYASEDYSSEQRAAKRVRKPTRRYIEELSETDDKQQNDKSVIPSKDQRLSEKSEVRSISVSSGKRVTVTRMVSLAGSEIEVPYVSHVRRSRPRENIMALLGCHSSYLEDKASAAESNLNLSPSQLSSEVVNRDSVEKSASRPVQNEFATSDENNVEHILSEVDQEMEPEHIDSSGNSSDENNIGVPIMQGGALRRKHHRAWTLSEIAKLVEGVSKYGAGKWSEIKKHLFSSHSYRTSVDLKDKWRNLLKTSFAQSPSNSVGSLKKHGSMHIPTQILLRVRELAEKQSQ

SEQ ID NO: 3924 - DNA, 1361 bp, Arabidopsis thaliana
tttcatcatcatctcagtctctctcgaagtttcaagttcgcgactatggcagcagcgatgtcttcttcttgttgcgcttcctcgcttcgtttaatcccattcaaacggaccttgttttcttcaatccattatccggccaaaacccttcttctacgaccactaaaaccgtcggaagttccttcctttcgccggacgatcatcactttccagaaaatttcaaccgggattgttcctccaccatcggcttcatcatctccgtcgagctatggagaccttcaaccaatcgaagagcttccaccgaagctacaagagatcgtcaagcttttccaatcggtacaagagccaaaggctaaatacgagcagcttatgttctacgggaagaatctgacacctctcgattctcaattcaagacgagggagaataaagtagaaggatgtgtttctcaggtttgggttagggctttctttgatgaggaacgtaatgttgtgtatgaagctgattctgattcggttctcactaaagggttagctgctctattagtcaagggtttatctggaagacctgtccctgagattttgaggataacacctgatttcgctgttcttctcgggttgcagcagagtctgtctccttctagaaacaatggattacttaatatgcttaagctgatgcagaaaaaggctcttcatttggaagtcaaaggtgaggaagattcaagttctggagagagttcagaatccagctttgtgtctattcctgagactaaggacgaagctaatgttccggaggtggatttggagtctaaacctgatctagttgaggatttgggaacagaaaagattgatgattctgagagtgggtcaaatgttgttgctttagggagtagagggatgaggataagagagaaattggagaaggagctagatcctgttgagttagaagttgaagatgtttcttaccagcacgcaggacatgccgctgttagaggtagtgctggtgatgatggggaaacacatttcaacttgcgaatcgtttcggatgctttccaaggtaaaagcttggtcaagagacataggctgatatatgacttgttgcaagatgagttgaagagcgggttacatgctctctctattgtggcaaagactcctgctgaggtttgagggtgtaacattggaagaagtcaggtcctgattcttttacttcttttggtccatttgctttggatattgttctctggaccttctaataatgttaagagctcgatcaggattgtgttaaatgagagatagatattgaaggatataaataatgttttcgccaatcgccacatgattcaccattttcaaactgatttcccttt

SEQ ID NO: 3925 - protein, 386 aa, Arabidopsis thaliana
FHHHLSLSRSFKFATMAAAMSSSCCASSLRLIPFKRTLFSSIHYPAKTLLLRPLKPSEVPSFRRTIITFQKISTGIVPPPSASSSPSSYGDLQPIEELPPKLQEIVKLFQSVQEPKAKYEQLMFYGKNLTPLDSQFKTRENKVEGCVSQVWVRAFFDEERNVVYEADSDSVLTKGLAALLVKGLSGRPVPEILRITPDFAVLLGLQQSLSPSRNNGLLNMLKLMQKKALHLEVKGEEDSSSGESSESSFVSIPETKDEANVPEVDLESKPDLVEDLGTEKIDDSESGSNVVALGSRGMRIREKLEKELDPVELEVEDVSYQHAGHAAVRGSAGDDGETHFNLRIVSDAFQGKSLVKRHRLIYDLLQDELKSGLHALSIVAKTPAEV

SEQ ID NO: 3926 - protein, 371 aa, Arabidopsis thaliana
MAAAMSSSCCASSLRLIPFKRTLFSSIHYPAKTLLLRPLKPSEVPSFRRTIITFQKISTGIVPPPSASSSPSSYGDLQPIEELPPKLQEIVKLFQSVQEPKAKYEQLMFYGKNLTPLDSQFKTRENKVEGCVSQVWVRAFFDEERNVVYEADSDSVLTKGLAALLVKGLSGRPVPEILRITPDFAVLLGLQQSLSPSRNNGLLNMLKLMQKKALHLEVKGEEDSSSGESSESSFVSIPETKDEANVPEVDLESKPDLVEDLGTEKIDDSESGSNVVALGSRGMRIREKLEKELDPVELEVEDVSYQHAGHAAVRGSAGDDGETHFNLRIVSDAFQGKSLVKRHRLIYDLLQDELKSGLHALSIVAKTPAEV

SEQ ID NO: 3927 - protein, 367 aa, Arabidopsis thaliana
MSSSCCASSLRLIPFKRTLFSSIHYPAKTLLLRPLKPSEVPSFRRTIITFQKISTGIVPPPSASSSPSSYGDLQPIEELPPKLQEIVKLFQSVQEPKAKYEQLMFYGKNLTPLDSQFKTRENKVEGCVSQVWVRAFFDEERNVVYEADSDSVLTKGLAALLVKGLSGRPVPEILRITPDFAVLLGLQQSLSPSRNNGLLNMLKLMQKKALHLEVKGEEDSSSGESSESSFVSIPETKDEANVPEVDLESKPDLVEDLGTEKIDDSESGSNVVALGSRGMRIREKLEKELDPVELEVEDVSYQHAGHAAVRGSAGDDGETHFNLRIVSDAFQGKSLVKRHRLIYDLLQDELKSGLHALSIVAKTPAEV

SEQ ID NO: 3928 - DNA, 1908 bp, Arabidopsis thaliana
ttcgcggttcaaaaaattaagtgatcatcacttctcctcctttatcgagagcttcagttttagagcaacaatgtctctatttctgaagcccttcctcttcctatacgacaccactcttagtcttctcttacttctgttcaatggatggagtcttgaggatacagcagcagcccaaaagaggcgtgaagcagacaaaaatgctgcagaaactgaatggatccaactccaatacttgtggaccaaaacaaggagtgttgtactacttcccgttttcaagggtttggtggttatgtgtttggttctatccattatagtgttcttcgagagtttttacatgaactttgtgatactcttcgtcaagttatttaaacgtaaaccccataaagtgtacaaatgggaggccatgcaagaagatgttgaggttggacccgataactacccaatggttcttatccaaataccaatgtacaatgaaaaagaggtctttcaattatctatagcagcaatatgtagtttggtctggccatcgagccgtctagtagttcaagttgtagatgattctacggatccggccgtaagggaaggtgtggacgtagagattgcaaaatggcaaagccaaggcataaacataaggtgtgaaaggagagataacaggaacggctacaaagccggagctatgaaagaagctcttacgcagagctacgtcaagcaatgcgacttcgtagcagtcttcgatgctgatttccaacccgagcccgattatctcatccgcgctgtccctttccttgtccacaaccctgacgttgctctagttcaagcccgatggatatttgttaacgcgaacaaatgcttgatgacgaggatgcaagagatgtctctcaactatcatttcaaagtggaacaagaatcagggtcgactagacatgctttcttcgggtttaatggaaccgcgggtgtatggagaatatcggcaatggaagcagcaggaggatggaaatcaaggaccacagtagaggacatggacttggctgttcgtgttggtcttcatggctggaaatttgtctaccttaacgacctcacggtgagaaacgagcttccaagcaaatttaaggcctacagattccagcaacataggtggtcctgtggaccggcgaatctatttagaaaaatgacgatggagatcattttcaataagagagtatcaatttggaagaagttttatgtgatctacagctttttcttcgtaaggaaagtggcggtacacttcttgacattcttcttctactgtataattgtgccaacaagtgtcttcttccctgaaatccacatcccatcttggtctaccatttacgttccctctttgatcagtatcttccacaccctggcaactccaagatccttctacctcgtgatattttgggtcttgttcgagaatgtaatggctatgcatcgaaccaaaggtacgtgcattggcctacttgaaggaggaagagtaaacgaatgggttgtgaccgaaaaactaggagatgctttgaagagtaagctactctctcgggtagtccaaagaaaatcttgttatcaaagagtgaattccaaggaagtgatggtgggggtatacatattaggatgtgcactctatggcctgatctatgggcacacatggttacatttctatctttttcttcaggccacagcctttttcgtctccggttttggttttgtcggaacggcctaagaaccttcccggcccattatttttagtcaccaaataaattctccatgttttagttcttatttacacttttatttattttgacaccattgtacggtttggaccccatatcatcatgttgtataagtataacgaataatgattttttgtttgtttgaatgtatgcgtcactcggt

SEQ ID NO: 3929 - protein, 577 aa, Arabidopsis thaliana
SRFKKLSDHHFSSFIESFSFRATMSLFLKPFLFLYDTTLSLLLLLFNGWSLEDTAAAQKRREADKNAAETEWIQLQYLWTKTRSVVLLPVFKGLVVMCLVLSIIVFFESFYMNFVILFVKLFKRKPHKVYKWEAMQEDVEVGPDNYPMVLIQIPMYNEKEVFQLSIAAICSLVWPSSRLVVQVVDDSTDPAVREGVDVEIAKWQSQGINIRCERRDNRNGYKAGAMKEALTQSYVKQCDFVAVFDADFQPEPDYLIRAVPFLVHNPDVALVQARWIFVNANKCLMTRMQEMSLNYHFKVEQESGSTRHAFFGFNGTAGVWRISAMEAAGGWKSRTTVEDMDLAVRVGLHGWKFVYLNDLTVRNELPSKFKAYRFQQHRWSCGPANLFRKMTMEIIFNKRVSIWKKFYVIYSFFFVRKVAVHFLTFFFYCIIVPTSVFFPEIHIPSWSTIYVPSLISIFHTLATPRSFYLVIFWVLFENVMAMHRTKGTCIGLLEGGRVNEWVVTEKLGDALKSKLLSRVVQRKSCYQRVNSKEVMVGVYILGCALYGLIYGHTWLHFYLFLQATAFFVSGFGFVGTA

SEQ ID NO: 3930 - protein, 554 aa, Arabidopsis thaliana
MSLFLKPFLFLYDTTLSLLLLLFNGWSLEDTAAAQKRREADKNAAETEWIQLQYLWTKTRSVVLLPVFKGLVVMCLVLSIIVFFESFYMNFVILFVKLFKRKPHKVYKWEAMQEDVEVGPDNYPMVLIQIPMYNEKEVFQLSIAAICSLVWPSSRLVVQVVDDSTDPAVREGVDVEIAKWQSQGINIRCERRDNRNGYKAGAMKEALTQSYVKQCDFVAVFDADFQPEPDYLIRAVPFLVHNPDVALVQARWIFVNANKCLMTRMQEMSLNYHFKVEQESGSTRHAFFGFNGTAGVWRISAMEAAGGWKSRTTVEDMDLAVRVGLHGWKFVYLNDLTVRNELPSKFKAYRFQQHRWSCGPANLFRKMTMEIIFNKRVSIWKKFYVIYSFFFVRKVAVHFLTFFFYCIIVPTSVFFPEIHIPSWSTIYVPSLISIFHTLATPRSFYLVIFWVLFENVMAMHRTKGTCIGLLEGGRVNEWVVTEKLGDALKSKLLSRVVQRKSCYQRVNSKEVMVGVYILGCALYGLIYGHTWLHFYLFLQATAFFVSGFGFVGTA

SEQ ID NO: 3931 - protein, 481 aa, Arabidopsis thaliana
MCLVLSIIVFFESFYMNFVILFVKLFKRKPHKVYKWEAMQEDVEVGPDNYPMVLIQIPMYNEKEVFQLSIAAICSLVWPSSRLVVQVVDDSTDPAVREGVDVEIAKWQSQGINIRCERRDNRNGYKAGAMKEALTQSYVKQCDFVAVFDADFQPEPDYLIRAVPFLVHNPDVALVQARWIFVNANKCLMTRMQEMSLNYHFKVEQESGSTRHAFFGFNGTAGVWRISAMEAAGGWKSRTTVEDMDLAVRVGLHGWKFVYLNDLTVRNELPSKFKAYRFQQHRWSCGPANLFRKMTMEIIFNKRVSIWKKFYVIYSFFFVRKVAVHFLTFFFYCIIVPTSVFFPEIHIPSWSTIYVPSLISIFHTLATPRSFYLVIFWVLFENVMAMHRTKGTCIGLLEGGRVNEWVVTEKLGDALKSKLLSRVVQRKSCYQRVNSKEVMVGVYILGCALYGLIYGHTWLHFYLFLQATAFFVSGFGFVGTA

SEQ ID NO: 3932 - DNA, 1883 bp, Arabidopsis thaliana
gattgattctttgatctcaaacaaaaactcttactttggtcactgtgatttttgattccatttattcttctttttgaagcgaatctgagttttgttttcatgtccgcgaggatttcatttctgaaaaatcccgatccgtgcaatcacttatctgattataagcttagatatggtactgatggttacaaatctttcaataacttgttcagatgcttcaacgatgcaaggattaagatcaaacttcaaggaatcgacatacccagatgcagttattgttctgtttatcaaaagagactctacatctgtttgatctgtcgttccatttcttgttcaagtcatatccttttgcatacccagttgaataaaggccatgatatcgccattgatgtcgaaagatctgagctttattgctgtgcttgcatcgatcaagcgtatgattctgagttcgacgaggttgttgtgtctaagcagctttttggtttgggtatgtctgttaaatcaggggctgatgttgttgcggttagatcgaacaagaagaggagattggactcgcaattgatcatagggtcgaattttttggtctcacctcgagatcgaagggagaaatggacgtttcctttggggttgagaggtttgaacaatctgggaagcacttgttttatgaatgctgtgttgcaagcacttgttcatgctcctcctttgagaaacttttggttgagtggtcaacataatcgtgatctttgtcctagaagaacaatgggcttgttgtgtttgccttgtgatcttgatattatcttctctgctatgttttctggtgatcggactccatatagccctgctcatttgctttacagttggtggcagcactcaacgaatctagctacatatgagcagcaagattctcacgagttcttcatttcgctattggaccgtatccatgagaacgaagggaagtcgaaatgtttgtatcaagataatgaggagtgtcagtgtatcacccacaaggcattctctggtcttttaagatcagatgtcacctgtacaacatgtggatccacatcaacaacatatgacccgtttatcgacatttcacttactttagattcaatgaatggattctctcccgctgattgcagaaagaacagatacagtggtggaccaagtgtgaacgcaatcatgccaactctctcgggttgcttagatttcttcacacggtcagagaaactcggtccagaccagaaactaaactgccaaagctgtggagaaaagagagaatcttcgaaacaaatgtctataagaagacttcctctgcttctttgcttgcacgtaaagcgtttcgaacattttcttacccgtaaaacctcgagaaaaattgatagctacttgcagtatccgttccgcctaaacatgtctccttacctctcttcctccatcatcggaaagcggtttgggaacagaatatttgcctttgatggagaaggtgagtatgacagttcgtcatcatcatctccatcagcggagtttgagatatttgcggttgtgacacacaaggggatgttggaatcaggtcactatgtgacgtatctgaggcttaaagggttgtggtatagatgtgatgatgcatggatcaatgaggttgaagaagaagtggtgagaggatgtgagtgttacatgttgttctatgcacaagagacagtgattcaaaaagctcataaggagttgagttatcaagttatctccatggctgatgcatttccctttgctgattgctgactcttaacttggccaaagattttgacgcattttcccttactactttttttaattgatttaaggtttatgccaaatatttgaaagccaagtttaatgattaaatttctttc

SEQ ID NO: 3933 - protein, 557 aa, Arabidopsis thaliana
MSARISFLKNPDPCNHLSDYKLRYGTDGYKSFNNLFRCFNDARIKIKLQGIDIPRCSYCSVYQKRLYICLICRSISCSSHILLHTQLNKGHDIAIDVERSELYCCACIDQAYDSEFDEVVVSKQLFGLGMSVKSGADVVAVRSNKKRRLDSQLIIGSNFLVSPRDRREKWTFPLGLRGLNNLGSTCFMNAVLQALVHAPPLRNFWLSGQHNRDLCPRRTMGLLCLPCDLDIIFSAMFSGDRTPYSPAHLLYSWWQHSTNLATYEQQDSHEFFISLLDRIHENEGKSKCLYQDNEECQCITHKAFSGLLRSDVTCTTCGSTSTTYDPFIDISLTLDSMNGFSPADCRKNRYSGGPSVNAIMPTLSGCLDFFTRSEKLGPDQKLNCQSCGEKRESSKQMSIRRLPLLLCLHVKRFEHFLTRKTSRKIDSYLQYPFRLNMSPYLSSSIIGKRFGNRIFAFDGEGEYDSSSSSSPSAEFEIFAVVTHKGMLESGHYVTYLRLKGLWYRCDDAWINEVEEEVVRGCECYMLFYAQETVIQKAHKELSYQVISMADAFPFADC

SEQ ID NO: 3934 - protein, 428 aa, Arabidopsis thaliana
MSVKSGADVVAVRSNKKRRLDSQLIIGSNFLVSPRDRREKWTFPLGLRGLNNLGSTCFMNAVLQALVHAPPLRNFWLSGQHNRDLCPRRTMGLLCLPCDLDIIFSAMFSGDRTPYSPAHLLYSWWQHSTNLATYEQQDSHEFFISLLDRIHENEGKSKCLYQDNEECQCITHKAFSGLLRSDVTCTTCGSTSTTYDPFIDISLTLDSMNGFSPADCRKNRYSGGPSVNAIMPTLSGCLDFFTRSEKLGPDQKLNCQSCGEKRESSKQMSIRRLPLLLCLHVKRFEHFLTRKTSRKIDSYLQYPFRLNMSPYLSSSIIGKRFGNRIFAFDGEGEYDSSSSSSPSAEFEIFAVVTHKGMLESGHYVTYLRLKGLWYRCDDAWINEVEEEVVRGCECYMLFYAQETVIQKAHKELSYQVISMADAFPFADC

SEQ ID NO: 3935 - protein, 370 aa, Arabidopsis thaliana
MNAVLQALVHAPPLRNFWLSGQHNRDLCPRRTMGLLCLPCDLDIIFSAMFSGDRTPYSPAHLLYSWWQHSTNLATYEQQDSHEFFISLLDRIHENEGKSKCLYQDNEECQCITHKAFSGLLRSDVTCTTCGSTSTTYDPFIDISLTLDSMNGFSPADCRKNRYSGGPSVNAIMPTLSGCLDFFTRSEKLGPDQKLNCQSCGEKRESSKQMSIRRLPLLLCLHVKRFEHFLTRKTSRKIDSYLQYPFRLNMSPYLSSSIIGKRFGNRIFAFDGEGEYDSSSSSSPSAEFEIFAVVTHKGMLESGHYVTYLRLKGLWYRCDDAWINEVEEEVVRGCECYMLFYAQETVIQKAHKELSYQVISMADAFPFADC

SEQ ID NO: 3936 - DNA, 1763 bp, Arabidopsis thaliana
atcaagcttttgaagcttctcaacaatggcggctattccttcccacaacaaccttcttaccatcaaccacaaaaactccataaccggttcttcttccctaaataccaatttctcagaaatcaattttcccgccaaattccgagtagctacgagagctttgtccagaaccgacgagtcgtctttatccgccgtgatttctcgcctcgagcgagaaaggcgggaaagacaaggtttattaatcgaggaagcggaaggagctggagaactatggatgacggcggaagatattcgccggcgagataaaaaaaccgaagaagaaagaagactaagagacacgtggcgtaagatccaaggagaagacgattgggccgggttaatggatccaatggatccaattcttagatcggagctaatccgttacggcgaaatggctcaagcttgttacgacgctttcgatttcgatcccgcttccaaatactgcggcacctccaggttcacgcgactcgagttcttcgattctctcggaatgatcgattccggttacgaggtggcgcgttacctctacgcgacgtcgaacatcaatctcccgaacttcttctcgaaatcgcggtggtctaaagtctggagcaaaaacgctaattggatgggatacgtcgccgtttcagacgacgaaacgtctcgtaaccgactcggccgccgtgatatcgcgattgcgtggagaggaaccgttacgaaacttgaatggatcgcggatctaaaggattatttaaaaccggtaaccgaaaacaagatccgatgccccgacccggccgttaaagtcgaatccggattcttagatctctacactgacaaagacacaacctgcaaattcgcgagattctcagcgcgtgaacagattttaacggaggtgaaacggttagtggaagaacacggcgacgacgatgattccgatttaagcatcaccgtgacgggacacagtctcggcggcgcgttagcgatattaagcgcgtacgatatagcggagatgagattgaatcggagtaagaaagggaaagtgattccggtgacggtgttgacatacggaggaccgagagttgggaacgttaggtttagggagaggatggaggaattgggagtgaaagtgatgagagtagtgaatgttcacgacgtggttcccaagtcgccgggattgtttttgaacgagagtagacctcacgcgctgatgaagatagcggaggggttgccgtggtgttatagccacgtgggggaggagctggcgttggatcatcagaactcgccgtttcttaaaccttccgttgatgtttctactgctcataatcttgaagctatgcttcatttacttgacgggtatcatggaaaaggagagagatttgtgctgtcgagtgggagagaccatgcgctagtgaacaaagcgtcggactttttgaaagagcatttacaaattccaccgttttggcgtcaagacgcgaataaaggaatggttcggaacagtgaaggtcgttggattcaagccgagcgtctccgttttgaggatcatcattctcctgatatccaccaccatctctctcagctccgtcttgatcatccttgttaatcacacgcacatatatataatatacacattttccctaatttgtaaatgacgcatccatcttttgaaaataaaatgtcacaatcatctcacttgcatgctttggtcaacgtacgttccctattaataaaacttattacgtttacgaggc

SEQ ID NO: 3937 - protein, 529 aa, Arabidopsis thaliana
MAAIPSHNNLLTINHKNSITGSSSLNTNFSEINFPAKFRVATRALSRTDESSLSAVISRLERERRERQGLLIEEAEGAGELWMTAEDIRRRDKKTEEERRLRDTWRKIQGEDDWAGLMDPMDPILRSELIRYGEMAQACYDAFDFDPASKYCGTSRFTRLEFFDSLGMIDSGYEVARYLYATSNINLPNFFSKSRWSKVWSKNANWMGYVAVSDDETSRNRLGRRDIAIAWRGTVTKLEWIADLKDYLKPVTENKIRCPDPAVKVESGFLDLYTDKDTTCKFARFSAREQILTEVKRLVEEHGDDDDSDLSITVTGHSLGGALAILSAYDIAEMRLNRSKKGKVIPVTVLTYGGPRVGNVRFRERMEELGVKVMRVVNVHDVVPKSPGLFLNESRPHALMKIAEGLPWCYSHVGEELALDHQNSPFLKPSVDVSTAHNLEAMLHLLDGYHGKGERFVLSSGRDHALVNKASDFLKEHLQIPPFWRQDANKGMVRNSEGRWIQAERLRFEDHHSPDIHHHLSQLRLDHPC

SEQ ID NO: 3938 - protein, 447 aa, Arabidopsis thaliana
MTAEDIRRRDKKTEEERRLRDTWRKIQGEDDWAGLMDPMDPILRSELIRYGEMAQACYDAFDFDPASKYCGTSRFTRLEFFDSLGMIDSGYEVARYLYATSNINLPNFFSKSRWSKVWSKNANWMGYVAVSDDETSRNRLGRRDIAIAWRGTVTKLEWIADLKDYLKPVTENKIRCPDPAVKVESGFLDLYTDKDTTCKFARFSAREQILTEVKRLVEEHGDDDDSDLSITVTGHSLGGALAILSAYDIAEMRLNRSKKGKVIPVTVLTYGGPRVGNVRFRERMEELGVKVMRVVNVHDVVPKSPGLFLNESRPHALMKIAEGLPWCYSHVGEELALDHQNSPFLKPSVDVSTAHNLEAMLHLLDGYHGKGERFVLSSGRDHALVNKASDFLKEHLQIPPFWRQDANKGMVRNSEGRWIQAERLRFEDHHSPDIHHHLSQLRLDHPC

SEQ ID NO: 3939 - protein, 412 aa, Arabidopsis thaliana
MDPMDPILRSELIRYGEMAQACYDAFDFDPASKYCGTSRFTRLEFFDSLGMIDSGYEVARYLYATSNINLPNFFSKSRWSKVWSKNANWMGYVAVSDDETSRNRLGRRDIAIAWRGTVTKLEWIADLKDYLKPVTENKIRCPDPAVKVESGFLDLYTDKDTTCKFARFSAREQILTEVKRLVEEHGDDDDSDLSITVTGHSLGGALAILSAYDIAEMRLNRSKKGKVIPVTVLTYGGPRVGNVRFRERMEELGVKVMRVVNVHDVVPKSPGLFLNESRPHALMKIAEGLPWCYSHVGEELALDHQNSPFLKPSVDVSTAHNLEAMLHLLDGYHGKGERFVLSSGRDHALVNKASDFLKEHLQIPPFWRQDANKGMVRNSEGRWIQAERLRFEDHHSPDIHHHLSQLRLDHPC

SEQ ID NO: 3940 - DNA, 1436 bp, Arabidopsis thaliana
aaatttcattatctcccgtcgtcgcgaccttctcagacaacagaaccaaatcctcggcggcgattgaagaaacctttccgatggatctgctcagggaagagattctgaagaaacgtaagagtctagctgaggaatctggtggtaagaagttcttcaagcggtctgagatcgagcagaagaaaatccagaagcttcgagaggaagaacgacgcgagcacgagcttaaggctcagcggagagccgccgccgccgcttccggtggagatggaaaatcatccggctctgctcctggttcttctaacgcagctacgtctgcgtcttccaaatcctctgcatcggacgctgctgctatcgccgattcaaaagccctaaccgacgaaaacctaattctcccgaggcaggaagtgattcgtcgtttgagattccttaagcagccgatgactctcttcggagaagatgatcaatcgcggctcgatcgactcaagtacgttttgaaggaaggattgttcgaggttgatagtgatatgactgaaggacagacgaatgatttcttgcgtgacatcgcagagcttaagaagaggcagaagagtggtatgatgggagataggaagaggaagagtagagatgagagaggaagagacgaaggtgatagaggtgaaacaagggaagatgaacttagtggtggtgaatcgagtgatgttgatgctgataaagatatgaaacgtttgaaagctaactttgaggatctatgcgatgaggataagatccttgtgttttataagaagctgttgattgaatggaaacaggagcttgatgcgatggagaacactgagaggagaactgcaaaagggaaacagatggtagccacttttaagcagtgtgctaggtatctagttcctctcttcaacttatgcaggaagaagggtttaccagctgacattcgtcaagctttaatggtgatggttaaccactgcataaagcgagactaccttgctgcaatggaccactacatcaaactagctatcgggaacgcgccatggcctattggagtgactatggttggtattcacgaacgttcagctcgagagaagatttacaccaacagtgttgctcacatcatgaacgatgaaaccactcgcaagtatcttcagtcagttaaaagactgatgactttctgtcaaagacgttatccaactatgccttctaaagccgttgagttcaatagcttagccaacggaagcgacttacagtctttgctagccgaagagagattctttggtggtaatcgtgaacaggtctcagaggagagactccggctcatgccttctcagagcgaaagctagtcttactgtgttttctgctttgttgtgtttttatttttgtatcaaaacgttgactctgtattatcgtctatttaaaacgttgacctgattgtc

SEQ ID NO: 3941 - protein, 446 aa, Arabidopsis thaliana
ISLSPVVATFSDNRTKSSAAIEETFPMDLLREEILKKRKSLAEESGGKKFFKRSEIEQKKIQKLREEERREHELKAQRRAAAAASGGDGKSSGSAPGSSNAATSASSKSSASDAAAIADSKALTDENLILPRQEVIRRLRFLKQPMTLFGEDDQSRLDRLKYVLKEGLFEVDSDMTEGQTNDFLRDIAELKKRQKSGMMGDRKRKSRDERGRDEGDRGETREDELSGGESSDVDADKDMKRLKANFEDLCDEDKILVFYKKLLIEWKQELDAMENTERRTAKGKQMVATFKQCARYLVPLFNLCRKKGLPADIRQALMVMVNHCIKRDYLAAMDHYIKLAIGNAPWPIGVTMVGIHERSAREKIYTNSVAHIMNDETTRKYLQSVKRLMTFCQRRYPTMPSKAVEFNSLANGSDLQSLLAEERFFGGNREQVSEERLRLMPSQSES

SEQ ID NO: 3942 - protein, 420 aa, Arabidopsis thaliana
MDLLREEILKKRKSLAEESGGKKFFKRSEIEQKKIQKLREEERREHELKAQRRAAAAASGGDGKSSGSAPGSSNAATSASSKSSASDAAAIADSKALTDENLILPRQEVIRRLRFLKQPMTLFGEDDQSRLDRLKYVLKEGLFEVDSDMTEGQTNDFLRDIAELKKRQKSGMMGDRKRKSRDERGRDEGDRGETREDELSGGESSDVDADKDMKRLKANFEDLCDEDKILVFYKKLLIEWKQELDAMENTERRTAKGKQMVATFKQCARYLVPLFNLCRKKGLPADIRQALMVMVNHCIKRDYLAAMDHYIKLAIGNAPWPIGVTMVGIHERSAREKIYTNSVAHIMNDETTRKYLQSVKRLMTFCQRRYPTMPSKAVEFNSLANGSDLQSLLAEERFFGGNREQVSEERLRLMPSQSES

SEQ ID NO: 3943 - protein, 301 aa, Arabidopsis thaliana
MTLFGEDDQSRLDRLKYVLKEGLFEVDSDMTEGQTNDFLRDIAELKKRQKSGMMGDRKRKSRDERGRDEGDRGETREDELSGGESSDVDADKDMKRLKANFEDLCDEDKILVFYKKLLIEWKQELDAMENTERRTAKGKQMVATFKQCARYLVPLFNLCRKKGLPADIRQALMVMVNHCIKRDYLAAMDHYIKLAIGNAPWPIGVTMVGIHERSAREKIYTNSVAHIMNDETTRKYLQSVKRLMTFCQRRYPTMPSKAVEFNSLANGSDLQSLLAEERFFGGNREQVSEERLRLMPSQSES

SEQ ID NO: 3944 - DNA, 1714 bp, Arabidopsis thaliana
tggtcttcaagggtttcgacttttgtgcggtagccattaacgttgttgcagaggaaagctggaaaatagagagttcgatgaactcttgttactataatggaggctcaggagtttgaaaaccgagagatttcccccggttcgaggttcctgattgagaatcagatcagaagtagctcaatatgttgacaactaccaccgatgaggaaatagacttgtcctgcgacggaggtgtcacggagcctcaaaaagttgctataatcttcgcgttttgtggtgtaggataccaaggaatgcaaaagaatcccggcgcgaaaaccattgaaggcgagctcgaagaagctttgtttcatgccggagctgtaccggagtccattagaggcaagccaaaactatacgatttcgcacgatctgcacggacagataaaggagttagtgctgttggacaagtagtttcaggtcgctttatcgttgatccacttggattcgtgaatcgtctcaattcaaatctccctaatcagattagaatcttcggttacaagcatgtaacgccgtcgtttagctccaagaagttttgcgatcgaagaaggtatgtgtatctgcttccagtgtttgctcttgatccaatctcgcatcgtgatagagaaacagtaatggctagtttgggtccgggagaggaatatgttaagtgctttgagtgctcagagagaggtcgtaagattcctccaggtcttgtgggtaaatggaaaggtaccaactttgggactaaatcattggattttcagtcagacatttcgtcgaacaactctagtgcattaagaagtgacatcaagattgaagctttgagttctaatttagctggcttatgctcagtagatgttgaagtaggtaggatacaagaagacagttgtaaattgaatacaaattcatcagagactaaggtaaagagcaagttttgttatggtgaaaaggaaaaggaaaggttcagtagaatactaagttgttatgttggatcatataatttccataacttcactacaagaacaaaagcagatgatccgactgcgaatcgtcaaatcatctccttcactgctaatactgtgattaatcttgatgggattgactttatcaagtgtgaagtcttaggcaaaagctttatgcttcatcagattcggaagatgatgggtcttgctgttgcaatcatgcggaattgtgcttctgaatcacttatccaaagtgctttcagcaaggatgtgaatataactgtaccaatggcgccagaagttggactttatctggacgaatgcttcttcacgtcttataacagaaactttgaagacagtcatgaagaagtgtccatggaagcatacaaagaagaagctgaagcattcaaattgaagcatatctattctcatatcggcgctacagagcgaaaatacggaaatatggctctttggttacattccttgaactatagaaactatccagacctaaactttggcagctgtggacaaaacacagaccaagttcttgttcataagaaaattgatgaaagagcaagtcatagtctctaagcaaaatgatggaagcttagtttgaagattttgacattgtttttgttattgttggttaatcccaccatttttgtaactttttaatcaaattagtatatttttgtgttgtaaggtgacactaatgaattgatttgttatcctcc

SEQ ID NO: 3945 - protein, 463 aa, Arabidopsis thaliana
MLTTTTDEEIDLSCDGGVTEPQKVAIIFAFCGVGYQGMQKNPGAKTIEGELEEALFHAGAVPESIRGKPKLYDFARSARTDKGVSAVGQVVSGRFIVDPLGFVNRLNSNLPNQIRIFGYKHVTPSFSSKKFCDRRRYVYLLPVFALDPISHRDRETVMASLGPGEEYVKCFECSERGRKIPPGLVGKWKGTNFGTKSLDFQSDISSNNSSALRSDIKIEALSSNLAGLCSVDVEVGRIQEDSCKLNTNSSETKVKSKFCYGEKEKERFSRILSCYVGSYNFHNFTTRTKADDPTANRQIISFTANTVINLDGIDFIKCEVLGKSFMLHQIRKMMGLAVAIMRNCASESLIQSAFSKDVNITVPMAPEVGLYLDECFFTSYNRNFEDSHEEVSMEAYKEEAEAFKLKHIYSHIGATERKYGNMALWLHSLNYRNYPDLNFGSCGQNTDQVLVHKKIDERASHSL

SEQ ID NO: 3946 - protein, 426 aa, Arabidopsis thaliana
MQKNPGAKTIEGELEEALFHAGAVPESIRGKPKLYDFARSARTDKGVSAVGQVVSGRFIVDPLGFVNRLNSNLPNQIRIFGYKHVTPSFSSKKFCDRRRYVYLLPVFALDPISHRDRETVMASLGPGEEYVKCFECSERGRKIPPGLVGKWKGTNFGTKSLDFQSDISSNNSSALRSDIKIEALSSNLAGLCSVDVEVGRIQEDSCKLNTNSSETKVKSKFCYGEKEKERFSRILSCYVGSYNFHNFTTRTKADDPTANRQIISFTANTVINLDGIDFIKCEVLGKSFMLHQIRKMMGLAVAIMRNCASESLIQSAFSKDVNITVPMAPEVGLYLDECFFTSYNRNFEDSHEEVSMEAYKEEAEAFKLKHIYSHIGATERKYGNMALWLHSLNYRNYPDLNFGSCGQNTDQVLVHKKIDERASHSL

SEQ ID NO: 3947 - protein, 306 aa, Arabidopsis thaliana
MASLGPGEEYVKCFECSERGRKIPPGLVGKWKGTNFGTKSLDFQSDISSNNSSALRSDIKIEALSSNLAGLCSVDVEVGRIQEDSCKLNTNSSETKVKSKFCYGEKEKERFSRILSCYVGSYNFHNFTTRTKADDPTANRQIISFTANTVINLDGIDFIKCEVLGKSFMLHQIRKMMGLAVAIMRNCASESLIQSAFSKDVNITVPMAPEVGLYLDECFFTSYNRNFEDSHEEVSMEAYKEEAEAFKLKHIYSHIGATERKYGNMALWLHSLNYRNYPDLNFGSCGQNTDQVLVHKKIDERASHSL

SEQ ID NO: 3948 - DNA, 1394 bp, Arabidopsis thaliana
atattttcatataaataaacctctcaacctccacactttctcacccatcacacaatcctcaaaacagagtaacccaaaaaacagagcaatctctaaaaaatctcaagaaacctcactaaaatgggttcaacggcagagacacaattaactccggtgcaagtcaccgacgacgaagctgccctcttcgccatgcaactagccagtgcttccgttcttccgatggctttaaaatccgccttagagcttgaccttcttgagattatggccaagaatggttctcccatgtctcctaccgagatcgcttctaaacttccgaccaaaaatcctgaagctccggtcatgctcgaccgtatcctccgtcttcttacgtcttactccgtcttaacctgctccaaccgtaaactttccggtgatggcgttgaacggatttacgggcttggtccggtttgcaagtatttgaccaagaacgaagatggtgtttccattgctgctctttgtcttatgaaccaagacaaggttctcatggaaagctggtaccatttgaaggatgcaattcttgatggtgggattccattcaacaaggcttatggaatgagcgcgttcgagtaccacgggactgaccctagattcaacaaggtctttaacaatggaatgtctaaccattccacaatcaccatgaagaagattcttgagacctataagggttttgaaggattgacttctttggttgatgttggtggtggcattggtgctacactcaaaatgattgtctccaagtaccctaatcttaaaggcatcaactttgatctcccacatgtcatcgaagatgctccttctcatcctggtattgagcatgttggaggagatatgtttgtaagtgtccctaaaggtgatgccatattcatgaagtggatatgtcatgactggagtgacgaacattgcgtgaaattcttgaagaactgctacgagtcacttccagaggatggaaaagtgatattagcagagtgtatacttccagagacaccagactcaagcctctcaaccaaacaagtagtccatgtcgattgcattatgttggctcacaatcccggaggcaaagaacgaaccgagaaagagtttgaggcattagccaaagcatcaggcttcaagggcatcaaagttgtctgcgacgcttttggtgttaaccttattgagttactcaagaagctctaaaaacaaacaatgttcctatgaagatgatttatatgtaaacattatctcatatctccttccacggttccaaaactatgctgtttaataatggtttttacaagaatttgattatgagtttgtatttttgtttgtttggaacaaaattatgtgattatagggaaaaataaaatgagctattattg

SEQ ID NO: 3949 - protein, 363 aa, Arabidopsis thaliana
MGSTAETQLTPVQVTDDEAALFAMQLASASVLPMALKSALELDLLEIMAKNGSPMSPTEIASKLPTKNPEAPVMLDRILRLLTSYSVLTCSNRKLSGDGVERIYGLGPVCKYLTKNEDGVSIAALCLMNQDKVLMESWYHLKDAILDGGIPFNKAYGMSAFEYHGTDPRFNKVFNNGMSNHSTITMKKILETYKGFEGLTSLVDVGGGIGATLKMIVSKYPNLKGINFDLPHVIEDAPSHPGIEHVGGDMFVSVPKGDAIFMKWICHDWSDEHCVKFLKNCYESLPEDGKVILAECILPETPDSSLSTKQVVHVDCIMLAHNPGGKERTEKEFEALAKASGFKGIKVVCDAFGVNLIELLKKL

SEQ ID NO: 3950 - protein, 340 aa, Arabidopsis thaliana
MQLASASVLPMALKSALELDLLEIMAKNGSPMSPTEIASKLPTKNPEAPVMLDRILRLLTSYSVLTCSNRKLSGDGVERIYGLGPVCKYLTKNEDGVSIAALCLMNQDKVLMESWYHLKDAILDGGIPFNKAYGMSAFEYHGTDPRFNKVFNNGMSNHSTITMKKILETYKGFEGLTSLVDVGGGIGATLKMIVSKYPNLKGINFDLPHVIEDAPSHPGIEHVGGDMFVSVPKGDAIFMKWICHDWSDEHCVKFLKNCYESLPEDGKVILAECILPETPDSSLSTKQVVHVDCIMLAHNPGGKERTEKEFEALAKASGFKGIKVVCDAFGVNLIELLKKL

SEQ ID NO: 3951 - protein, 330 aa, Arabidopsis thaliana
MALKSALELDLLEIMAKNGSPMSPTEIASKLPTKNPEAPVMLDRILRLLTSYSVLTCSNRKLSGDGVERIYGLGPVCKYLTKNEDGVSIAALCLMNQDKVLMESWYHLKDAILDGGIPFNKAYGMSAFEYHGTDPRFNKVFNNGMSNHSTITMKKILETYKGFEGLTSLVDVGGGIGATLKMIVSKYPNLKGINFDLPHVIEDAPSHPGIEHVGGDMFVSVPKGDAIFMKWICHDWSDEHCVKFLKNCYESLPEDGKVILAECILPETPDSSLSTKQVVHVDCIMLAHNPGGKERTEKEFEALAKASGFKGIKVVCDAFGVNLIELLKKL

SEQ ID NO: 3952 - DNA, 498 bp, Arabidopsis thaliana
agaggagcaactatcaatcgaatcagacattgacgaggagctttggtcgtaatccgaggaagagattaaaatcggaaagtgcgaaaatgccggtcatggagaaattgaggatgttcgtggcgcaggaaccagttgtggctgcttcttgcttaatcggcggtgttggactatttttgcctgcggttgtgaggcctattctagactctctcgaggcttccaaacaagttaaagctcctccacttaccgatgtgattgctggtgtcacagggaagaaacagagttaaaacaagcaatgacttcccctgttttcttacattcagatgatccctattccttttttgtcttttactctctctattcacaatgaataagccagactcatttgtttgttatgaaacttaatataaaggcatgtgtgtacactcacttttgttcatcacttgatcagatgtattcatttcttaacaacaaatgaaaaaagcttgaaacttttcttgc

SEQ ID NO: 3953 - protein, 93 aa, Arabidopsis thaliana
RSNYQSNQTLTRSFGRNPRKRLKSESAKMPVMEKLRMFVAQEPVVAASCLIGGVGLFLPAVVRPILDSLEASKQVKAPPLTDVIAGVTGKKQS

SEQ ID NO: 3954 - protein, 65 aa, Arabidopsis thaliana
MPVMEKLRMFVAQEPVVAASCLIGGVGLFLPAVVRPILDSLEASKQVKAPPLTDVIAGVTGKKQS

SEQ ID NO: 3955 - protein, 62 aa, Arabidopsis thaliana
MEKLRMFVAQEPVVAASCLIGGVGLFLPAVVRPILDSLEASKQVKAPPLTDVIAGVTGKKQS

SEQ ID NO: 3956 - DNA, 1628 bp, Arabidopsis thaliana
aaaataaagaaccttgacaacttctctacaacactcactttttctctctaatggtggaagcaagaagcttgaagaaaccaatccaattgggtaataaagaagatcaaaaccctagaaaattctactctcgattcatctttaaagctcttatcctcaccgtgctctgcgccgtcgtacctgtcttcctttctcagacaccagagcttgctaaccaaacaagactcctcgagcttctccaccttgttttcgtcggtatcgcagtctcttacggtctcttcagccgcaggaactacgacggaggaggaggtggaggaacaagcaatagtgatcacaacaaagctgatcatagtaataataattcgcattcatatgtgcctaagattcttgaagtatcctctgtttttaacgtgggtcacgagagtgaatctgaaccgtccgatgattcctccggtgatcaacgtaagtttcagacatggaagaacaagtaccacatgaaaatccccgaggttgagactcgtttcgttgatcgagttagttcagaaaacagagagaagcctctgcttttgccggttcggagcttgaattattctcgtgtttctgattcttccggcgataattccggtcgatgggagaaagtgagatctaagagagaacttctgaagactcttggcgatgataatagtgatgtgcttccttctccgattccatggaggtcaagatcatcttcatcatcatcatcatcatcaaaggaggttgaatctctaccgtccgttaagaatctgactacagttgaatcacagccgttgatcaagaatctgacaccatcttcttctttctcttctccaagaaagtcgaatcctatacctaatctcgcatctgagttccatccatctccgccaccgcctcctccgccgccgccaccactaccggcgttttataactcctcgtcgagaaaagatcatcccggaatttacagggttgagaggagagaatcatcagttcacaagacgaaatttgcaggaggtgagtttcatcctccgccgcctcctcctccaccacctccggtggagtattataagtcacctccgacaaaattcagactaagtaacgaacggagaaagtcctcggagcaaaagatgaaaagaaacgctcctaaaaaggtttggtggtccgatccaatcgtggaatcgaaggaacaagacacagagaagaatgatcaaagaagtaacttgggaagcaaggcagtggaagaatccgagaatggagaacagagaagaggagaaaatgaaatccacgacgaggttgagaagaagatagtagaggaagaaggagttagtgagatcaacaatggaagtgacgtggacaagaaggcagatgagttcattgcaaagttcagagaacagattaggttacaaagaatcgagtctatcaagagatctactaataagatctctgcaaattcttcgaggtagaactcattatttattaataataggtatacattttaagtatgttttggtaatcatcataaggttgtaatattaaggggaacaaatatttttgttacatttattcacccacaaaaacaggaatggagatctatgtgaagtataaacagattgatactc

SEQ ID NO: 3957 - protein, 473 aa, Arabidopsis thaliana
MVEARSLKKPIQLGNKEDQNPRKFYSRFIFKALILTVLCAVVPVFLSQTPELANQTRLLELLHLVFVGIAVSYGLFSRRNYDGGGGGGTSNSDHNKADHSNNNSHSYVPKILEVSSVFNVGHESESEPSDDSSGDQRKFQTWKNKYHMKIPEVETRFVDRVSSENREKPLLLPVRSLNYSRVSDSSGDNSGRWEKVRSKRELLKTLGDDNSDVLPSPIPWRSRSSSSSSSSSKEVESLPSVKNLTTVESQPLIKNLTPSSSFSSPRKSNPIPNLASEFHPSPPPPPPPPPPLPAFYNSSSRKDHPGIYRVERRESSVHKTKFAGGEFHPPPPPPPPPPVEYYKSPPTKFRLSNERRKSSEQKMKRNAPKKVWWSDPIVESKEQDTEKNDQRSNLGSKAVEESENGEQRRGENEIHDEVEKKIVEEEGVSEINNGSDVDKKADEFIAKFREQIRLQRIESIKRSTNKISANSSR

SEQ ID NO: 3958 - protein, 326 aa, Arabidopsis thaliana
MKIPEVETRFVDRVSSENREKPLLLPVRSLNYSRVSDSSGDNSGRWEKVRSKRELLKTLGDDNSDVLPSPIPWRSRSSSSSSSSSKEVESLPSVKNLTTVESQPLIKNLTPSSSFSSPRKSNPIPNLASEFHPSPPPPPPPPPPLPAFYNSSSRKDHPGIYRVERRESSVHKTKFAGGEFHPPPPPPPPPPVEYYKSPPTKFRLSNERRKSSEQKMKRNAPKKVWWSDPIVESKEQDTEKNDQRSNLGSKAVEESENGEQRRGENEIHDEVEKKIVEEEGVSEINNGSDVDKKADEFIAKFREQIRLQRIESIKRSTNKISANSSR

SEQ ID NO: 3959 - DNA, 950 bp, Arabidopsis thaliana
actcttactctgttctcgctacagaatctcctgggaaaaaaaaaagaaacttgatccacccgaattccccaaatcttcacaatttctggaaactctctcgatcgtgaagcagaaaagtgaggttccaaatgggttctgtttcgggtcaaacccgaattacaacgatgaacctctcgctctcaacagcagagaagaaccctaatttccgctcgtcgcttctcaattctaagaacgcaatttcagatactttaggggtctcttccaaatgcagtacattcctcaggggtcaatttcaaagaatacatttttcttggctacaacacactcgacctttgagaaaacgaacagtatttggtcacgtgagctgcgtcatgccgttaacggaagagaatgtggagagagtgttagacgaagtacgaccatctctaatggccgacggaggaaacgtggcgttgcacgaaatcgacggacttgtggtggttttaaagctacaaggagcttgtggttcgtgtcctagctcatcaatgacgttgaagatgggaatcgagagtcgtcttcgagacaagattccagagatcatgtccgttgagcagtttcttgaatccgagacaggaggtttagagctgaacgatgagaacattgagaaggttctctctgagttaaggccgtacctatccggtactggaggtggggggcttgagttagttgagattgatggttacgtggtcaaggttcgactcactggaccagctgctggagtcatgactgttcgtgtcgcgttgactcaaaaactgagggaaacaattccttctataggtgcagtccagcttctagagtgacattaacctttttattttgtaacttatatacaaggcctatttttgattcaatatattttatttccaattatataattagtacaactaatacaataaccatttctgttgaag

SEQ ID NO: 3960 - protein, 236 aa, Arabidopsis thaliana
MGSVSGQTRITTMNLSLSTAEKNPNFRSSLLNSKNAISDTLGVSSKCSTFLRGQFQRIHFSWLQHTRPLRKRTVFGHVSCVMPLTEENVERVLDEVRPSLMADGGNVALHEIDGLVVVLKLQGACGSCPSSSMTLKMGIESRLRDKIPEIMSVEQFLESETGGLELNDENIEKVLSELRPYLSGTGGGGLELVEIDGYVVKVRLTGPAAGVMTVRVALTQKLRETIPSIGAVQLLE

SEQ ID NO: 3961 - protein, 224 aa, Arabidopsis thaliana
MNLSLSTAEKNPNFRSSLLNSKNAISDTLGVSSKCSTFLRGQFQRIHFSWLQHTRPLRKRTVFGHVSCVMPLTEENVERVLDEVRPSLMADGGNVALHEIDGLVVVLKLQGACGSCPSSSMTLKMGIESRLRDKIPEIMSVEQFLESETGGLELNDENIEKVLSELRPYLSGTGGGGLELVEIDGYVVKVRLTGPAAGVMTVRVALTQKLRETIPSIGAVQLLE

SEQ ID NO: 3962 - protein, 155 aa, Arabidopsis thaliana
MPLTEENVERVLDEVRPSLMADGGNVALHEIDGLVVVLKLQGACGSCPSSSMTLKMGIESRLRDKIPEIMSVEQFLESETGGLELNDENIEKVLSELRPYLSGTGGGGLELVEIDGYVVKVRLTGPAAGVMTVRVALTQKLRETIPSIGAVQLLE

SEQ ID NO: 3963 - DNA, 1272 bp, Arabidopsis thaliana
accatctacaactttcattcttccactacatttctctccttgagtatcttcttatcctattttccaaattccaaaacaattcacaaaatggctacatgctggcctgagccgattgtttccgtgcaatccttgtcccaaaccggtgtaccaactgtaccaaaccgctatgtgaagccggctcatcagagaccggtctttaacaccacccaatccgatgctgggatagaaatccctgttctagacatgaacgacgtttgggggaaaccagaggggctaaggctcgtgaggagcgcgtgtgaggagtggggtttcttccaaatggtgaaccatggtgtgacccactcgttgatggagagagtgagaggagcgtggcgagagttcttcgagctaccgctagaggagaaacggaagtatgcaaactcaccggacacgtacgagggatatggaagccgccttggggttgtgaaagatgctaaattagattggagtgattatttcttcctcaattacttgccttcttccataagaaacccttccaagtggccatctcagcctcctaagatcagagaattgatcgaaaagtacggagaagaagtgagaaaactgtgcgaaaggctaacagagacgttgtcagagagtttaggtttaaaaccaaacaagctcatgcaggctttaggaggaggcgacaaagtcggagcttctctgaggacaaacttctacccaaaatgccctcagccgcagctcactttaggtctctcttctcattctgaccctggaggcatcaccattcttctcccggacgagaaggtcgctggccttcaggtccgtcgtggtgatggctgggtcaccattaaatcagtccctaatgctttgatcgttaacattggagatcaacttcagatacttagcaatggaatttacaaaagcgtggaacatcaagtgatcgttaattccggtatggaacgagtctctttggcattcttctataacccgagaagtgatatcccggttggaccaatcgaagaactagtaactgcaaaccgacctgctctttataaaccaatcaggttcgacgagtaccgttctctgataaggcaaaagggtccttgtggaaaaaaccaagtcgactcactgttattaactagataataattgataaacattccaagtattatctgttattcctatgtccttgatatagtcgttactaaataatatgtaaaccgtatcttcactttttcttattatattgctgctctctcttgaggtttg

SEQ ID NO: 3964 - protein, 382 aa, Arabidopsis thaliana
TIYNFHSSTTFLSLSIFLSYFPNSKTIHKMATCWPEPIVSVQSLSQTGVPTVPNRYVKPAHQRPVFNTTQSDAGIEIPVLDMNDVWGKPEGLRLVRSACEEWGFFQMVNHGVTHSLMERVRGAWREFFELPLEEKRKYANSPDTYEGYGSRLGVVKDAKLDWSDYFFLNYLPSSIRNPSKWPSQPPKIRELIEKYGEEVRKLCERLTETLSESLGLKPNKLMQALGGGDKVGASLRTNFYPKCPQPQLTLGLSSHSDPGGITILLPDEKVAGLQVRRGDGWVTIKSVPNALIVNIGDQLQILSNGIYKSVEHQVIVNSGMERVSLAFFYNPRSDIPVGPIEELVTANRPALYKPIRFDEYRSLIRQKGPCGKNQVDSLLLTR

SEQ ID NO: 3965 - protein, 353 aa, Arabidopsis thaliana
MATCWPEPIVSVQSLSQTGVPTVPNRYVKPAHQRPVFNTTQSDAGIEIPVLDMNDVWGKPEGLRLVRSACEEWGFFQMVNHGVTHSLMERVRGAWREFFELPLEEKRKYANSPDTYEGYGSRLGVVKDAKLDWSDYFFLNYLPSSIRNPSKWPSQPPKIRELIEKYGEEVRKLCERLTETLSESLGLKPNKLMQALGGGDKVGASLRTNFYPKCPQPQLTLGLSSHSDPGGITILLPDEKVAGLQVRRGDGWVTIKSVPNALIVNIGDQLQILSNGIYKSVEHQVIVNSGMERVSLAFFYNPRSDIPVGPIEELVTANRPALYKPIRFDEYRSLIRQKGPCGKNQVDSLLLTR

SEQ ID NO: 3966 - protein, 301 aa, Arabidopsis thaliana
MNDVWGKPEGLRLVRSACEEWGFFQMVNHGVTHSLMERVRGAWREFFELPLEEKRKYANSPDTYEGYGSRLGVVKDAKLDWSDYFFLNYLPSSIRNPSKWPSQPPKIRELIEKYGEEVRKLCERLTETLSESLGLKPNKLMQALGGGDKVGASLRTNFYPKCPQPQLTLGLSSHSDPGGITILLPDEKVAGLQVRRGDGWVTIKSVPNALIVNIGDQLQILSNGIYKSVEHQVIVNSGMERVSLAFFYNPRSDIPVGPIEELVTANRPALYKPIRFDEYRSLIRQKGPCGKNQVDSLLLTR

SEQ ID NO: 3967 - DNA, 1250 bp, Arabidopsis thaliana
ctctctctctctctctcttctcgcttctcttctcctctccgatcttctctgtgaccctcttcttcttcgatttcctttgggtttcttctccgaatcgccggagaaaaaaacccttctttgaatctaaagagactgtttttttgaagctattgactgattgattgataaggaagaataagcattgatcgatctgaattttgggtacaagatgtcgagattcagagacaggacggaggatttcaaggattctgttcggaattccgctgtttcgataggttataatgagtctaaagtggcatcaacaatggcgtcttttattatacataagccaaaggagagatcgcctttcacgaaagctgctttcaaaacgcttgatagcatcaaggagttggaactgtttatgttgaagcatcgaaaggattatgttgatctgcaccggactacagaacaggaaaaggatagtattgaacaagaagttgctgcttttattaaagcttgcaaagaacagatcgatattctcataaacagtattagaaatgaagaagcaaactccaaaggatggcttggcctccccgcagataacttcaatgctgattctatagcacacaaacatggagtggttttgattctgagtgagaaacttcattcagtcactgcccagtttgatcagcttagagctactcgtttccaagatattataaacagagctatgccgagaagaaaacctaagagggtcataaaggaagctaccccaattaatacaactctgggaaattcggagtccatagaaccggatgaaatccaggcccaacctcgtagattacaacaacaacaacttctagacgatgaaacacaagcccttcaggtagagctaagtaatcttttagatggtgctaggcagacagaaactaagatggtggagatgtctgcattaaaccacttgatggcaactcatgttctgcagcaagcccaacagatagagtttctttatgaccaggcagttgaggcaacaaagaacgtggagcttggaaacaaagagctttctcaagcaatccaacgaaacagcagcagcagaacctttctcttactgtttttcttcgtccttactttctccgtcttgttcttggattggtacagttaaaaaaccattctccaacaacaacttcacacagtttttgtagattttgattgttaactataaattatgaaaatttggaaatgggtttaaatgttaaaacaaaaataatgag

SEQ ID NO: 3968 - protein, 310 aa, Arabidopsis thaliana
MSRFRDRTEDFKDSVRNSAVSIGYNESKVASTMASFIIHKPKERSPFTKAAFKTLDSIKELELFMLKHRKDYVDLHRTTEQEKDSIEQEVAAFIKACKEQIDILINSIRNEEANSKGWLGLPADNFNADSIAHKHGVVLILSEKLHSVTAQFDQLRATRFQDIINRAMPRRKPKRVIKEATPINTTLGNSESIEPDEIQAQPRRLQQQQLLDDETQALQVELSNLLDGARQTETKMVEMSALNHLMATHVLQQAQQIEFLYDQAVEATKNVELGNKELSQAIQRNSSSRTFLLLFFFVLTFSVLFLDWYS

SEQ ID NO: 3969 - protein, 278 aa, Arabidopsis thaliana
MASFIIHKPKERSPFTKAAFKTLDSIKELELFMLKHRKDYVDLHRTTEQEKDSIEQEVAAFIKACKEQIDILINSIRNEEANSKGWLGLPADNFNADSIAHKHGVVLILSEKLHSVTAQFDQLRATRFQDIINRAMPRRKPKRVIKEATPINTTLGNSESIEPDEIQAQPRRLQQQQLLDDETQALQVELSNLLDGARQTETKMVEMSALNHLMATHVLQQAQQIEFLYDQAVEATKNVELGNKELSQAIQRNSSSRTFLLLFFFVLTFSVLFLDWYS

SEQ ID NO: 3970 - protein, 246 aa, Arabidopsis thaliana
MLKHRKDYVDLHRTTEQEKDSIEQEVAAFIKACKEQIDILINSIRNEEANSKGWLGLPADNFNADSIAHKHGVVLILSEKLHSVTAQFDQLRATRFQDIINRAMPRRKPKRVIKEATPINTTLGNSESIEPDEIQAQPRRLQQQQLLDDETQALQVELSNLLDGARQTETKMVEMSALNHLMATHVLQQAQQIEFLYDQAVEATKNVELGNKELSQAIQRNSSSRTFLLLFFFVLTFSVLFLDWYS

SEQ ID NO: 3971 - DNA, 1333 bp, Arabidopsis thaliana
agagctctagaatctctcaacaatggcggaatcgattttcagaaagctcagagatggtggcgaagaaggcgaactcgcaccagctctcactatagaagaaactgtagcttcccctttcggactcgatgtctccggctatcttctcacaaatctatcttcttcaattttagctggaaaatcctcgtcgcagggtcttgtgttgatcacattctcgcggagcccttcgttctatttgcaattgttgaagcaaaaaggaatcgttgtctcttcatcttctaaatggattcgtattttggattgttacactgatccattgggatggattgatcaatcttcaactagttttagtgaaggttcaagtttgattaagttacataagtgtgtgagtgacttgaaaaagcttttttcttcaatcattgaagcaggaagagagttggttggaactgggaagacacgtttctgcgttgccattgattcggtaaatgagttgctaagacattcagcgatgccattagtttctggtcttttaacagatcttcgaagccatgcgcaaatttccagtgtcttttggtcattgaacactgaccttcaccaagagaaggtcacaaatgcgcttgaatatatatccacaatgaaagcgaacttagaacctttgtgtccatcttcagatgggcaaaggaatgctttagaaaacctcttttcggttcatcaggatttcggtaaaggacggtttcatgtccggtttaagcttagaaaaggacgtgtgagagtaatgtctgaagaatatcatgttgatcaatcggggataaacttttcacccatttcctctgtggatactgttattgcagccactaaaagccttttgcctaaggttcaattcaatctccagttgtctgagaaagaacgggtcgagaaagaaaaagttgtgcttccttttgagcaccaagatgatggaaaatcgaacgagatctatgatgggaggagatctcttgtggatggcaagattgagacaacaccattgtcgtcaatggagttgcagaccgatgtggtttcgtcgggtaagggtggtgagattatatatttcagagattcagacgatgagcatcctgattctgatgaagatcctgatgatgatttggacatttaaggttcttaatttacacttgtaagaccagagaatagctccagttttggttttggcaatagttgggatcttagtatccaactttgtacactaaatagaagatttgattggttattagatgtgtattacagttataattgttacagtaatgatctcatcttctattattcttgagttgtttgttgtgtt

SEQ ID NO: 3972 - protein, 374 aa, Arabidopsis thaliana
MAESIFRKLRDGGEEGELAPALTIEETVASPFGLDVSGYLLTNLSSSILAGKSSSQGLVLITFSRSPSFYLQLLKQKGIVVSSSSKWIRILDCYTDPLGWIDQSSTSFSEGSSLIKLHKCVSDLKKLFSSIIEAGRELVGTGKTRFCVAIDSVNELLRHSAMPLVSGLLTDLRSHAQISSVFWSLNTDLHQEKVTNALEYISTMKANLEPLCPSSDGQRNALENLFSVHQDFGKGRFHVRFKLRKGRVRVMSEEYHVDQSGINFSPISSVDTVIAATKSLLPKVQFNLQLSEKERVEKEKVVLPFEHQDDGKSNEIYDGRRSLVDGKIETTPLSSMELQTDVVSSGKGGEIIYFRDSDDEHPDSDEDPDDDLDI

SEQ ID NO: 3973 - protein, 213 aa, Arabidopsis thaliana
MPLVSGLLTDLRSHAQISSVFWSLNTDLHQEKVTNALEYISTMKANLEPLCPSSDGQRNALENLFSVHQDFGKGRFHVRFKLRKGRVRVMSEEYHVDQSGINFSPISSVDTVIAATKSLLPKVQFNLQLSEKERVEKEKVVLPFEHQDDGKSNEIYDGRRSLVDGKIETTPLSSMELQTDVVSSGKGGEIIYFRDSDDEHPDSDEDPDDDLDI

SEQ ID NO: 3974 - DNA, 538 bp, Arabidopsis thaliana
aaccacagtcgcggacagagctaaaaccaccatttgaagaaggagaagaagaagaagacgattcggtgaaagcgaagatgggtggaggaatggaaacgaacaagaacaagttcatcgaggactggggatctgctagagagaatctcgagcacaatttccgctggactcgtcgtaacttcgctctcatcggaatcttcggcatcgctctcccgatcattgtctacaagggaatcgtcaaagatttccatatgcaagatgaagatgcaggcagaccacacagaaagttcctctgaggttgtttgcaagaacactctctgcaataaagtctcagcaatgtgaaatttcaagacgaggatgttaaaacccgcttttgttttttcatttcaatcaacatctggaacccaaggatataatttattttttggaaaagtttgttgtaatgactacactttgttatgcaaataaacaaaactcagttttcccttgagtttgacatacttattgtgtgtgttgattcagcatatgcaggatttaaacg

SEQ ID NO: 3975 - protein, 96 aa, Arabidopsis thaliana
PQSRTELKPPFEEGEEEEDDSVKAKMGGGMETNKNKFIEDWGSARENLEHNFRWTRRNFALIGIFGIALPIIVYKGIVKDFHMQDEDAGRPHRKFL

SEQ ID NO: 3976 - protein, 71 aa, Arabidopsis thaliana
MGGGMETNKNKFIEDWGSARENLEHNFRWTRRNFALIGIFGIALPIIVYKGIVKDFHMQDEDAGRPHRKFL

SEQ ID NO: 3977 - protein, 67 aa, Arabidopsis thaliana
METNKNKFIEDWGSARENLEHNFRWTRRNFALIGIFGIALPIIVYKGIVKDFHMQDEDAGRPHRKFL

SEQ ID NO: 3978 - DNA, 529 bp, Arabidopsis thaliana
agaactctacaattcttctatatactttctcaactcttgtctccaagattgcatgagagaaaaaaaaaaaaagtgattgaaatcaatctcttgtgacgtaatggcgattgaaacagaggacatcaagtacgaagagagtttcataaagaacactcgaggatttaagttgttcacatgcagatggctaccaacaaacagagagccaagggctttagttttcctttgccatgggtatggcatggaatgcagtatcaccatgaatagtactgctagaaggcttgtgaaggcaggatttgcggtatatggaatggattatgaaggacatggaaaatctgatgggcttagcgcttatatctcaaactttgatcgtcttgttgatgatgtctcaactcactacacagctatttgcggtaacgttgactttgtgatggtaaaagtcaacttattgattgatatttttgtgtgacaaaaaaacgttgtaatggaaaaaactatataattggtgaatcaatatgaattttcttggttg

SEQ ID NO: 3979 - protein, 121 aa, Arabidopsis thaliana
MAIETEDIKYEESFIKNTRGFKLFTCRWLPTNREPRALVFLCHGYGMECSITMNSTARRLVKAGFAVYGMDYEGHGKSDGLSAYISNFDRLVDDVSTHYTAICGNVDFVMVKVNLLIDIFV

SEQ ID NO: 3980 - protein, 75 aa, Arabidopsis thaliana
MECSITMNSTARRLVKAGFAVYGMDYEGHGKSDGLSAYISNFDRLVDDVSTHYTAICGNVDFVMVKVNLLIDIFV

SEQ ID NO: 3981 - protein, 69 aa, Arabidopsis thaliana
MNSTARRLVKAGFAVYGMDYEGHGKSDGLSAYISNFDRLVDDVSTHYTAICGNVDFVMVKVNLLIDIFV

SEQ ID NO: 3982 - DNA, 540 bp, Arabidopsis thaliana
gcgacccgtctctctctctctctctctccttgaaatcgaaagatcaaaaaagcgacactgaaaatggaaaatcggtcagaaatgggtaaccggaggcagcagaatctcttcgtcatagcttctcccgacgagattgctaagatccatcgagccgaaacttccaaacaagccggagctattgccggagctaaggccgccgccgttgccgccgtcgccagtgcgattcccacagtagctgccgttcgtatgttcccgtgggctaaggcaaacctcaactacactgctcaagcactcattatttcttcagcttctatcgctgcgttcttcataaccgcggataaaacgattctacaaggcgcaagaagaaacaccgaggctcagttaaagaaagttcagcaagactctaaataatttctcttcttattgtaacacaaatcaatcatcatctttctctgttttgtatgcatattttgccttgattcttaataagagtgttattattataaggaataacaaattctttaagaccattttttatcc

SEQ ID NO: 3983 - protein, 115 aa, Arabidopsis thaliana
MENRSEMGNRRQQNLFVIASPDEIAKIHRAETSKQAGAIAGAKAAAVAAVASAIPTVAAVRMFPWAKANLNYTAQALIISSASIAAFFITADKTILQGARRNTEAQLKKVQQDSK

SEQ ID NO: 3984 - protein, 109 aa, Arabidopsis thaliana
MGNRRQQNLFVIASPDEIAKIHRAETSKQAGAIAGAKAAAVAAVASAIPTVAAVRMFPWAKANLNYTAQALIISSASIAAFFITADKTILQGARRNTEAQLKKVQQDSK

SEQ ID NO: 3985 - DNA, 537 bp, Arabidopsis thaliana
acgaacaacggaagaacaaaactctgagcgaatcaatcaatcggaaaaaggagataggtttcgcgaaaatggcggagaaaaaggatagtgtgccaccggaatacgatgtgaatgctaagtgggacgcatgtctcgatctcactgtccgccgcttcgtttactcttccctcggcggcgcatttgccggtcttctgttcttcaggagtcctgttacaagatgggcatcgattgctttaggtgctggaattggtattggctctgcatattcagattgttctcgtgcttttgattcaccttcttcatcttcagctaatttagcagctcccaagaataatattacagagacttctcctgtatctcaggctgcagacgagtagacaatgtcgataaagtggaagttagtaacacatccaatgatcggggtgttcagaaacagagctattatcatgcaatgctttgttgaattgtttcctaaacctgcaaagacaagagtctattgagataatgtcaaatgtaaaaacctttttttattcgctc

SEQ ID NO: 3986 - protein, 124 aa, Arabidopsis thaliana
EQRKNKTLSESINRKKEIGFAKMAEKKDSVPPEYDVNAKWDACLDLTVRRFVYSSLGGAFAGLLFFRSPVTRWASIALGAGIGIGSAYSDCSRAFDSPSSSSANLAAPKNNITETSPVSQAADE

SEQ ID NO: 3987 - protein, 102 aa, Arabidopsis thaliana
MAEKKDSVPPEYDVNAKWDACLDLTVRRFVYSSLGGAFAGLLFFRSPVTRWASIALGAGIGIGSAYSDCSRAFDSPSSSSANLAAPKNNITETSPVSQAADE

SEQ ID NO: 3988 - DNA, 2161 bp, Arabidopsis thaliana
ccttaaagaagcacatctctttactcatttcacgattcccctgtctcttgtttctctctcacttacctcttctcgagttttctcccattcttgggtcttcatcgagaccaaatccggagaaagttgatgtttttacagcacaaacagacacagacacatacatgtgttgtgtctccctaatcccattattactaactcgcatccaattcacacttctctcctaaattcccatccttttcagatccaaaacactctcctccaaaacccagattgccaaattagggaatttgacacaaaacccatctgagagcataatcaagagatagagagacaatgggagtgatattggactcatggtgcttttgtaaaggagttggcaaaagcgagaagatgaaaggttccatttttaccggcaaagctccggcgatggctcgaatctctgtctccggaccaaatggtgttacttctggaactggattcctcattcaccggaatcttcttctgaccactcacctcaatcttccttccatctccgccaccgaaaccgccgaggtccgccttcagaacggtgtcgctgctgctctcttccctcacaggtttttcattacgagttcagttattgatctcactattgttggcttagaccttgttgatggagactcaagttcccagagccaacttcaacaacaaccacattacctgaagacatgttccaaaccaaacctggatctagggagtgtggtgtacctcttaggctatgccaatcagaatgaactcaagatcggcgagggaaagttagttgtagctaccgacaatctcatcaaactctcaactgatgaaatgatttggagtcctggatctgctggatttgatgttcaagggaatcttgcattcatgatttgtgatccgaggaaactatcgacatcaccaacctcaacctcgtcatcttcctcttcttctttgaagaaagataacaacaagacactgatgatgcagtttggtataccaataccagtaatatgtgactggctgaatcagcattgggaaggtagtttggatgaacatacgacgaaacctaagttgcctctcattcgattaatgtcttctggtcagaagagtgagcgttcttgtacttcattcaccatgcgccgtgttttcaagccaaacgactctgctgatgttggaacaccatcttcatctaacactagagatcaaactcatccgagctcttctatcgctgctgaggaagaaaaagaagaagaaacctcaaaaaccaatccacaagtctgcggaactactactcatgcgcagggtatccctacccctgagatatatgaatcgccaaagttgacttctggtcctctaagaaatgagacagctcaagtacaccttttggacatcaactttcctccacggatacctaaagctataacctttcatcctgagctcaactctctacagagtaaccatatagtggaagaggctgagattgtctctgaaggatcagatgcgcagattgcttcgacaggttcagtaaatggtgctctcagtgaggtcatctcaagttcaccgccagcagcagctcactatgtatataacaatcatggatacagcagcgaggaagagacaatgtattctgcagaaacagcagaaagccgaaactacccaactcctccaagaaaaagcgagtttcatcatgagagagttggaaggagtcaaagctgtgtgagctccagcagatggggaactcctcagaagagtttgaatggtagaagagaaatgctggagaaacagagaagcttcgtccatgggaagaagatgcattcacaaggagcaatgtcacagaggagtaatgactattacagcccaacggtctcatctatcatgaagaaaaggattaatagttcagagcaacagattatcaaaccggtacctagacctagagctgttagttcttcaccaagatgggcgttctaaggtcgatacagaccggagaaagagccaccttcatagaaagagagacatctttgtttagatttcgatatctctcattcttgtataaccaattttattttaactcttgtgcagacatattgaagaaaacaacaaataggaaacatagaatcttgaatcgatcgggtttaagcccttaaagcaatct

SEQ ID NO: 3989 - protein, 547 aa, Arabidopsis thaliana
MGVILDSWCFCKGVGKSEKMKGSIFTGKAPAMARISVSGPNGVTSGTGFLIHRNLLLTTHLNLPSISATETAEVRLQNGVAAALFPHRFFITSSVIDLTIVGLDLVDGDSSSQSQLQQQPHYLKTCSKPNLDLGSVVYLLGYANQNELKIGEGKLVVATDNLIKLSTDEMIWSPGSAGFDVQGNLAFMICDPRKLSTSPTSTSSSSSSSLKKDNNKTLMMQFGIPIPVICDWLNQHWEGSLDEHTTKPKLPLIRLMSSGQKSERSCTSFTMRRVFKPNDSADVGTPSSSNTRDQTHPSSSIAAEEEKEEETSKTNPQVCGTTTHAQGIPTPEIYESPKLTSGPLRNETAQVHLLDINFPPRIPKAITFHPELNSLQSNHIVEEAEIVSEGSDAQIASTGSVNGALSEVISSSPPAAAHYVYNNHGYSSEEETMYSAETAESRNYPTPPRKSEFHHERVGRSQSCVSSSRWGTPQKSLNGRREMLEKQRSFVHGKKMHSQGAMSQRSNDYYSPTVSSIMKKRINSSEQQIIKPVPRPRAVSSSPRWAF

SEQ ID NO: 3990 - protein, 528 aa, Arabidopsis thaliana
MKGSIFTGKAPAMARISVSGPNGVTSGTGFLIHRNLLLTTHLNLPSISATETAEVRLQNGVAAALFPHRFFITSSVIDLTIVGLDLVDGDSSSQSQLQQQPHYLKTCSKPNLDLGSVVYLLGYANQNELKIGEGKLVVATDNLIKLSTDEMIWSPGSAGFDVQGNLAFMICDPRKLSTSPTSTSSSSSSSLKKDNNKTLMMQFGIPIPVICDWLNQHWEGSLDEHTTKPKLPLIRLMSSGQKSERSCTSFTMRRVFKPNDSADVGTPSSSNTRDQTHPSSSIAAEEEKEEETSKTNPQVCGTTTHAQGIPTPEIYESPKLTSGPLRNETAQVHLLDINFPPRIPKAITFHPELNSLQSNHIVEEAEIVSEGSDAQIASTGSVNGALSEVISSSPPAAAHYVYNNHGYSSEEETMYSAETAESRNYPTPPRKSEFHHERVGRSQSCVSSSRWGTPQKSLNGRREMLEKQRSFVHGKKMHSQGAMSQRSNDYYSPTVSSIMKKRINSSEQQIIKPVPRPRAVSSSPRWAF

SEQ ID NO: 3991 - protein, 516 aa, Arabidopsis thaliana
MARISVSGPNGVTSGTGFLIHRNLLLTTHLNLPSISATETAEVRLQNGVAAALFPHRFFITSSVIDLTIVGLDLVDGDSSSQSQLQQQPHYLKTCSKPNLDLGSVVYLLGYANQNELKIGEGKLVVATDNLIKLSTDEMIWSPGSAGFDVQGNLAFMICDPRKLSTSPTSTSSSSSSSLKKDNNKTLMMQFGIPIPVICDWLNQHWEGSLDEHTTKPKLPLIRLMSSGQKSERSCTSFTMRRVFKPNDSADVGTPSSSNTRDQTHPSSSIAAEEEKEEETSKTNPQVCGTTTHAQGIPTPEIYESPKLTSGPLRNETAQVHLLDINFPPRIPKAITFHPELNSLQSNHIVEEAEIVSEGSDAQIASTGSVNGALSEVISSSPPAAAHYVYNNHGYSSEEETMYSAETAESRNYPTPPRKSEFHHERVGRSQSCVSSSRWGTPQKSLNGRREMLEKQRSFVHGKKMHSQGAMSQRSNDYYSPTVSSIMKKRINSSEQQIIKPVPRPRAVSSSPRWAF

SEQ ID NO: 3992 - DNA, 512 bp, Arabidopsis thaliana
atcactcataaattcacaattcagtgatcgtcatttgcccaatcacaaaaccaatgggatcaactaataaactctggagccgtaaaccagacgtcaaaaccgggaaatcagaatttccggttaccagattcctccgtacacaaatcgataacatcaagacaacaaccgtcggtcccggaatcggcggcggcattggctgcggcgctggaatcggcattggtctctccggcgggctcggaataggtgcctctgaaggacttgaccattctaacgtggttcttggattcggtattggttgtggtatcgggttcgggtttggatacggatttggagttggcggcgggtacagtttcgatgacatcaaagagagatttgacctatgaaaaaaagctccggttcataattccgggtcgggtttgggtaaaagatttttaaagcattatgttaattttgtactgtattaacagttttgttaattatataagttcaataaaaatatcctcccttgtgtc

SEQ ID NO: 3993 - protein, 109 aa, Arabidopsis thaliana
MGSTNKLWSRKPDVKTGKSEFPVTRFLRTQIDNIKTTTVGPGIGGGIGCGAGIGIGLSGGLGIGASEGLDHSNVVLGFGIGCGIGFGFGYGFGVGGGYSFDDIKERFDL

SEQ ID NO: 3994 - DNA, 4723 bp, Arabidopsis thaliana
ctctctctctctctatctctatctctcgatttgggggagttccgtcacggtggactagtacgtctcgttgccgttggtggcgtagtcggaattaatttcctcggcgttgagattcacatggtctagaattctagctaagtggttgttgttgttgttacgatttccgatttctcgagtttttttttttatatttagcttctgtttcgtttatccctcccggagacactccttggtcgaatctctcatgctgaggtgttttggacacttgttgtcaagaagaaaccagttttggttctgattaatcgttggttggaaaatatactcaattccaggccatgccttcacttcaactattgcagttaactgagcggggtcggggtcttgtagcgtcaagacggaaatctatactgcttgcggctgggattgtagctgctggtggaactgctgtttacctgaaatcaagggtcgcttcccggaggcctgattcttcgcgtctttgcaatggtcagagtgatgatgatgagactttggaaaagctgactgcaactgatcaaaatgcaaagataaccacgaaaaagaagaaaggaggaggattgaagtctcttcaggttctgactgctattcttctctctcagatgggaaaaatgggtgccagggatcttttggcactagtcgccaccgtggttttcagaacagctttgagcaatagattggcaaaagtgcaaggtttccttttccgtgctgctttcttaaggcgtgcgccactgtttctacggctcatctccgagaatattatgttgtgtttcatgctatcaacattgcactctacttcaaagtacataactggggcattgagtttgcgattcagaaagatattgaccaagattatccattcacactattttgagaatatggtatattacaaaatatcacacgtggatggtcggattacgcaccctgaacaaagaattgccagcgatgtaccaagattctcctcagagttgagcgatcttatactggatgatttgacggcggttactgatggaattttgtatgcatggcgcctgtgttcatatgctagtccaaaatacatcttctggatactggcctatgtactgggggctgggacggcgataagaaacttttctccttcttttgggaaattgatgtccaaggaacagcagttagaaggagagtaccggcaacttcattcacgcttaaggactcattcggaaagcatagcattctatggtggggaaaccagggaagaatctcatatacaacaaaagttcaagaatcttgttagccatatgagtcacgtgcttcatgatcactggtggtttggtatgatccaagattttctgctgaagtatcttggggccacagttgcagttattctgattatcgaaccattcttctctgggcatctaagacctgacgactcgaccttaggaagagctgagatgcttagcaatataagatatcacactagtgtcattatatctctctttcaggcgttgggaacactttctataagttccaggcggctcaaccgactcagtggttatgctgaccgaatccatgagttgatggctgtctcaagagaactcagtggtgatgataaatcgtctttccagagaaatagaagcagaaattatctaagtgaagctaattatgtagagttttccgatgtcaaggttgttactccaaccggaaatgttttggtggaggatctcacccttcgagttgagcaagggtctaatcttctgattacaggtcctaatggaagtggcaagagttcccttttccgagtattaggaggtctatggcccctggtgtctggacatattgtgaagccaggagttggttctgatcttaacaaggagatcttctatgtgccgcaacggccttatatggcagtaggaacacttcgtgaccagttaatatatcctcttacttctggccaagagagtgaactgctcactgagattggaatggtggagctattgaaaaatgttgatctagaatatttattggatcgctaccaacctgaaaaagaggttaattggggtgatgaattatctcttggagagcaacagagattgggtatggccagactattctaccacaaacccaaatttgcaattctagatgaatgcacaagtgctgtcacaactgatatggaagaacgctttgccgctaaggttcgagctatgggaacttcttgcataacaatctcccatcgtccagcgcttgttgcattccatgatgttgttctgtcattagacggtgaaggaggatggagtgttcattacaagagggatgactctgcccttctgacggatgctgaaattgattcagtgaaaagttcagatacagatcggcaaaatgatgcgatggttgttcaacgagcgtttgctgcagctagaaaggaatctgctactaattcaaaggctcagtcgtaccagacacagttaattgcaagatcacctgttgtagataaaagtgtagtgttgcctcgttttcctcaacctcaaacatcccaaagggctttaccatcaagagtagctgcaatgttaaacgtgttgatacccactatatttgacaagcaaggagctcaactgcttgctgttgcttgccttgtcgtctcaagaacgctgatctctgaccgaatagcctctttgaatgggaccactgtgaagtatgtcttggagcaagataaggcagcctttgttcgtttgattggtttgagtgttctccaaagtggtgcatcttctataattgctccttcactaaggcatttaacgcaaaggctagcgttagggtggaggattcgtttgactcaacatctgctaaggaactatttgagaaataatgcgttttacaaggttttccacatgtcaggcaatagtattgatgcggaccagagactcactcgtgacctggaaaagttaaccgctgacttgtctggacttcttactggaatggtaaagccatcggttgacattctctggttcacctggaggatgaagttactgactggtcagaggggagttgccatactttacacatatatgttacttggtcttggttttctgagacgtgttgctcccgatttcggtgatctagccggtgaagaacagcagcttgaagggaagtttcggtttatgcacgagaggctgaacactcatgctgaatctattgcattctttggaggtggagctcgagaaaaggctatggttgacaaaaaattcagggccctactggatcattctctcatgctcttgaggaagaaatggttgtatggcatacttgatgattttgtgacaaagcaacttcccaataatgtgacgtggggattgagtttattgtatgccctagaacacaagggagacagagcacttgtctccactcaaggtgaattggcacatgcattgcggtatctagcttctgttgtctcccaaagctttatggcttttggcgatattcttgaactacacaagaagttcctggagctctctggtggtattaacagaatttttgagctcgatgagtttttggatgcttctcagtcaggtgttacctcagaaaatcaaacaagtcgtttggattctcaagatctactttccttttcggaggtggatatcattacccctgctcagaaattgatggctagcaagttgtcgtgtgaaatagtttcagggaaaagcctgctcgtcacaggtccaaatggtagtggaaagacttcagtatttagagtccttagagatatctggcccactgtatgtggaagacttaccaaaccatcattggatatcaaagaacttgggtcagggaatggcatgttttttgtcccgcagcgaccttatacatgtttagggacactgagagatcaaattatataccctctatctaaagaagaagcagagaaaagggcagcaaagttgtacaccagtggagagagctcaacagaagctggaagcattctggattctcatttgaaaaccattctggagaatgttcggttagtttatctcttggaaagagacgtaggtggttgggatgctactaccaattgggaagacatattatctcttggagagcaacagagattaggcatggcacgtttattctttcacaggccgaagtttggagtccttgatgaatgcacaaatgcgacgagtgttgatgttgaggaacagctctatagagttgcacgagacatgggagtcactttcataacctcatcacaacggccggctctgatcccattccattccttggagctaaggctgattgatggagaaggaaactgggagctccgttcgatcgaacagacaacagagtgaactcagcaaaacatttttagaaaggtctatatagttgttaaagaaaaaagtaataaagttaaagccattagacgatgcaagctatatggtatgtagtatatggattcttcctcgatcgcaaggagtggaagagaatgcgtcgatgctagtgcttttgttagaattggaggatttgatttgattctagatatatataaatgtaggcgattgaattggtggagcattttgagttctcctatggagtatggtcttagctttgaacaaacaaagaatatagtgatcactcaaataatgtacagttcgtttcaatttcctttgttgggattagtttttctatcttataattaaaagaatgaaattgaagtggttgaatc

SEQ ID NO: 3995 - protein, 1337 aa, Arabidopsis thaliana
MPSLQLLQLTERGRGLVASRRKSILLAAGIVAAGGTAVYLKSRVASRRPDSSRLCNGQSDDDETLEKLTATDQNAKITTKKKKGGGLKSLQVLTAILLSQMGKMGARDLLALVATVVFRTALSNRLAKVQGFLFRAAFLRRAPLFLRLISENIMLCFMLSTLHSTSKYITGALSLRFRKILTKIIHSHYFENMVYYKISHVDGRITHPEQRIASDVPRFSSELSDLILDDLTAVTDGILYAWRLCSYASPKYIFWILAYVLGAGTAIRNFSPSFGKLMSKEQQLEGEYRQLHSRLRTHSESIAFYGGETREESHIQQKFKNLVSHMSHVLHDHWWFGMIQDFLLKYLGATVAVILIIEPFFSGHLRPDDSTLGRAEMLSNIRYHTSVIISLFQALGTLSISSRRLNRLSGYADRIHELMAVSRELSGDDKSSFQRNRSRNYLSEANYVEFSDVKVVTPTGNVLVEDLTLRVEQGSNLLITGPNGSGKSSLFRVLGGLWPLVSGHIVKPGVGSDLNKEIFYVPQRPYMAVGTLRDQLIYPLTSGQESELLTEIGMVELLKNVDLEYLLDRYQPEKEVNWGDELSLGEQQRLGMARLFYHKPKFAILDECTSAVTTDMEERFAAKVRAMGTSCITISHRPALVAFHDVVLSLDGEGGWSVHYKRDDSALLTDAEIDSVKSSDTDRQNDAMVVQRAFAAARKESATNSKAQSYQTQLIARSPVVDKSVVLPRFPQPQTSQRALPSRVAAMLNVLIPTIFDKQGAQLLAVACLVVSRTLISDRIASLNGTTVKYVLEQDKAAFVRLIGLSVLQSGASSIIAPSLRHLTQRLALGWRIRLTQHLLRNYLRNNAFYKVFHMSGNSIDADQRLTRDLEKLTADLSGLLTGMVKPSVDILWFTWRMKLLTGQRGVAILYTYMLLGLGFLRRVAPDFGDLAGEEQQLEGKFRFMHERLNTHAESIAFFGGGAREKAMVDKKFRALLDHSLMLLRKKWLYGILDDFVTKQLPNNVTWGLSLLYALEHKGDRALVSTQGELAHALRYLASVVSQSFMAFGDILELHKKFLELSGGINRIFELDEFLDASQSGVTSENQTSRLDSQDLLSFSEVDIITPAQKLMASKLSCEIVSGKSLLVTGPNGSGKTSVFRVLRDIWPTVCGRLTKPSLDIKELGSGNGMFFVPQRPYTCLGTLRDQIIYPLSKEEAEKRAAKLYTSGESSTEAGSILDSHLKTILENVRLVYLLERDVGGWDATTNWEDILSLGEQQRLGMARLFFHRPKFGVLDECTNATSVDVEEQLYRVARDMGVTFITSSQRPALIPFHSLELRLIDGEGNWELRSIEQTTE

SEQ ID NO: 3996 - protein, 1237 aa, Arabidopsis thaliana
MGKMGARDLLALVATVVFRTALSNRLAKVQGFLFRAAFLRRAPLFLRLISENIMLCFMLSTLHSTSKYITGALSLRFRKILTKIIHSHYFENMVYYKISHVDGRITHPEQRIASDVPRFSSELSDLILDDLTAVTDGILYAWRLCSYASPKYIFWILAYVLGAGTAIRNFSPSFGKLMSKEQQLEGEYRQLHSRLRTHSESIAFYGGETREESHIQQKFKNLVSHMSHVLHDHWWFGMIQDFLLKYLGATVAVILIIEPFFSGHLRPDDSTLGRAEMLSNIRYHTSVIISLFQALGTLSISSRRLNRLSGYADRIHELMAVSRELSGDDKSSFQRNRSRNYLSEANYVEFSDVKVVTPTGNVLVEDLTLRVEQGSNLLITGPNGSGKSSLFRVLGGLWPLVSGHIVKPGVGSDLNKEIFYVPQRPYMAVGTLRDQLIYPLTSGQESELLTEIGMVELLKNVDLEYLLDRYQPEKEVNWGDELSLGEQQRLGMARLFYHKPKFAILDECTSAVTTDMEERFAAKVRAMGTSCITISHRPALVAFHDVVLSLDGEGGWSVHYKRDDSALLTDAEIDSVKSSDTDRQNDAMVVQRAFAAARKESATNSKAQSYQTQLIARSPVVDKSVVLPRFPQPQTSQRALPSRVAAMLNVLIPTIFDKQGAQLLAVACLVVSRTLISDRIASLNGTTVKYVLEQDKAAFVRLIGLSVLQSGASSIIAPSLRHLTQRLALGWRIRLTQHLLRNYLRNNAFYKVFHMSGNSIDADQRLTRDLEKLTADLSGLLTGMVKPSVDILWFTWRMKLLTGQRGVAILYTYMLLGLGFLRRVAPDFGDLAGEEQQLEGKFRFMHERLNTHAESIAFFGGGAREKAMVDKKFRALLDHSLMLLRKKWLYGILDDFVTKQLPNNVTWGLSLLYALEHKGDRALVSTQGELAHALRYLASVVSQSFMAFGDILELHKKFLELSGGINRIFELDEFLDASQSGVTSENQTSRLDSQDLLSFSEVDIITPAQKLMASKLSCEIVSGKSLLVTGPNGSGKTSVFRVLRDIWPTVCGRLTKPSLDIKELGSGNGMFFVPQRPYTCLGTLRDQIIYPLSKEEAEKRAAKLYTSGESSTEAGSILDSHLKTILENVRLVYLLERDVGGWDATTNWEDILSLGEQQRLGMARLFFHRPKFGVLDECTNATSVDVEEQLYRVARDMGVTFITSSQRPALIPFHSLELRLIDGEGNWELRSIEQTTE

SEQ ID NO: 3997 - protein, 1234 aa, Arabidopsis thaliana
MGARDLLALVATVVFRTALSNRLAKVQGFLFRAAFLRRAPLFLRLISENIMLCFMLSTLHSTSKYITGALSLRFRKILTKIIHSHYFENMVYYKISHVDGRITHPEQRIASDVPRFSSELSDLILDDLTAVTDGILYAWRLCSYASPKYIFWILAYVLGAGTAIRNFSPSFGKLMSKEQQLEGEYRQLHSRLRTHSESIAFYGGETREESHIQQKFKNLVSHMSHVLHDHWWFGMIQDFLLKYLGATVAVILIIEPFFSGHLRPDDSTLGRAEMLSNIRYHTSVIISLFQALGTLSISSRRLNRLSGYADRIHELMAVSRELSGDDKSSFQRNRSRNYLSEANYVEFSDVKVVTPTGNVLVEDLTLRVEQGSNLLITGPNGSGKSSLFRVLGGLWPLVSGHIVKPGVGSDLNKEIFYVPQRPYMAVGTLRDQLIYPLTSGQESELLTEIGMVELLKNVDLEYLLDRYQPEKEVNWGDELSLGEQQRLGMARLFYHKPKFAILDECTSAVTTDMEERFAAKVRAMGTSCITISHRPALVAFHDVVLSLDGEGGWSVHYKRDDSALLTDAEIDSVKSSDTDRQNDAMVVQRAFAAARKESATNSKAQSYQTQLIARSPVVDKSVVLPRFPQPQTSQRALPSRVAAMLNVLIPTIFDKQGAQLLAVACLVVSRTLISDRIASLNGTTVKYVLEQDKAAFVRLIGLSVLQSGASSIIAPSLRHLTQRLALGWRIRLTQHLLRNYLRNNAFYKVFHMSGNSIDADQRLTRDLEKLTADLSGLLTGMVKPSVDILWFTWRMKLLTGQRGVAILYTYMLLGLGFLRRVAPDFGDLAGEEQQLEGKFRFMHERLNTHAESIAFFGGGAREKAMVDKKFRALLDHSLMLLRKKWLYGILDDFVTKQLPNNVTWGLSLLYALEHKGDRALVSTQGELAHALRYLASVVSQSFMAFGDILELHKKFLELSGGINRIFELDEFLDASQSGVTSENQTSRLDSQDLLSFSEVDIITPAQKLMASKLSCEIVSGKSLLVTGPNGSGKTSVFRVLRDIWPTVCGRLTKPSLDIKELGSGNGMFFVPQRPYTCLGTLRDQIIYPLSKEEAEKRAAKLYTSGESSTEAGSILDSHLKTILENVRLVYLLERDVGGWDATTNWEDILSLGEQQRLGMARLFFHRPKFGVLDECTNATSVDVEEQLYRVARDMGVTFITSSQRPALIPFHSLELRLIDGEGNWELRSIEQTTE

SEQ ID NO: 3998 - DNA, 2146 bp, Arabidopsis thaliana
aaaaatgtggaatcttgtttcgtctcctttcttcttcgttgacacaattagggttcacttcaattctcttctttggatcgtattacttggggaaatttaaagatctggctctgggctcttctgggttagctaggatccaaattctcaggtgaaagacctgaacttttgctccatcttaatcgctttttttttcttctctggctggtctggtaatatatacagagaattgatagtgtaagaattgtaattctgctttagtgttttgatcgagtttctgagcttagtatcgtgggtttttgggttcaggggaggataaagtagcttaagaactgaggatctacttacttaagctaggcactttcagctgaattttgattcgtttctggactcattagttgggtaatgattagttttagtttctctttggtgaatattttgtttgattaggtaattactagacagtagtttctcattgggttttggttgatttaggataattcttgggtcatatttggtgttgggtctgttggttggttttttagattggtagtgaggtttttactataggtattggatttttgtggagatggataggcctagacaaaatgatcatttgggtgtgaataggattgggaaaaatatcagaaagagtcctcttcatcaatcgactttcgctgccagtactagcaacggtgccgctccaaggcttcaaacacagcctcaggtttataacataagcaagaacgactttagaagtattgttcagcagctaacgggttctccatcacgtgaaagccttcctcggcctcctcagaacaactcgctaaggcctcagaatacacggttgcagcggatcagaccatcccccttaacgcagttaaaccggcctgcggttcctctcccttccatggctccgccacagtctcatcctcagtttgctagacagcctccacaccagccacctttcccacaaaccacacaacaaccaatgatgggtcacagggaccagttttggtctaatacagctgagtctcccgtctcagagtatatgcgttatcttcaaagttcacttggagattcaggacccaatgctaaccaaatgcagccaggtcatgagcagcggccttatatcccaggtcatgagcaacggccatatgtgccaggtaatgagcagcagccatatatgccaggtaatgagcagcggccatatatcccaggtcatgagcagcggtcatatatgccagctcaatctcagtctcagtctcaacctcaacctcaacctcaacctcagcaacatatgatgcctggaccgcaacctcgaatgaacatgcagggccctcttcaacctaaccagtatctaccaccacccgggttagttcctagcccagtgcctcataatcttccttctcctcggttcaatgctcctgtacctgtgacgcctactcagccctctcccatgttcagtcagatgtatggtggatttccttctcctcgatataacggttttggaccactgcagtcacctacatcccaatttcttcaaccatctcctaccggttacccgaatatgttctctccgagatcgccttacccattgctgtcaccaggagttcagtatcctcaaccacttaccccaaacttctcattttcacaaattgctcaacaaggaagtcttggacccggtgcaggtccaagtcaaggtcctcctcagcctcctccttctccagggctcatgttcccgttatctccatccgggttcttccccatgccaagtccaagatggaatgattactaggtgctctttttctctccatcagattcattaaattaagtaaatcggattatgtttattcaggtttccttaggttagtctgtacctttgaaagaagcttaaaacttcagagcctacagtggaatagacgcagcagaatagatgcgtaaaacactaaaggagcttttagaagaaagaaagatttataggggtttttttctctgtgggattttaataggtcaaaagttgggaatcttgggatgctgatgattacctttgtttttgtttatcacaaacttagttttatctttgcttacattgtacacatactacagacgaactcagttcaatttatatgattttttgggtgttttt

SEQ ID NO: 3999 - protein, 402 aa, Arabidopsis thaliana
MDRPRQNDHLGVNRIGKNIRKSPLHQSTFAASTSNGAAPRLQTQPQVYNISKNDFRSIVQQLTGSPSRESLPRPPQNNSLRPQNTRLQRIRPSPLTQLNRPAVPLPSMAPPQSHPQFARQPPHQPPFPQTTQQPMMGHRDQFWSNTAESPVSEYMRYLQSSLGDSGPNANQMQPGHEQRPYIPGHEQRPYVPGNEQQPYMPGNEQRPYIPGHEQRSYMPAQSQSQSQPQPQPQPQQHMMPGPQPRMNMQGPLQPNQYLPPPGLVPSPVPHNLPSPRFNAPVPVTPTQPSPMFSQMYGGFPSPRYNGFGPLQSPTSQFLQPSPTGYPNMFSPRSPYPLLSPGVQYPQPLTPNFSFSQIAQQGSLGPGAGPSQGPPQPPPSPGLMFPLSPSGFFPMPSPRWNDY

SEQ ID NO: 4000 - protein, 295 aa, Arabidopsis thaliana
MAPPQSHPQFARQPPHQPPFPQTTQQPMMGHRDQFWSNTAESPVSEYMRYLQSSLGDSGPNANQMQPGHEQRPYIPGHEQRPYVPGNEQQPYMPGNEQRPYIPGHEQRSYMPAQSQSQSQPQPQPQPQQHMMPGPQPRMNMQGPLQPNQYLPPPGLVPSPVPHNLPSPRFNAPVPVTPTQPSPMFSQMYGGFPSPRYNGFGPLQSPTSQFLQPSPTGYPNMFSPRSPYPLLSPGVQYPQPLTPNFSFSQIAQQGSLGPGAGPSQGPPQPPPSPGLMFPLSPSGFFPMPSPRWNDY

SEQ ID NO: 4001 - protein, 268 aa, Arabidopsis thaliana
MMGHRDQFWSNTAESPVSEYMRYLQSSLGDSGPNANQMQPGHEQRPYIPGHEQRPYVPGNEQQPYMPGNEQRPYIPGHEQRSYMPAQSQSQSQPQPQPQPQQHMMPGPQPRMNMQGPLQPNQYLPPPGLVPSPVPHNLPSPRFNAPVPVTPTQPSPMFSQMYGGFPSPRYNGFGPLQSPTSQFLQPSPTGYPNMFSPRSPYPLLSPGVQYPQPLTPNFSFSQIAQQGSLGPGAGPSQGPPQPPPSPGLMFPLSPSGFFPMPSPRWNDY

SEQ ID NO: 4002 - DNA, 2347 bp, Arabidopsis thaliana
ccaaggcatcgtttaataaatcctcccgtttcttttctgcatctttcttctcttctaatccagatgggaccgcgacagtgtttggtagtctggttggttctgtcaaacagcaatggcccaaactagttcttgggcttgctcttcttggagcaggactgacattatactccaatggagtaggggggaacaaccagttgcttcaacagccagatgttaccagcactagtacagaagatgtctcttcaagtacgaagccactgatccggcaagtgcagaaacttcccaagagaattaagaaactacttgagatgatccctcaccaggaggtcaatgaggaagaagcttccctctttgactttttgtggttactgctagcaagcgtcatatttgtgcctctatttcagaaaattcctggaggcagccctgttcttgggtatttggcagctggaattctgattggtccgtatggtctttcgataatccgtaatgtgcacggaaccagggccatcgcagaatttggagtagttttgttgcttttcaacatcggccttgagctatctgttgaaagactgagttccatgaagaaatatgtttttggattaggctcagctcaggttctggtgacggcagcagtagttggattgcttgcccattatgttgctggtcaggctggtccagcagcaatagtgattggaaatggcctggctctgtcgtccactgctgttgtccttcaggttctacaagaacgaggcgagagtacatctagacatggaagggcttcattttccgtcttgcttttccaggatctagctgtagttgttttactgattctcatcccacttatttcacctaattcatcgaaaggagggattggatttcaagccattgctgaagctcttgggcttgctgcagtcaaagcagcagtggctattactgcaataattgctggtggccgtctacttcttcgaccaatctacaagcaaattgcagaaaatcgaaacgccgagatattctctgccaacacgcttctcgttattcttgggactagtttactgacagctagggctggactttccatggcattaggagcgtttttggctggtctactccttgcagagacagaattttcgttgcaagtagaatcagatattgctccatatcgtggtcttctgttgggactcttcttcatgacggttggaatgtcaattgatccgaaattacttctctccaacttccctgtcatagtgggaactttgggactcttgatagtgggcaaaactatgttagtcgtgattatgggaaaattgttcggcatatcaataatatctgcaattcgggtcggtctactattggccccaggcggagagtttgcatttgttgctttcggagaagctgttaatcagggtataatgtctcctcagttatcttcgttgctattccttgtcgtgggaatctcaatggctatcacaccctggttagctgctggtggccagttaattgcatctcgttttgagttgcatgatgttcgaagtttattgcccgtcgagagtgagacagatgatttgcagggtcacataattatttgtggatttggtcgagttggtcagataattgctcaacttctctcggaaagacttatcccatatgttgcccttgatgtcagcagtgatagagtgactatcgggcgttccttggatcttcctgtttatttcggagacgctggtagtaaagaggttctccacaaaattggagctgggagagcatgtgctgctgtggttgccttagacgcaccaggagcaaactacagatgtgtttgggctttgagcaagttttaccccaatgtcaaaacttttgtccgtgctcacgatgttgttcatggtcttaatctagaaaaagccggtgctactgcagttgtcccggagactctggagcctagtctacagttggcagctgctgttcttgctcaggcaaaattaccgacatcggaaattgcaaacacgattaacgagttcagaacccgtcacttgtctgaactgaccgagctatgtgaagcaagcggaagctctctaggctatgggtactctaggacgagtaagcctaaacctcaaccatcggatgcatctggcgataaccagataatcgaaggaggcacagtcgtaatctgatgacgttctccattctggtgagaaaaagaagagtatttctcctttggtgttcttcttaaaccaccatcaccaacttgggttgcagtgcgtggtgaagtgatggatccatcagatgatgtgtagtgtgactaatatattcattatatgttcagtacatatctctcatttaagtctttgatctc

SEQ ID NO: 4003 - protein, 720 aa, Arabidopsis thaliana
KASFNKSSRFFSASFFSSNPDGTATVFGSLVGSVKQQWPKLVLGLALLGAGLTLYSNGVGGNNQLLQQPDVTSTSTEDVSSSTKPLIRQVQKLPKRIKKLLEMIPHQEVNEEEASLFDFLWLLLASVIFVPLFQKIPGGSPVLGYLAAGILIGPYGLSIIRNVHGTRAIAEFGVVLLLFNIGLELSVERLSSMKKYVFGLGSAQVLVTAAVVGLLAHYVAGQAGPAAIVIGNGLALSSTAVVLQVLQERGESTSRHGRASFSVLLFQDLAVVVLLILIPLISPNSSKGGIGFQAIAEALGLAAVKAAVAITAIIAGGRLLLRPIYKQIAENRNAEIFSANTLLVILGTSLLTARAGLSMALGAFLAGLLLAETEFSLQVESDIAPYRGLLLGLFFMTVGMSIDPKLLLSNFPVIVGTLGLLIVGKTMLVVIMGKLFGISIISAIRVGLLLAPGGEFAFVAFGEAVNQGIMSPQLSSLLFLVVGISMAITPWLAAGGQLIASRFELHDVRSLLPVESETDDLQGHIIICGFGRVGQIIAQLLSERLIPYVALDVSSDRVTIGRSLDLPVYFGDAGSKEVLHKIGAGRACAAVVALDAPGANYRCVWALSKFYPNVKTFVRAHDVVHGLNLEKAGATAVVPETLEPSLQLAAAVLAQAKLPTSEIANTINEFRTRHLSELTELCEASGSSLGYGYSRTSKPKPQPSDASGDNQIIEGGTVVI

SEQ ID NO: 4004 - protein, 618 aa, Arabidopsis thaliana
MIPHQEVNEEEASLFDFLWLLLASVIFVPLFQKIPGGSPVLGYLAAGILIGPYGLSIIRNVHGTRAIAEFGVVLLLFNIGLELSVERLSSMKKYVFGLGSAQVLVTAAVVGLLAHYVAGQAGPAAIVIGNGLALSSTAVVLQVLQERGESTSRHGRASFSVLLFQDLAVVVLLILIPLISPNSSKGGIGFQAIAEALGLAAVKAAVAITAIIAGGRLLLRPIYKQIAENRNAEIFSANTLLVILGTSLLTARAGLSMALGAFLAGLLLAETEFSLQVESDIAPYRGLLLGLFFMTVGMSIDPKLLLSNFPVIVGTLGLLIVGKTMLVVIMGKLFGISIISAIRVGLLLAPGGEFAFVAFGEAVNQGIMSPQLSSLLFLVVGISMAITPWLAAGGQLIASRFELHDVRSLLPVESETDDLQGHIIICGFGRVGQIIAQLLSERLIPYVALDVSSDRVTIGRSLDLPVYFGDAGSKEVLHKIGAGRACAAVVALDAPGANYRCVWALSKFYPNVKTFVRAHDVVHGLNLEKAGATAVVPETLEPSLQLAAAVLAQAKLPTSEIANTINEFRTRHLSELTELCEASGSSLGYGYSRTSKPKPQPSDASGDNQIIEGGTVVI

SEQ ID NO: 4005 - protein, 528 aa, Arabidopsis thaliana
MKKYVFGLGSAQVLVTAAVVGLLAHYVAGQAGPAAIVIGNGLALSSTAVVLQVLQERGESTSRHGRASFSVLLFQDLAVVVLLILIPLISPNSSKGGIGFQAIAEALGLAAVKAAVAITAIIAGGRLLLRPIYKQIAENRNAEIFSANTLLVILGTSLLTARAGLSMALGAFLAGLLLAETEFSLQVESDIAPYRGLLLGLFFMTVGMSIDPKLLLSNFPVIVGTLGLLIVGKTMLVVIMGKLFGISIISAIRVGLLLAPGGEFAFVAFGEAVNQGIMSPQLSSLLFLVVGISMAITPWLAAGGQLIASRFELHDVRSLLPVESETDDLQGHIIICGFGRVGQIIAQLLSERLIPYVALDVSSDRVTIGRSLDLPVYFGDAGSKEVLHKIGAGRACAAVVALDAPGANYRCVWALSKFYPNVKTFVRAHDVVHGLNLEKAGATAVVPETLEPSLQLAAAVLAQAKLPTSEIANTINEFRTRHLSELTELCEASGSSLGYGYSRTSKPKPQPSDASGDNQIIEGGTVVI

SEQ ID NO: 4006 - DNA, 2582 bp, Arabidopsis thaliana
aaaataaaatgatattcattggcataaaagctattttcaaagcaaagtggaacacttgcattttgcattgagcatcaaattcctccaccatctcctctcctacttctcatcttcatcaccaccgtctaaagattcaaccttttgtaactgcttccaatggcgttagctctctccgtcgcacctacatcttcttctttgtcttccctcctctctcggacccctaacccttctcctaatttcagaacaactcatctgaatttcggttctcaaaggaggatttacacaatcaatcctctccttagatcctttaaatgccttcaatcatcttcaagagacgtaaatgcgtcacctttctcaatctcagctattgcttcttcttcttcttcatcacagaccacagagcttgtaccctataagcttcagagattagtcaaggaattcaaatccttgacagagccaattgatcgactcaaatgggttctccattacgctagtctccttcctcaaatgcccgagtcgtccaagactgaatcaaacagagttatgggctgcacagctcgtgtttggctagatgctgagttaggtcaagatgggaagatgaggttttgtgcagatagtgattcagatgtgtcgaaagggatgtgttcttgtttgattcaagttcttgatgaggcttctcctgtagaagttatggagttgaagactgaggatttagctgagcttaatgttggtttgttgggtggagagagatcgagagttaacacttggtataatgttcttgtgagtatgcagaagaagactcgacgattagtagcggagagggaaggtaaagttccttcctttgagccatttccttcacttgtgttaacggctcatggcattgaagctaaaggaagctttgctcaagctcaggcgaaatatttgtttccggaggagtcacgggttgaagaacttgtcaatgtgttgaaggaaaagaagataggagtggttgctcatttctatatggatccagaagtgcaaggggtcttgactgctgctcaaaagcattggccacatatctctatatctgattctcttgtcatggcagactcagctgtcacgatggctaaagctggatgtcagtttataacagttcttggtgttgatttcatgtccgaaaatgttcgtgccatcctagatcaagctgggtttgaaaaggttggtgtgtacaggatgtcagatgagaccattggttgttcacttgctgacgctgcttctgctcctgcttacttgaattatcttgaagctgcttctcgttctcctccttcactgcatgttgtttatataaatacatctttggagacaaaagcttttgctcatgagcttgtacctaccattacttgcacttcatctaatgttgtacagacgattctgcaggcgtttgctcaaatgccagagttaactgtttggtatggtcctgattcttacatgggagcgaatattgtaaagttattccagcagatgacattgatgactaatgaagaaatcgccaatattcaccctaaacacagcttagattccattaaatcattgcttccccgtcttcactatttccaggaaggaacctgcattgtacatcatctattcggtcacgaggtagtggagagaataaagtacatgtactgtgacgcctttcttacagcacatcttgaggttccaggtgaaatgttttcactagcaatggaagcaaagaaaagagagatgggtgttgttggatcaacacaaaacatactagacttcatcaagcagaaggttcaggaagcagtggaccggaatgttgatgaccacctccagtttgttcttggaacagagtcaggaatggtaacatcgattgtcgcggtgatcagaagtctgctaggttcttctgctaactcgaaattgaaggtggaagtagtgtttcctgtctcatcagactcgatgacaaaaacttcttcagatagttcaaactccattaaagttggtgatgtggcactaccggttgtaccgggagtagcaggtggtgaaggttgctctattcatggcggatgtgcatcatgcccatatatgaagatgaactcgcttagctcgctcttgaaagtttgccacaaactacctgacttggaaaatgtatatggaggattcatagcggagcgatttaaaagacaaactcctcaaggaaaactcatcgcggatgtcgggtgtgagccgatacttcacatgaggcacttccaagcgaataaggagctgccagacaagcttgttcatcaggtattaagttgtgagagcaagagatgaccatgaccaagttgcccttaaaagctatgtatgaagaaattgggtgactttagttataattatatggtttgacgttatggtggaacatgatgatgtggttatggttcttcctgcaataattatcatacggattacattacatattgtatacaatgatataaacaagagcagaagaagcaatgtggatatatttagagaggcttaggagagaagcttatttgatgtattattattgtttgggctctttgcaatgagcattaagatatatt

SEQ ID NO: 4007 - protein, 718 aa, Arabidopsis thaliana
MALALSVAPTSSSLSSLLSRTPNPSPNFRTTHLNFGSQRRIYTINPLLRSFKCLQSSSRDVNASPFSISAIASSSSSSQTTELVPYKLQRLVKEFKSLTEPIDRLKWVLHYASLLPQMPESSKTESNRVMGCTARVWLDAELGQDGKMRFCADSDSDVSKGMCSCLIQVLDEASPVEVMELKTEDLAELNVGLLGGERSRVNTWYNVLVSMQKKTRRLVAEREGKVPSFEPFPSLVLTAHGIEAKGSFAQAQAKYLFPEESRVEELVNVLKEKKIGVVAHFYMDPEVQGVLTAAQKHWPHISISDSLVMADSAVTMAKAGCQFITVLGVDFMSENVRAILDQAGFEKVGVYRMSDETIGCSLADAASAPAYLNYLEAASRSPPSLHVVYINTSLETKAFAHELVPTITCTSSNVVQTILQAFAQMPELTVWYGPDSYMGANIVKLFQQMTLMTNEEIANIHPKHSLDSIKSLLPRLHYFQEGTCIVHHLFGHEVVERIKYMYCDAFLTAHLEVPGEMFSLAMEAKKREMGVVGSTQNILDFIKQKVQEAVDRNVDDHLQFVLGTESGMVTSIVAVIRSLLGSSANSKLKVEVVFPVSSDSMTKTSSDSSNSIKVGDVALPVVPGVAGGEGCSIHGGCASCPYMKMNSLSSLLKVCHKLPDLENVYGGFIAERFKRQTPQGKLIADVGCEPILHMRHFQANKELPDKLVHQVLSCESKR

SEQ ID NO: 4008 - protein, 601 aa, Arabidopsis thaliana
MPESSKTESNRVMGCTARVWLDAELGQDGKMRFCADSDSDVSKGMCSCLIQVLDEASPVEVMELKTEDLAELNVGLLGGERSRVNTWYNVLVSMQKKTRRLVAEREGKVPSFEPFPSLVLTAHGIEAKGSFAQAQAKYLFPEESRVEELVNVLKEKKIGVVAHFYMDPEVQGVLTAAQKHWPHISISDSLVMADSAVTMAKAGCQFITVLGVDFMSENVRAILDQAGFEKVGVYRMSDETIGCSLADAASAPAYLNYLEAASRSPPSLHVVYINTSLETKAFAHELVPTITCTSSNVVQTILQAFAQMPELTVWYGPDSYMGANIVKLFQQMTLMTNEEIANIHPKHSLDSIKSLLPRLHYFQEGTCIVHHLFGHEVVERIKYMYCDAFLTAHLEVPGEMFSLAMEAKKREMGVVGSTQNILDFIKQKVQEAVDRNVDDHLQFVLGTESGMVTSIVAVIRSLLGSSANSKLKVEVVFPVSSDSMTKTSSDSSNSIKVGDVALPVVPGVAGGEGCSIHGGCASCPYMKMNSLSSLLKVCHKLPDLENVYGGFIAERFKRQTPQGKLIADVGCEPILHMRHFQANKELPDKLVHQVLSCESKR

SEQ ID NO: 4009 - protein, 589 aa, Arabidopsis thaliana
MGCTARVWLDAELGQDGKMRFCADSDSDVSKGMCSCLIQVLDEASPVEVMELKTEDLAELNVGLLGGERSRVNTWYNVLVSMQKKTRRLVAEREGKVPSFEPFPSLVLTAHGIEAKGSFAQAQAKYLFPEESRVEELVNVLKEKKIGVVAHFYMDPEVQGVLTAAQKHWPHISISDSLVMADSAVTMAKAGCQFITVLGVDFMSENVRAILDQAGFEKVGVYRMSDETIGCSLADAASAPAYLNYLEAASRSPPSLHVVYINTSLETKAFAHELVPTITCTSSNVVQTILQAFAQMPELTVWYGPDSYMGANIVKLFQQMTLMTNEEIANIHPKHSLDSIKSLLPRLHYFQEGTCIVHHLFGHEVVERIKYMYCDAFLTAHLEVPGEMFSLAMEAKKREMGVVGSTQNILDFIKQKVQEAVDRNVDDHLQFVLGTESGMVTSIVAVIRSLLGSSANSKLKVEVVFPVSSDSMTKTSSDSSNSIKVGDVALPVVPGVAGGEGCSIHGGCASCPYMKMNSLSSLLKVCHKLPDLENVYGGFIAERFKRQTPQGKLIADVGCEPILHMRHFQANKELPDKLVHQVLSCESKR

(The sequence listing continues in the following parts.)

What is claimed is:

1. An isolated nucleic acid molecule comprising:
a) a nucleic acid having a nucleotide sequence which encodes an amino acid sequence exhibiting at least 40% sequence identity to an amino acid sequence encoded by
(1) a nucleotide sequence described in The tables or a fragment thereof; or
(2) a complement of a nucleotide sequence shown in The tables or a fragment thereof;
b) a nucleic acid which is the reverse of the nucleotide sequence according to subparagraph (a), such that the reverse nucleotide sequence has a sequence order which is the reverse of the sequence order of the nucleotide sequence according to subparagraph (a);
c) a nucleic acid capable of hybridizing to a nucleic acid having a sequence selected from the group consisting of:
(1) a nucleotide sequence which is shown in The tables; and
(2) a nucleotide sequence which is complementary to a nucleotide sequence shown in The tables, under conditions that permit formation of a nucleic acid duplex at a temperature from about 40° C. and 48° C. below the melting temperature of the nucleic acid duplex;
with the proviso that said sequence a), b), or c) is not any of the sequences described in the Tables of any of Patent Publication Nos. WO200040695, CA2300692 A1, EP1033405 A2, CA2302828A1 and EP1059354 A2.

2. An isolated nucleic acid molecule comprising a nucleic acid having a nucleotide sequence which exhibits at least 65% sequence identity to
a) a nucleotide sequence shown in The tables or a fragment thereof; or
b) a complement of a nucleotide sequence described in The tables or a fragment thereof;
with the proviso that said sequence a) or b) is not any of the sequences described in the Tables of any of Patent Publication Nos. WO200040695, CA2300692 A1, EP1033405 A2, CA2302828A1 and EP1059354 A2.

3. The nucleic acid molecule according to claim 1, wherein said nucleic acid comprises an open reading frame.

4. The isolated nucleic acid molecule of claim 1, wherein said nucleic acid is capable of functioning as a promoter, a 3′ end termination sequence, an untranslated region (UTR), or as a regulatory sequence.

5. The isolated nucleic acid molecule of claim 4, wherein (a) when said nucleic acid is a promoter it comprises a sequence selected from the group consisting of a TATA box sequence, a CAAT box sequence, a motif of GCAATCG or any transcription-factor binding sequence, and any combination thereof; and (b) when said nucleic acid sequence is a regulatory sequence it is capable of promoting seed-specific expression, embryo-specific expression, ovule-specific expression, tapetum-specific expression or root-specific expression of a sequence or any combination thereof.

6. A vector construct comprising:
a) a first nucleic acid having a regulatory sequence capable of causing transcription and/or translation; and
b) a second nucleic acid having the sequence of the isolated nucleic acid molecule according to claim 1;
wherein said first and second nucleic acids are operably linked and
wherein said second nucleic acid is heterologous to any element in said vector construct.

7. The vector construct according to claim 6, wherein said first nucleic acid is native to said second nucleic acid.

8. The vector construct according to claim 6, wherein said first nucleic acid is heterologous to said second nucleic acid.

9. A host cell comprising an isolated nucleic acid molecule according to claim 1, wherein said nucleic acid molecule is flanked by exogenous sequence.

10. A host cell comprising a vector construct of claim 6.

11. An isolated polypeptide comprising an amino acid sequence
a) exhibiting at least 40%, or 75%, or 85%, or 90% sequence identity of an amino acid sequence encoded by a sequence shown in The tables or a fragment thereof; and
b) capable of exhibiting at least one of the biological activities of the polypeptide encoded by said nucleotide sequence shown in The tables or a fragment thereof;
with the proviso that said sequence a) or b) is not any of the sequences described in the Tables of any of Patent Publication Nos. WO200040695, CA2300692 A1, EP1033405 A2, CA2302828A1 and EP1059354 A2.

12. An antibody capable of binding the isolated polypeptide of claim 11.

13. A method of introducing an isolated nucleic acid into a host cell comprising:
a) providing an isolated nucleic acid molecule according to claim 1; and
b) contacting said isolated nucleic with said host cell under conditions that permit insertion of said nucleic acid into said host cell.

14. A method of transforming a host cell which comprises contacting a host cell with a vector construct according to claim 6.

15. A method of modulating transcription and/or translation of a nucleic acid in a host cell comprising:
a) providing the host cell of claim 9; and
b) culturing said host cell under conditions that permit transcription or translation.

16. A method for detecting a nucleic acid in a sample which comprises:
a) providing an isolated nucleic acid molecule according to claim 1;
b) contacting said isolated nucleic acid molecule with a sample under conditions which permit a comparison of the sequence of said isolated nucleic acid molecule with the sequence of DNA in said sample; and
c) analyzing the result of said comparison.

17. A plant or cell of a plant which comprises a nucleic acid molecule according to claim 1 which is exogenous or heterologous to said plant or plant cell.

18. A plant or cell of a plant which comprises a vector construct according to claim 6.

19. A plant which has been regenerated from a plant cell according to claim 17.

20. A plant which has been regenerated from a plant cell according to claim 18.
